United States Patent Application Publication US 2014/0057251 A1 - sequence listing, part 56

SEQ ID NO: 77460 - DNA, 815 bp, Cannabis sativa
  modified_base (465)..(468): a, c, t, g, unknown or other
catttccaccaaattagtgtagaattttcacaacactatttcactctaaagagaccaatttatattggtgtataaaccttatacttattcttttaattgcccacaggttggtagctttctaacatttgctccttttttaagtgtgagtgagataaagattgtacctctttgttactacctttggttgtttatttatcagaaataaataaataaaaatgtaaaaaatgttaccaaggacaagaatgaactttcacacccaaaaatccctatatataaatacatatttttctcaccgataccataaccctaccttaccttctctttctatatctcaatcaacgatcagcagctcaaagcatttcttcagcttttgttgcagatctctcttaaagcaaatgaagagttagtacaggtatttacctctttgaaaatttattttactgtaattatttatttatttatttnnnnttttttttaaaaaaaagaaaaatagaaacagaagcagagagggaagatcatatatattatatataattatatatgtggatgaatgaatgagctataactagctcatctcttacaacttgtttcctaaacttatttgattttcttctgattcaaaaggaaaataaaaaatgtgtcattctccaactctgctcaatccaaggtataattactaagctcaaactatttttcttttcaatatttattatctttttacaaatattaaaatagaattttgttcttattattaagtaatgattgttatgaaaagcacatccactctctatacaaatattgaaatagaatcacca

SEQ ID NO: 77461 - DNA, 1487 bp, Cannabis sativa
  modified_base (826)..(868): a, c, t, g, unknown or other
tctcaatagttcgaggggaatttctaacggcaaaaaaagttcaggggacacgatttagtacatatcaaagttcggggggaaaaattgctaattagccaattatttggttttgtatcggttgtacacaccgatgccaatagttatatatatatatatatatttcatttttttgcttcaattttttttagcatcagatatacaaccgtcgttaattaataattatttgtgcgcatcgtagataactaaaacaaaaaaaaaaaaaattgaaataatttgtgtcggtcaacaaatttgaccaaacgcattaattaacgccaaacccattttgtagtatatataaaattatttactactgcaagtactatttttatttgagaaagtaaccaattgttataactaattattacagtaatgttttaataattattattgtaaataaattattttcttgcaaaataccaaatttcactcaacatcagagaatctcattaatatatcatattgttaatcatgcaatcgtatatacacgccaatacatatatatgatcacacaatcacacatacacatatatttatgtgcaatatagacaatatatataattgatatgtaacacatatcaaagctatatataattatatacctcttaaagttaatcaagtgttcttaaatctttttatatgaagtgtcctaggtctataaagacattcttcataatttaaataataaattgttcttaattaaattttttcagggatcatcaacttgttattgatatagttcaaattcgggttcaatctatgtttacaaaaaataataataataatnnnnnnnnnnnnnnnnnnnnnnnnnnnnnnnnnnnnnnnnnnnataataataataataatgaacaatgtctttcaagttaaactatgggaaatgaatttaagacaaataatggagtaaattttttcacatgttacgacacttggttctttgattctcttgcccactttttcttttttatttatttatttggattctcttgcccacttcaatacatgcttatttgctttctcagcctgcaagagttttaaccaaaattaacatcttgtcatgaaaatttaaaagaagattcattcataactatatataaatttacctctttttcccaatcacaacgaatgataatgatggctaatataaaagtttgaactgtagtccctccaaaaatcatgccagcccaaattccctaatattttgtgtttgttattttgcaagtattataatctaagatccataatatttttttattaacttttatattaaattaatttatgttaaacttaccataactccatggtggaatccccagcccatcaataacccaagtggcaccccaataagataataacagcccaagtttatgtatgctacatacgactgccaaccagatcctacagccactcctgtaaattattaagagaaattagcataataaagcaattta

SEQ ID NO: 77462 - DNA, 504 bp, Cannabis sativa
caaattgctcttaattatgtatcactttattaaacatcaaataaaacatgctatcctttttttagtacaaaatatggcctcaattattaaaactaaacctcttcccctcttttcactctctaattctcatctctctctctacaaagtcacacacacatcttttgccgaagtccatcaacttagcttgacaaccaagtgtgtagaagcaactcaaactcccttaccaacataaatcttgaaaaaataatgggtatacaatttatgtagtatttattgttagatttagttgtatttaggttgatatgaatagatctacacatatcattcttttattatggttgttttgttcctgaaactcaaactcctcgaattttgcattttctattttgttttctcgaattttagcaaggtcgttatcgatatctagcgacattaaattgtgctggaggttagggatgactaatctagacatgtagtgacatgttgttgcgatattttgcacac

SEQ ID NO: 77463 - DNA, 5539 bp, Cannabis sativa
aatgataatgtaattactcataatctttgcaaagttggcactagggatggacaatgaagttgtgttgaatgatactattccccacactatctctccaatcttgtacctttgtactcttaattttacaattatcgattaaaagttacagattaaaaaaaacataaaaaaaaaaaaaaaaaaaaccttttaggtcttaaaatcgtattgagccagcaccaagtacaccagtttttttttttttttggtaaatgcacttcagttatttgccagatgcaaatattacagagtttttggtctgtcatatagctcattgctggagtatttatttatttatctattttgtggctgtcgtcattaaatattttaccatgtcaccgatgccaaatgtagaatctcaactctttttcttttattattgacaggttacatggaaacgaacaatgactaccaacttccatgcttatcccaaagggtggtttatggaatagaaggattactttatgtctttattcttttttgaacaaaaataacaatctcaataaatttactaataatcgcatatatatttattttccatacaacatattcatataccattatggaaaacaaatttgagtacccttatgacatatgtatatgatattatggcatggaatcttctaaaatagtttttgtttttgcaccatttttaagtaaaagaattctcagttctgtcaaattattctgaggcatgggaaagtatggaattcttctgtttcactgtttgctctgcattttcatcctcacaatgaggttttcatgcaatgctattagtagtgatgaagatagaaaggcaagcgtatattgataactaaataaaaaaattatatagcatccaataattaatcttattaatatcatctgaatttacattttcttttgttgaaatgccatgattttacaggtctatattgtgtacatgggggcacttcaacataagctgtactcatcaccaacttctcatcacattagtatgctacaaagtgttcttgagggaaggtagtaatgtagatacatatgttcatgtagtctttttttttcttttaaatgtcttttctactaattaattttatatatgttgtagtacttctgttgagaattccttagttcgaagttacaaaaggagtttcaatggatttgcagcaaaacttactgaaaaagagagaatgaatcttgccagtaagtaatccaacaaccttgtaaagtaagccaatattgttttatttactctaaaaccataattggcaggtaggcaagacatagtttcaatcttccccaataaaatacttcatactcaaacaacaagatcttgggatttcatgggtttacacgagacaacgagtcgaattcctactgtggagagtgatactatagttggtgttattgacactggaatttggcctgaatcagaaagctttagtgatgaaggttttggtccacctcccaagaaatggaaaggtgcatgtcaaggaggaaaaaatttcacctgcaacaagtattttcctattcatttcattgaaaaattcttgcttacataaaccatacatgtaccattaggaagttccttgagagaaaagtttttgacatttgtatttgtctattcctttaccaatgtcttagagatgttgagattctatgaagtcttgattttgttgtagcaagatcattggagctcggtattatccatctgtcacagaagatgaatctgcaagagatagtgagggtcatggaagccatacggcctccacagctgctgggaacaatgtaaaaaatgtcagtttctatggactaaaagaaggcattgcaagaggaggagttccctctgcaagaattgctgcttataaagtctgcagcccaacagggtgctattcagaagctatgttggcagcttttgacgacgctattgctgatggtgtcgacatcattaccatatcaatgtcatctccaatgctagaaacacttgagcttgatccaatctccattggtgctttccatgcaatgaagaaagggatattaaccacaaactcagcaggaaacagtggcccgtttcttcaaactttgacaagcgttgcgccttggttgatgacagtagcagctagtactacagatcaacaaatcatagacaagattgttcttggaaatggaacaactataattgtgtgtcttattctcttttccatttagatgttttggtttggctttcttgtcatgcattttcatagtttaattttacactcaggggagtgctgtcaatacttttagactaaatggaacaaattttcctctagtacatggaaaagacgcttcaagaaattgctccaatttgatggccgggtaacttttcaaactcatttgatcattttcacttagtaaaacttcttatgagaatattgataataagggaaagaaaggtgtgcatttgtaggttgtgcaataatgggtgcctagacaataatttagtaaagggaaagattgtgttgtgtgattcgattaaaggaatcggtgaggcctataaagctggtgcacttggttgcattgtgtacaatgatgctttaaatggcgcttcctctgttgtaccgttccctgcatcaactttgacacatggagattatacatcaatcttgtcctacataagttctacaaagtatgttttattgctttaccttttagtctgataattaactgttcttggttcactgagttctcttaaacaaggcaaaaccattcttcttttcacagagatcctcgagcaatgatattaaaaagtgaagtaacaagggattctagtgctcctactgttgcttccttctcttctagagggccaaatgttattataccagatattctaaaggttcatgctgttctatcaccttgtcaatttttcttttaagagtagcattttaattatttcctcatgttaaaatacttgcagccagatataagtgccccaggagtaaatatattggctgcatattcacttgaaactccaccttcaacatttttcaatgataaacggcgcgtaaaatacacagttgaatcaggaacctccatgtcttgtccccatgttgctggagcagctgcctatgttaaaacatttcaccctgactggtcttcttcagctattaaatcctctcttatgactacaggtactactactactacttatcatatagtgctcttctctatgattacacacacctgacatctcaacttaaccaaatccttctctttttctggtggctgcagcttctgtcatgcacaatacaggaaatcccagtggagaatttggttatggttctggccatgtcaaccctgtacaagctataaaccctggactagtgtatgaagctttagaagacgactacataaagtttctctgcaacattggttttgatgagaataaagttaggcttatatcaggtgataacagtagttgcaccaatggttcagaaaaaggatcaccaaaggatctcaattacccttcaatgattgccagagtcccagtcaacaagccatttaaaattaagtttcagagaagagttaagaatgttggtgaagcaaactcaatttacaaggctaaaatctcatcaacatctcttattggtataaaagtagtgcctgaaattctttctttcaagtcactgaatgaggtaaagtcttttagtgtgattgttgaaggaggtggtttgacaaataaatctatggtttctgcatcattggtatggtctgataatactcataccgttagaaatcccattgtgttgcacaacatatagaagattcaatttaaaattttgtcatttcaattgataattacatcaatttatcaataatttgttttcattacctatgaatttcgtctaattatattaagaaaccatcaatttgatcaaaaaagaaaaaagttaatttaagtcgccaaattattgtggttgtggtctttgtctccaaattttcaagataaatagtacacactgtacacagacccataagatcgtcacccaaaaatcaaagccaaaatcggagaaggtctgttactgaactctgaactttgggctccaaactcagaaatatcaccagatttgatcaactaatttcagcgtcctctgcctctctacccatgacaaccccttacccaaatcccatcacccctgccaaaacccgtatcggctggatcggtatcggcgtaatgggcgccgccatggcctctcgcctcctctccgccggttactctctgaccgtttacgcacgcaacccttccaaatccctctacctcaaatctcaaggcgcccaactttctgattccccggtcgaactcgctcgctccacagatgttgttttcacaatgctggggcacccctcagatgttcggtcgattgtcttagagaacaatggcgttctgtccggtctcaatcccaactgcgtcactgtagacatgactagcagccaccctgtacttgcccgagagatattcgcggcggcgcgtgagaagaattgttggtctgtagatgccccagtatctgggggcgacgttggcgccagggaagggagattggctatacttgcaggcggtgaacgtggcgttgttgagtggctctcacctttgtttgacatcatgggaaaggttacttacgtgggcactgccggttccgggcagagttgcaagataggaaatcagatcgttgttggggcaaatttgattggtttgagcgaaggtttggtgtttgcagagcgagccgggttggatacgagacagtttatggaggcagtgagaggtggggcggcaggatcaatggtgatggagttgtttggcgagagggttattaaaagagatttcaggcctggtggatttgctgagtatatggtaaaggatttggggatgggtgttgatgttgtggaagaagatgatcatgagagagtggtggctttgcctggggctgcattgtgtaagcagttgttttctgggatggtggctaatggtgatggaaaacttggtactcaaggacttatcacagtaatagaaaggatcaatggaaaatgagaccttttacgtgatgatgataagacaggctttggaatctagttgatttgttgtatgttggttctctctttgaacatagtttacttttgctatgacttttgtgtaaccaagatgtatgtttattatttcatacgttcttcttcaataataaaataagtatgtacagtttatataaacatatatttatataagcagattttgaggcgtagtaaggttgatcaacaattggtagctttcaactgcgtaattttattgatttgtatatgcgcgtgttatgctattggcttccaattccatgaagaaatgtgcttgttttgtctcgctatttgacacaaacaccccaaaaaaatgagttgtattataaaaaatgtgagccctttgttagagccaacatgttttagcaatgaaaattattcttgcttacaagtttatatacatgttgtgattctatataatcat

SEQ ID NO: 77464 - DNA, 515 bp, Cannabis sativa
aaaaggtcaggcactgacagactttatcgtagaatgtaacgagacggaggaaaatgccagtatgcccactcagaatatacccacgtggaaagtatatgtcgacagagcatccaatgaaaatgggtctggtgtcggaatagcaatgatctcatcggatgggttacgactccaggcggcactacagttcacttttccagcctctaacaatgaagccaagtatgaagccttaatcacaggattgagattggccaaggctgtaggagccgagaaggtagaggtttataatgattcacaactggtggtcaaccaggtattaggagaataccaaacccagggagagaagatgaccgcttacgtggcagttgtcagggaattgctccaagaatttaaagaatataaaatggagtgaatcccacaagaaaagaatgctcaggcagactgtttagccaagctagcctcggatagcgagatagagaagctgggagtcgtacctgtcgaacaccttgcagaaccta

SEQ ID NO: 77465 - DNA, 825 bp, Cannabis sativa
acaagcatgagctctagcagctctgtttttttagatagaagatgtctagcagctcttgaaaagttttaaaaacaaatttcatgaaaaatgtaaatacagtgcataccgaggataggaaggcaagtcatctgccttcaaagtcttagctagtccaaagtcccctgtatacaaataaaagaagaaatgaaaaacgatagtaaagacatattaaactagttcccaaaaatcattgttcaatctattggaactctaacttaccaagacgaacatcctggtcctttgtgagaaagatattggaacactgcaaaacaatacaccacaaactgtttacaaaagctgaaatatgagcaaacaaataaaaatgtgaaaaaaaaaatacttttaagtcgcgatgtagaacatagttcgaatgtaagtactcaaccgccagtagtacgtagctgtgtgaaccacttgcagattttctgcacaattttcagaatcgcatgccagatatagttaacctcataagaaaatgatatgtacaccatttatacatctatgtacataaaacacaaacagagataagactacctcctcaggaaaataaaccccatttgattttttcatcagttcagccctacataaagttcataaaacaacaatgtgagaaaatctaaaaattgcaacttcatataaggtaatgtttgaatttgtaattcttatcaaaactcacatgtccccgccctcacagtatccggtgacaatgcaaacatagcaaccctacattacaaatacataactcagcacaaaacaatacagccaaaacttatgattttgacaact

SEQ ID NO: 77466 - DNA, 1170 bp, Cannabis sativa
gacttcgaagccagagaacaaatattaaaatggtaatcaaaataactcacaacattattttataagtacacatgactgtgtcatgatgtgttgttgtgtacattttctatatatatccatacataaacatatatatatatatatatatatacgtacttaaaagtacaaaatcccatttgccactatatatgatattcgtaccatgaatttccaaaattcatgaatgaacatgaacatatatattatgtatcttcttcattttctaaatcttgggttagtgcaagttattataatatatataggtgtgggctataattaatgatgtgaataatctatatatatattacattatataacaactctatatatatatatataaagtaactaattagtaactagttcctctttaatacacgaaccggaagaccacctctaacggtagcagtcaaacccggactaaaccggggctccgaatttgacccgacaacccgaatatcaaactgtctaataagacttaaagcaacagctttaatctccattatggccatttctttacccaaacaaacccgaaacccggcttgaaaaaccgggtacttgtacggacaagcgtgtacaaaaaccccatccttattaagccacctctcgggtttaaactcgagacaatcgggtccccatatccgctccatccgacccatagcgtacgggtggtaagtaaccctcgtacccttccgtacaaaagtcccgtcaggaagaacgtcgtcttcctgacagaacttcgagtcaatttgtatcggcgggaacagcctcatgctctcgtggaccgccgcgtgcaggtagttcatctctctcatctcgccgtatcccgccacaaccgggtcacccgacccggatataacccgacccgcttcttctcggatcttggactcgacttccgggtgctccgaaatcaagtagaagaaacttgtcagagccgaagaaaccgtgtctcgaccggctaagaggaagctaacgactatgtcgcgaagataacggtcatcgtcgattgaagccatgaatcgggaaagaaggtctcgtttgtcggcgaaacccattttccggcgatgggttatcatctgggtggctaaatcgtcaaccattttaacggcttgtttcagcttcttctccgagccg

SEQ ID NO: 77467 - DNA, 1505 bp, Cannabis sativa
  modified_base (1456)..(1461): a, c, t, g, unknown or other
tatataataagtgaaatgttttagtgtagtaagtaaagtcttttattttctttctcttgaaaataataacaaaatatgtaatcaatcatttatgaaccactttataaaaaaatatactataccattatagccccatttccacgactacattcatccttattcttatagcttggtatagtaatatagtatcactcaaaaatttgataatttttttttaaaagcttattgttactcatgtctagcatagtcatatcttgattgatgcatttaaaactttgagtacacatttgattttatattaaaatataagaaatttacctcatataaaatatcattagtttaccgctagtgttctttaacaattttctttaaaagagcaagacaatcgaaaaaaagaccaacatctcattctccaataaaaaaaaaacatgagttttgaattgatcatatacacttatttttattttatttttctaaatttagtcaatatatttactaaacaaaccaacaatttggctctaaaaattttaaaaaaaatatttactaaacaaaccaacaatttcgctgtaaaaattttttaaaaaaaaacaacaattacaatgaaaaaaatacatacttcctctataaaatggaacgagcaacatatggaagattctcattcatggaggtggcctaacttaggtaatggttaatgtagattacaaaaaaaaaaattacgccccactcactttaaattttgggtccgtcactgtctacaatgacgataattgaaacaaatttacacatagcacatcaaatatgtatcacaactccatcaaagtattcaattttgtttcaaaaatatttcatgcaaacatatgagtgaaaaatctcaaaagaaatcatgaaattaatcattaacaaacttaaattaaaaatcacacccatagaacttattcaaagataaataaataagtcagacccataactacagactcaccaatttcattttcttctagtcctttctcacattgtcgagcctaacccataatatattatcgcaatcacatcgtcgaccaactgcagtagtccgttgaccttgcattccgtcacaaaactttcgtggagggtagaaggagggatcaaagatggtgggtaaggaatgtttctatgttggatgagaaagacaaagtttttagagatcgtaaattaggatttgatattttttaaaaaaaatatttatttttggaaaataccgatgcattcctatttgtttttgtatctgaaataattttttagtcaaattttttcttatgatcatatacgttataattatttaaaacgcaaaattttaagaaattcaaaaaaaattaacacgctgaaaataagattcaaataatgtttgcatatgtgactattctattttatatgtgtgtgaaatagacagtttgaatactaatttctatattgtaaattnnnnnnaattttttaaaattttataagataacttaaataattataacgta

SEQ ID NO: 77468 - DNA, 713 bp, Cannabis sativa
taactattactttaaaatgttccttttatatataaaaaaggggtgcacattcttatttgtttccatatttggaaattttcttactcatattttttttttatagtgtgtatattataattatttaagacattatgaaattttttttatagttatatacgttgtagttatttaaaatattttataaaatttagaaaaatttaatacactgaaaacaagattcaaacagtgcgttgcacgcgtgactattttattttataaattactccgaatttcataaaattttgtaagatatcttaaataactataacgtacacgaatatgaaaaaaaaatacactaaaaatttcttctaaatactgaaatagataaagtgtgtatcagtacatcccttgtaaatgagtacattgtagaatcacccattaatttttatgatgtaaagcaatggataataattttgtttggcttaatttttgtaatttttttttagtttttaaaattaaaaaataaaaaatcattttttaaatttaaaagtcaatctaaatttttttacttattccaaaagatttgtgaaaaattattttttaaattaaaataatttacataattcttaacttactcacaattttttttaataatatctaaatatttaattttttttttttttttttaaaaaaatatcatcatataatagctatccaaaaataaaaataaatca

SEQ ID NO: 77469 - DNA, 587 bp, Cannabis sativa
ctatttccattacttctgcaaattaggtatcgttctaaatttataccgaacaagaaaacttgatttgtttactgtagtacttgatgcgacatcatttgtgcatgaagtctcaaagagacggaaagagttaagagttttaaaatggtggatgtccaccagcaagactggaatttactccactttgcagtctttcagcttcttcccacattgacatgtcaattgaggatttcgcagttttatcttaaactaagggaaggacaaatcagcccaatatgatttcatgaagatatatatctttaacaactatcagaagtagctagtgaaatatttgacaagcatgtagtaaggagaactttggccaaattcttagttttcatgtataaaaccataaatagacaaataaattctccatgcatctacatttattttcaataagtttgcctattcagctttgaaataattcttttgataataaaaacatcatggtgaaattcagtgaagttagacatattcttttgcatcataaagtatctaccggctaaagagcatttataaaacacagagatcatacatgaaacatctattag

SEQ ID NO: 77470 - DNA, 1124 bp, Cannabis sativa
  modified_base (699)..(703): a, c, t, g, unknown or other
gatcagccatagccttgagtccagcagctttagacaatctttcccaatatgtatcaccagctctttcaaagcacattgtggccatttcatagttgtgttcatgaaagagctgttgagaaaggaaaaaaaaggtttaaagatacaaaaaaaacaagtattttcaactttctatgcctagaaataattaatgaaccacaaatatatctacaggaagatactgaacacaaaaccttaatgccccttgatctccattcttcaggactgcttgcaacttgcatggcctgagcaagcgaatcatcaagtggtttagattgcacaagacacttcttcctccaatagtcaaagataggttcagcaacatccgagctttcacatatccacaacctttgcctcgtacgtgtgacagcaacatataattgcttgagttcagagcatataatattatgtttggactcggaaaattttgggaagttaggtatggttgtgtcaaacaattctagttctttcatgtattcatatatgacccgccactgattctttagagttgaggagccaaaaaagttgtacagtaatacatcctaaaaaaacacaagaactaacattatattggaattgcactatgcaagttaccacaaacacaagcaaattagaaatctaaaacagttaaattgtgtgattacctgaaactcaagtcccttnnnnnccaatacagtaagtagaaagcttgcttcccaacataaccagcgatttcctttcgagcgtcgtcatctcttactagaataacttgctctgcaccgaagccaacaatctttccacttgccttgccgctgttcccaaaaatcttcatgatggcgttttcatcattcccacattgaagcagcaatggagattccccatatatcaaactggtttctggttttaaaggatcaatagaatggggaaagaaatgataaataagttcaataatgctttgtgacagtttcagaataccagcatgagtacggaagttttgagacaagtggaaaatatcagatatcaatcctttctcttttctctctccatgttcaattttgggttccaatacaaatttcttgtaaaacagatggcgtatatcttggaaccta

SEQ ID NO: 77471 - DNA, 569 bp, Cannabis sativa
aaaaattcaagattatgctaattaattattatttgtacattgaaaactaacaaaccttgcaaagtgggaaaatagttacgtactaaaaaatgcagaaaatggaataaactcaatctcaatatatacataacgtgatgaattaaccaaagaagcatactatcatttatcagacctctaactatggttagccacaaatttgacatcttatatgcttacgtatgtgtactatataataattttcggaaaaaaataatggtaatatatattgtcaaaaatatatatataggtgtacatttaagtgctcgtgagtcgtgagagaaagattgccagaagtttccagaaagtaactcaccaacaaaaaggtattcatgatctgccacacgattataccacatcgggaaaatacgataataaccctgacaataatagtgatcgatttgtcaatatatggacaaatctcatttcttgttcattaccctgtaaagaaagatgcaacctcgtaattacagctagtggtttctaatgaattaactaattttgaaaatccataagtggaattcaataagcaa

SEQ ID NO: 77472 - DNA, 1146 bp, Cannabis sativa
  modified_base (26)..(54): a, c, t, g, unknown or other
aagttcttatttaggatgttaataannnnnnnnnnnnnnnnnnnnnnnnnnnnngtaaaataatttccaacaagttcatgggcagcttgtgagtaattgggatttgaagttggtatgcccaattgatgttatggaaaagagctttgctttcatctcatcacttctgaagcaactttgtatgaactttgataaggcagctataacttatccatagtgatcacatactattgctccaacgctcagcacctttgtctcagtgttcaccgtgacatcaacattcatctttaaatgaaagtggtcaggtggcttccatagaaccttctttttctttctattgaaaccggcagtagcagcatgttgttttgatgtacggacactagaagtggtgaattcagcaggatttagttggtgagtttttgctgcaatatagttctctaagtacgtgttagcataaggagcattgttagatccgtctcgacccttatttgcatggtagactttgttccctttagtccaaatagctcacatagtacatataatgagttctagaccctctttcgagcgcagagatgataaatggaaaatgtaatcacccatgtgaatttgctgcgcacggtgatagtcaatggttatctttgttctttgccacaccttcttagaatttctcacatattgtctaaagtatccttatgaaataagactttcaatctcatctttgagttgtcgacactcctcggtggtgtgaccgatgtctttgtggaattgacaaacttattctaatctcatttactccttgcattttgtatgggatctggcttgcgtaaaataaccctattcttgtttgcaagaaatatattttcatgagtctcattcaattctgtgtatatggaataaattggggcacgtttctcctctttcttttggttccttttttctttggatgatttcttggattcatcctttctctctccatgtgactcattgcccttgctcgagtttgtgttcattgtcacaatgtttgcttctatatttctggagcttcgcttattccccaagcaatcttttagtagtttaagttcagattgagcttcttcctttcgagtgtatatgtaatgaccgctttagtaatttggattagtaaaggca

SEQ ID NO: 77473 - DNA, 1328 bp, Cannabis sativa
  modified_base (183)..(195): a, c, t, g, unknown or other
agaaggaatttataatcttattggaaattagcaattttcattaataattagcaattttcattaataatgagcaaatggcatcgctacgaagatgataagcacataattgcttaaagagaaatgctaaagggcaccagtggtgcttagcatccttctacgtgtcaatatcgctattggtccaannnnnnnnnnnnncccatataatttaatataataactaaaatgatattggggagcaataagaaatcaaataaatgagattagattattttctaaatcgccttctaacaagttaatatgacaagtcattctctagagtactgaaaaagactcataaacagataacccagaaaaggtaagctgtgtgattttcactttcaaattgcacaacaaatgagatgtatttacacttataattacaatttgagtgtctcaatcattacttttttctaaaatcaattagtgaaaaagggcatttggaaagtagacactaaaaagagggtgactttaaccatcctatttcctttaactttccaccaaaagatgatgagtgatagaaaaagctaaaaataccaattgctaatgaatcttcttcactcacaaaaatgcaatattatactctggcatggtttttaagcaaaccacccccacagtcatcgagaagaatgaaatccaaaactctaaatttcaaatcggcacaaagtatccaattaaccaactcaaaatacactaaacagtaaaccagaaaaataaatttgataacgaggtaaacaaaaacaacagagtattgatcaaaatcaggttttcttctccatctcgaaaaaattgttcccaacagttcacgaccttcccacatctttcttccttttgctcttcaacctttcttgtcttttctgtctatctatgcagattcggctcaaatggggcacggtggaacatcaagagtggttccagcttgaatctggccccaaccgatcagccgccagtgcttttctacccttcgactaagtgcaatcttctcccctttgctggtgcaaactggggaggtgagttgcagtttcgccaaatcgttctttacagcaagaaccctggcacctgtcgacatggatccaatgttcaacatcagcatctctcccttggtcagctttgtgaccctcccctgcttctccgagccctttgtcttcacacccaatagcctacgcagaagaaagaagttcacctgcaaattcacaagagtatgatttcaactctccacacaacaggaggaaaaaaaataggcttgtagcaacctaagcccctacacgaggaaaatcaataataataataat

SEQ ID NO: 77474 - DNA, 995 bp, Cannabis sativa
ttataaaataaataaatttttatagtgtatatgtgtttttgggcgagaaatctaagatttaaaaaaaatgagagaaaataatgatatatggagaaatgaagattaagtggtgatggttcgttgatttttgtttgagagatagaaaagaagaaagaagaaaaagagagtttttgatatgaagtattaaagacctattgtcttctaaataaaactaaagacatatactattttcaagtagtgttagttcatatgttatgtacacatgaacaatttttattgacattcaacaataataactaactaacgagaggtactttaaatttgctaatgtaaaagtagattatgaggtaataaaaaaaaaaaaagaaaaaattaaggttaacttttacaaaatgtaaaaaataaaaatttagccgtcaataactcttaattttttttaattttttttttgaaccattttttttaatattaaatcataatactcttgaaatattaaatttattttaatttataaattgggcaagtactactagcaatatttgtttttctttttttatttagaaaaatgaaaaaaaaaaagtacatcctaaacattgaaatagcttttaatttttgtttagttatcataatttattgttagcaccacttattttcattttattttatgatatacgattttttattttaatcagaaaaaacaaaaaatagaaaacacaataatataattttagttgaaaaaaaaaatatacatgctttaaaagaaaaaatatttggtaattggtactaatgttaaaacatctcaacaaaaatgcttatttacactactactcctaaaattcttgtcctatatgaggtgtgtgaaaccaagtgaggaacttcataagttctatatgatgtatcatacaagtgctatgcacgtggaacaaaatatttatgaaaaaatacaattggtactcaatactactacaagatattatatatatcgctatataata

SEQ ID NO: 77475 - DNA, 1865 bp, Cannabis sativa
agtgataaatgtagaatctctatattttaatagaatggatcgagaaaaaattattagtgaataataatttattaaagaaagatcaaggtattatcatccatattgttaagtgtgaaaagttcgtgaaaaaccaacatcacgcgtaactttagtccaaattctgaagttttgctaactttacactattcttttctcataaagattaattatactaaaagcaaatactgtctctatataaaacctccgacgagttttccttcttcacatatgcaaaagcgttattttttttttcttttctttgtagggaagaaaaactaaaatttcctgaggaagtgcatattcataaggaggtacgtagtgtttgagcaattttttggcaccaaaaccaatacctgtgcagggatccatatgtagaatctagatataatttttgctttgggattcaattgttttgcttttttgtgtttaaactttttctcctgtatttatactctctttcttcctcagttgatttcatcaagtggtccgcttacattcggagagtacacagagaagcttcttgacaaatattaccacctcagaacatagaacactgttttcttcattcttctccgactggtttgtgtatagactgaaatatgtaagttaccgctaaaatcaacattcttattcccttgggaatcaccttttaattgcatattggcttattaaactacttcccatccttttcacatgttacaagagagatgttattggttttatgggatcaaagcaattagttagtagatgagtctaaactattagctacctaaaagctcatagtagcagtacacttgtttagtgtttatttcatttaatacaaatgaattaacagtatcacgtaaaagggaaaacacagactcagactccaaatccatctgccacgtcattgatgatttggtggtcttttctgttagccgactatttgcttaacgttttgttaaggagatagtgacaagacgacacgagagaagtcggcattaaattgtccgatatgtataaatcatcttgttacggtattatcaacaaaatatcgtatgttaagcctaacaaacggacttaacgttaacattacgatattttgatattgtcccgagaagaaaatttgagaatttgccgccagcagcatagaaaaggtgtaacggataaaggaaaggaaaacgtgtgcaaataaggacaaaaagggtaaaatatttaatggtgccacgtggaaatgcgtggtatgggatagaagggggctggacttggctacgttgtgtccccacacggattcctctgctctcaaatgtcatcgtcatctgttttggattattggccacaaaacccacactctctttttgaccatctttgactctttttttgtactgctactttattacaccataccaccacaccagccttctctttcttttcataaatatttttctttactaaattaaaaaatattacatagtcaattcctgaatcccaatagttacatgttacaacaaggtgggcatttatactttataggtcattggacgacaataaatttttttatatcaattcaggtagattcaccttcgatgaaagggaaaccagagaaggcttacttgataatgttgtgcattttaaaaaaattaagaaagtaatattttaatcacaaaaatacaagttaaatttttatttttcaaaaataaaaaatacattttataactatttttattttttatttttaaaaataaaaaataaaaaaatattttgtaaagtttattttcatatttattttttaattttatttaaatcgatttagattcgggttcgaattcgattctggttagaggcta

SEQ ID NO: 77476 - DNA, 1397 bp, Cannabis sativa
ttgagggccccaaaatttaattcgtcttgggcccatatattttcagggccggccctgtatatatatatataatttaatcaaatacctcacgtaataatggaagaaaagttaatacatgataatttatacctgctatagctgtatttaaaataactataaatgcttgacccacagtttgttcacaattacgtgtcgaatgggacttgggatatagttaatgataaaattaagctaaatatataaatattaataacttaactatgatgatcatgaaggcactgatatatatatataatccatttaattgattattgtattaaattcaaataaaaaaaatagtaaaattaaacaattactaaaatattttttaaaataactaggtgtgaaaaagcactacttttgcacttaatttgtttaaactctgtattttaaaaataaaatcaacttagttatagaattaatttttgtacgatatatattaccttataagaaaatttcgtcgacacaaaatattttggttatatctctaaaattaatcatttgataaaaaatatatctaaaatattttaaaaatataaaattctaccctgcactctcttaaaaagatgtaccgatacacctctatcaattttagtatccgaaataattttctagtcaattttttttcatagtcatgtatacgttatagttatttaatacatcttataaaattttaaaaaattcagaaaaatttaacacgttaaaaacaaggttaaaatagtaggttgcacgcgtggttattttattttataagcgtgtaaaatagactgtttgaaaacagttttctatattataaactattctgaattttttaaaattttgtagaattaatattttaaataactgtaacgtacatgaatattaaaaaaattgactaaaagaattttctaaatcccgaaacaagtatagggcgcatcagtgcatcccttttaaaggtgtgcatcagtgcattccttttaaatgagtgtattgtagaagcactctatatttttaaaagttattagatgtctataatatagaaatcaatattcaatcagtatatttcacacgcgtataaaataaaatggtcacacgtgcaacaaattacagtttgaactctgttttcatatgttaaattttttttgaattttttaaaatttttgagaatgtcttaaataagtataatgtacacaactataaaaaaaattaaaaaattattttgatactaaaatagataaagatgcatattgtaagaattttatttgaacattattattgagtatcaatattatgcatccaacacattctgtaagtgtaagtaatattattacgattagttaatgatatttttaaatattaattttgtaaattatgtgtat

SEQ ID NO: 77477 - DNA, 694 bp, Cannabis sativa
cattgccaaggttgaaattgttaatatgaatattccatttagtagaaaactagaggtacctagtggcatagatgttggctatgaagtggccacatcatcactggcgatatcaccacacagcacacactgcccaggatttaagccaataattgactgcagcttgaaaccaaaaggcaatgcatcctgacagagcttccataggaagagcttgaacctgtcatgtatcttagccttccaaatgtgacagaaggtatcatctctaacactaaaacgagccgcattaagatcccaatacgcccgtttgagcgtgaactcccttgtaggggcagatttccagcaaagtgagtcattactctagagcaaattggtcttgatgccattaatcatgctagcaaattctggtctaaaccagaatgaaatcaactatttgttccaaccagcccccgactccgtcataagatcccccatagaaatgttctctttggacatcggattgatggtacccgttacattcaacgccatctctacccatccaattatgattccaaatgctaaccttggacttcattccaataattcaaatacacttctctgcaataaagtccctagtggcctgaatccctcttgccacaggagaggccgacgaagggagatttggagagagaaagtctgaatgtctacaatatttctccac

SEQ ID NO: 77478 - DNA, 1377 bp, Cannabis sativa
  modified_base (1306)..(1346): a, c, t, g, unknown or other
tttcattgagtgatgatgatgcagaaggggtgaaaggggctgaaatggcatggtggtcaaaatggtagtagtccaaatattacacttagtgtgtgttgaaaagagtctcccaatggtggttgaaaaaatatcaatccagacgttcttttattgttttcccaaatgtgaaacttttaatccaagtataaggatcaccatcataaaaagcttcatgtaagcaataattatctaagacagttcgaaaagcttccattagtgactaattacgaagtggaccactagatttatcgttgttggagaggatttaattgaagtctccaattactaacgatggttggagtggagcaacatccataaaatgctaaaaaagcgtctaagattgagacctattattggtttcgagtgcaccatagaaaccaataaagtgaaaacttggtctcccatctgccatcatataacagacaaaaaaaaaataagatcatagtttaataaggtaacatccacatcatcttttcataagagcatgagaccaccaagccccactctaggagcttcaatatcgtttttaaaatgaagagattgtccgaggtgagtaatcaaattgacattgagtttcatttccataagaaacaaaacatgggatgattgttgttgaataagcaatcgaagatgtttgaacgcactccagctcccccaaacctcgtgcattccatctaatggttttcatggtgagttgcggggttacatagcaaccgctgctcatgtgtcataagagaaaatagaatttgaaatttcagaaactaagttctcaacagccttttcctgtgacaacgaagaagagtttgttccagtacataccacaacatctatttaacattttccttactgatagggcatcattcggtctcttgatagttacattaggagaggcatttttcttgtccacccccaagtgtgatgcagagaggggaaaaggtttagcagccgcagcaacaatgactggtgtgatagtacaataagggctgtggtgacggcttgttagaggtgtattggaggaaggttttatgggagtttgtgagttgaaagtatgtagcaaaagtattgtgagatttttttaaggccaagattgggcatgtatatgcgtgaaagatcagtgatgaaaggatgatcttttatagggtgctgctatcataacagaggctttggcataaacttgattacaaccattattaagaaaatttgaagtaaaatggggttgagatggagtgatgttgtaaggatcaggctgttggaaattattttaccnnnnnnnnnnnnnnnnnnnnnnnnnnnnnnnnnnnnnnnnntaaatatgaacttctaaaacgatgcaaaatt

SEQ ID NO: 77479 - DNA, 1655 bp, Cannabis sativa
tttatgaatgttgtagtttcaattcttataaaaaaatgatgatgaagaataataaaataacaatgcaacttttgctcccaggcagttggctcatcccaggtagttctgacttcatcgcagctgctaaccagagaacaaagtgcttctcatgaatcaaagttagaggatgccagtgagttgaaaaatttaatttcttttctttgctacttctcttcctactgtagttgattgccaactgaaatgcgccctacaatttatggttctgtgaaggagaagatagggttacttacctagtttcagaacgatttcaaagtcgatggctaggtggctggtcaacaaaggtgcctgtttttgtctatctaattccttcaaatatgcatgccaataatttcaacatgctttcatacttttaattattctatctgttattgagtttaggaaattttatgctgtaatctgtaagaaaacataatcgatttgaccgatcttaattcttaatattgaattatttagcattctttgcatccattacccatgaacaggcacatgcagcaaatatagcatcgaaatttagattaaatttgtttcaataactgatattgtaaattttctcttcaatatatcttaccataactggaagacatgtaaattaaaattatgttttttcatgtggtaatgattaatttgtccacctttcagaaggaagtagatgcagcgattaagttgtccacctttcagaaggaagtagatgcttctgcacagttaaaaatgaaaaatgtcaacagtatcatgaaagcgtttgcttgtgagacaagcttactatcagaatctgcagacgttgctccggatgcaaactctctagtttcaatacgtgagttcaagtcccatggagggtcacaatcaagcataaacaatgcaggtctgcttgacaaagaaaatcaggggataataatttctcaagatgttgtgaaatcttcaagtttgtctttgggcgatcctctttgctcggttgttccatgcagtattgcgtcagaagataccaaatctgttgaagttcagaatcaggatgttatgaaaaatgggaatgaaggacacttcagatccactgtagatcttgaaatagaaaattcacacaacctctcaaaacttgttgaatttcagtgtggaaacactgacatagctaatgaaggttctgaaggtatagttagaagacagctttcttcactcaagatgtatagtatgcttattccacaaaatctttctgcatctaatgggaaaagtgctcactataatcagtcatttcaatcactaagttgtgatccatggaaagatagtgctctcaaacagaatatgaattgcattggtggttctaataaaatgagttctaagcagttgccatctttcaattctattcacaattcttttgctggaaatgagaatgaggaagtttgtgaaactattatgaatgaaaactcagttgacaaattgaaaaagctaacacacccacagttagcttctggaccttccattttaaaatctagtggagatgtgcatcctgaacaagcaccgcagccagttgatgttatcaaatttcaaaaatttaaaggacttcaaaagagacaatccaacgacaagaattcccgtgatagacactt

SEQ ID NO: 77480 - DNA, 5081 bp, Cannabis sativa
  modified_base (47)..(69): a, c, t, g, unknown or other
atttcattgttttagaaagttcatgtttagggtgttaatcaacatannnnnnnnnnnnnnnnnnnnnnnggtaaaataatttctaacaaagctaaggatgagcggcagtgagctcaagcaaacggagattgtacatgttagggtgattagacctagagcgtacaaactttaggacaataggttgtatttttaatggtcgctaggcgacaacttttgtattaaatgttttgtatgatgattatcgttattttaaatacaggatcacgattatgtataagatatttattttcacttaaagagtaattaaataaaagttttaataaatcataatttccaataaacacgttgatttgtaacggattgcacaattaaaataaaatcatgataacacgcccaaaccagtaaggtgttacatctttagcattcccttgactatgtttatagtggaggttcctcttgttagtctcctcagttttataccagagggagaccttcataatcttgttggattcacaatggaggaggccttcaccatcttttcagctttacaatagaggatgccttcatcatctccttggatttacaatggagaaggcctttgtcatctccttgactttatagtagaggaggccttcatcatctccttagctttacaatagaggaggtcttcatcatctccttggctttatagtggaagaggtaactgttagcaaaatgttgtagaagtcactagcctttctttgatcaattgagaatgagaccaactccttaattaatatgtctaagattggggtaatatcttccccttcttgggcgcacctagaagtgattacaggtgcagtctccatttattccttggtcttaaccatagaggtctttgtcatcccttcgcctgtacagcgaaagaggccttcatcatcccctcgtttgtctctacagcagaggaagtcttattcttcccctcggctgctagcgcagtggaggaggtcttcttggcaaatgtcaacgatgtgttgtaacattggcatgctaaggagacggtcgataccagctgttgtcgtgaacttaacaaataggcggtagatagaagagatggcttgaagattatagagtgttgaaattttgaggagatttggtgtcaatcactataaaggtagtcagagtgcttttctaccatgggattattttgactgtttgtggtaatctaatttcaccacaggaagcgatgttggctctactaaaaccatccataagttacttgcatgaccttagatgcttgtaggggtaagcccattctttctagggtcttgtttgaataggatgttcgatgatgcttcatcgttaatcatcacattttccacctttataaaatctcactaatgagcgggtcattatttggttgatctaagatgcgatcaatgcctgatgttgttaggaactagagatgcaggcgaaaagctaaatggctggcttaaaggctaccttaatttttatgttgttgccccaacgtcaatttcttagtgaatggagataagctttgaagattgtttgttgaagctatcagctactagcgagagagaccactatcgaggtgcagtgggttattgtttgtgcatttcgttattatcataagtgagatgaatcattatcaaagagtagagtggaaaaaccctccagatcttttttataaggacaaaatcaaaggttgttgaaaaaccttgcttgataatttcaactcatagaaccttgttaaaggtttaacagaaaaaagtccaagggaggaaggaaaaaaaagatagattagattaaactcgtgctaagtacaacgtactatacttaggaggagtttagccactaagaaaaataccacaactggggtagcgccccattgccagaatattttcttcaatcaattggaaagtctctagttggatgcagcgtcctgcctctagagtgttttctataattgatgatgcttttcttttctttttgatttttgtgatcttaggaggaacactaacactttagatttataactcattcattatattcttgtgtgacctgaagtgtttatatatcaattcataatagtgcttaactctagtgtgcaaatagtttgtatgtctggttgatcaacttaatgaagttaccagcactcgcactagtaattcaagattaagaaacttggttattggggataacgtcaacatttcatgaaaccatagaaattctaactcaggtgtgcaaattttttttgaattcccttatactccttgctcccgtatactagggtaacacctggctctcatataccaaagtacatgtgcctcccaagtgatcaaataaatgccttcattggtcaccttccataacaaatcttgttaggctttcatgatcatgaatcttgaagtgttattacatgttgaggattcaaccactcatcatgagattcgtggcttggcagtgtttacttactatagaaataactaaagttacctcaagaccaactctaataaactttactcaatgcttggtagcgtcgtaaagtctataagctctaatgattaataacaatgcaataccaacaagctttacttgatgattttattcattagattttgaatgcaattacataggttgagggggttccgcacctctagctaatttggataaaattgaaacaacacttgtaggtttacaattatatcaaagaagctaagttgatccccactacatctatgctctgttcaactaacagtgcaggggccataacatggtgatggaccccttagcttacaaatgactttgctgcatcttttcggctcaacaagagagtgattcacttgcacaaggtaaagtgaatctcactgtgaagtaaattgtctagaaaaaagtttctttattagtaatatcatcttaaacactccatgttccaatacgttggtaccaacactggattcaagtggcagtcatagatggctcaatcttgtttgtcatgggttctaacacttctataaagatatatggtccctccctctctcattgggagtctttagtgtcactttctaggtcaatatatttagaggactcataggacacatcttcactactgcttctctaatcctgatcactgtttggaaatagaggaagaatcttcgtcactgcccctatcccaagttatcttgggaagttgagggagatttttcatcaattctctttaacttgatgtcatatcaagaaatagcaggggactcatcatcattatctccctgctcgagttcaacaaaagaggagtccgttttagtggagcattcagtgttgattcttcttcactttcttgacaaatgtttattcgagactcaaataatagataggtagtgtaattggttgtttttggttgatcaactcctctgaccttttcgagagcttctttgagcttgataaaattgtcaactttgtccaaaaactcttaaatggtgtgcaatgatttaagtttcatgtctttccataattgactcataattgttagtctagcacccattgccatgaccttagcatcttcattgaatatctttgtctatgttgttgcctctaataatctttgtaagtaatcttttagaggctcatcttcttgctgcttgatgtagactaaattgttgggctcgatcggtctgtgtcttgatggggagaattgatcatagaatgcttgcttaagtgtgtcccaagagttgatagatctcgtggaaagcttaagacactaaaggaatagtggttcaatgctacgccaaccaaaatttaatcaaactttgtggactatactaagataaaattcaagtcgaaagacattttacctaatgtatctaagtaagaattctataatagtgtgtatttagtcaatcaaagtgggagaaatgttatattttgatataatatttttgattgattactaaagagataatatttaatctagtggggattgttatataatttataaataatataatatatcgattaaatatatgtaacaaactaataagtatgtgtattacaatctatatttgctgtcatcattttgtaacatacggtggaactacttgttactcttgttactatgaataacctccacaattatcacaaatattaagtgtgtaaaaaggtgttgcacattttaatttcaaattcttaaaagctatagagttatagttgttggataatgagttttatactcatttattgagtccataacatccatgggaggttatgagttagaatttcaaatggggatatcgtacattatttaaagaggtctaaggtgctcatattgtgacaactaagattgtataaaccaagtacttttctagtaaccctaaaaggcttgatcattcccaaagctatttctatgagagatcttttagtgcttagagatagggaaaatattctttttgacaaaagtttaataccttgttaaagtcatggtaatctccagtaatctatacttaagattgtgagtgaatgtatagatatatatatctttttcttcatattatattgtatatgttgtatattacatgtattgcaattcatatcttctacctttcttatatataatatatatagtgtatatacaatgtatatatttgttgtaatatttatataatcaatctcttactttagttcttgtattattttttataattgagtaacaaggcattctcactctttgacagctctgataattcaattaagaattatacaaaaaaaatttctcttagacttttcttattttaaattgtctttttgtttgagggaatgaagaatttgatggtaagtcaactcttcatttcctaaattttaaatgtctatatttaatattcatttacaccaacaataaatgtatgtggtggtatattttttaaattatatagtagtatttcttatacttgaaaaaaatatatgtaatttttaatttacatctcgaagataaaaaaaataaaataaaatgtacatttataacttcaattaagaaatgtgtaagttttttttttcttgtctttgtctttatatttttggttttttttttt

SEQ ID NO: 77481 - DNA, 621 bp, Cannabis sativa
cgacatcatcataacctagagagttcttccacatttgaaaatatcgaaaagacttcttttcattttcaattacagggtataccgaaataagggtagggcaatgattgaaattgccttctgagaaaaacataacttttgcattttcaaaataattcaaccacactgaattagcaagcactttatctagcttagcatacagtcttgtggactcatcctgtttgttactcctagtaaaaaattgagctaagagttttacatgtgcaaagtcacaagcttctatacaatcttttaaatccacacaaccatgagaatgatcttttttagagagtctcttccaagaatgtcaagtcgcattaaaatcacctaacaccatccaagggctagtaacacacttctgaaacataccaatttgcccccacaaaattttcctttcatgcttataattagaaggttaaagaaaattaatgaagaaaccactacccctctttggactaatctgacaatgtataaattgtgcagaataatccaagaggttgacatcaaatgagttaggattccaagaaagaacaatcttcccttcgggataccaagattatgatacatctctcccatcttatccac

SEQ ID NO: 77482 - DNA, 628 bp, Cannabis sativa
aatgcttgcttcccagagcaggcaaaagagttatacagattccaagcgccgagatattacatttaagctacgagatcatgtgttcctatgtgtgtcagcaatgaaaggaatcaggcgctttgggaagaaaggcaatctaagtcctaggtttataggaccttttgaaatacttgagaaagttggacaagttgcttatagactagccttgcctccataattgtcagcggtacatagtgtatttgatgtttcgatgttaagaaagtatgcgtctgatcctatgcatatcttgagttttgaagcattagaattacacctggacctgtgttatgatgagcaaccagtacaaattctggatagaaaagaaaaagtccttggaagcaaaaccataacgttggttaaagttctctggaggaacagtaaagtggaggaagccacttgggaattcgagttcaacatgaggactcaacacccagaactgttcaggttagatttcggggatgaaatccttttaatggggggataattgtagcgaccgcaataattaaatatagattagtgagattataagtgctaattttattattattatcattaatattggaatttttatgtgaatgattatgttaaa

SEQ ID NO: 77483 - DNA, 835 bp, Cannabis sativa
tttatcttgagtcacaaattttgtagtaagatttttttatagtgataagtaatcctgatttcattactaatattttctataaaagtatatgaattatttttaatattctaaatatttattttgtaattaatatatcatttataaacattcttatcagcaacaaaatgtgatctttgagtgtttaaattatgaatattacatatcaccacaatctacccatattagaatgccattccggtgttattattatacatacatgtgaaattacagaaacatttccgacaggaaaaaacatgatcacttagggtatacggtcatatatgtagagagtacttcttccaactaagttcatgcatgcagtacaatcagctgtaatatgcttcaattacctttgtcacgagataattatcagttgagccgtacgtacagaatagattgtttgatgtagtgtaacagattaatggtcatgtggcagaaattggctctttctctctcccctttatctggtataagaggttcacgtaaattgggagcagataacctcattgactcatatgatgatgtggtttgaaacattcaagagattaaagggtgagtgggatcaattaatacctcttcaaaattgtgtttagtttaatatccatcaatatatattaaacaataattgaagtaatattttaacctcttattcaacagtagtagttgatgagtttgatacatgtataatcgtccacgtacgtatataacacaaagccagaagtagaagttaaccatacatgcccccttttcgccacgtgtcaaaaacccaaatgcttgttatcacggggtgctatat

SEQ ID NO: 77484 - DNA, 1639 bp, Cannabis sativa
attttagtaattagagttagagataccaatggtagtttgattgaggcccgttaagtgtgtaaacaaggtgtaattcaactagaattggttgaagcaattggtcttaaagaggccttgagttggattaaacagcaaccacacaagaagatggtactcaaaatagactgtttgttgctggttcaagctctttgtcacagcttgtctgctggtgttcttattttcgagttgaggattgtaagtctgttaatgacttttcttttggtttttttttttattttttgtcaaacgatctacaaataaggtcgcttattgtttagcaaaagcgtcttattttatatctgattgtgtgtttaacacgagtgacattcccaatgatattaaagatgcttgttatttgatttaaattaatgaagttttttcttattcaaaagatatgtatatataggcccgaccttgagcatagacaactaagcctgtgcctagggcccactctacttagaagccaaaaaaaaaaaaaaaaaatcccctttcaacaatacacatttcttttattgattttgaaaatatcatatttcattttaaataaaggttcaaatatatttttttatgacctactaaaattcagaattgacctctatatatatatatgaaaaatactaaaggcgccactaatggtgtctagtatttaataatgtaattaaatatcaaatcttatatattttaatatatattaatataaaatatagttaactatttacaaaaattcatcttattttatattactattacatatattttatagggaaatgaaatggatgtataatgagatgtgaacaaaaacaaatgatggagtttaaatacaaattacacacaaatgattaggtatggccattacccatataacattatatcaaagaccatatctcaatgtcctcttctttggttctcattttgcaaacctaaaccatattcaaaataccaatcataacaaattcaattattcagttaattgggacagatttgaaataataataatttatatcttataaactagtgtatttttttttcattaacttgtgccattttttgttttttgagtttgtaaaatcatgtgaacctcacttcagttctcaataaatattttagcaaaaagtgatatgcaacacaaaactcttacaagatttacaacaaatataaacttgaaagaaataaagcaacaatctttaaagtttacaataaatttaagcttctgacatttttccgattatctcgattcctgaacacttattttgtgatgaccgcgaggtctaactatctctttttatctaatatatgaacgcttttctaaaaaaaaaacaataaatttaagcttagagagaaattaattatgaaacaaaatatcatctcaagagtttatatatataaaaaggataggaaaatttacaaaaatactagaatatgagttaacttttacaaaaatactatcatacgaaaatattttcaaactgtgtttttataaaacactagtagaacatagaacagaacaactcaaaacaatagtagaaaaactataaaacaccagtagaacactattgaaatcttaacacagtatacttcaaaacaatagtagaaaaactat

SEQ ID NO: 77485 - DNA, 613 bp, Cannabis sativa
tgtgttgtgtaagttaaggagttcttctattgggtcagaagaagagcctcttttgaaaaacaaaaatcagaggcacaaaatttgttggcattggaattcaaaagctcagcctgattgagcatgtgggcattggcccactattgcagaaaaagctatttgatgaaatgttagaatgatataggtgttgtctaatacctataattatagatgttattatgttgttatttatgtaattaaatattaaattttaaatattttaattattataatacaaaatatttatagtataagtatttaaagttttaagtttaggtttaatgaattttttgaatagtacatgtacttaatattagttaagttgtaattttttatctaatttcgttagtatatttaaagtctgttagtgtcttaaatatttagtcaaatttaatttttgattttcttaaaagaagatttgaaagtaatttatattactcaatctctctaagaccttatgatttagattttgtactgacaaaattataattttattaatattaaatatttatactgttaataaaattatttaatagtgtaacgtttatcattattattgttattaaagtatattttt

SEQ ID NO: 77486 - DNA, 601 bp, Cannabis sativa
agtaataaaataaagaagaagagtaaaaaagttgatatagccgtgtagtggtattggtgtaataaagattgcattttgtatttttgatgtaaaaatttctatttaattatacatatttaaatgcatacactgtgagcttctctctgaaactcctttcttctggcgatctattttcaagttgaggttatggctaagacaagggcgaagatgcaggggaagctgaatcatgatgcgaaaaatccacggaagacgaagaagaagggtcatgttagagatttattacaatggaagaaaattaagatgtattacaactctattgtaaaataatacaaggatcaacaaagagattaaataaatgttacaatacataatatacaatatatatactatatatattatatataaaaaagtagaaaaaatgaataaattacacaatattatagcacatatatataatatgaagaagaaaaaaaatcactcactcacaaccttgagtgtagaatagtggggattatcatgacttgaacaaagtattacatttttatccaaaagcttatttacccatacctctaaacactggcgtttggttggaagtaatgaa

SEQ ID NO: 77487 - DNA, 595 bp, Cannabis sativa
aacattatgtttaatttcatttaaaaaaaaaacattatgtttaatttcatttgctatggtacaaaacaatacaactaaaaagaataggctatttaggatttttatctccgaaccatgacttatgtattattgtacccattgaacttttcagtcgttacaaatagtcactgaactattcacattattgtaaattagtctttttgtcaaattttgtcacatgtaaaaaacaaaattatgacatgatcgcttagttaattgctacatcaacgtgtataatttaaaattaaaaaataaaaattatgtatttttaaaaaattattaaattaaaaatcaattaatgattaagaaactgactaagggaaagatgctttattctttgactgtcaaaagatgacgtaagcttttgtttgtcacacaaaacttaataaaaatactaatttagaatactgtgaatagtttatgaatagtttaataaaaataccaatttaccaagttcaggggatacaataatatacatattataatatgaaggataaaaatcataaatagctaaaagaatatttttttagttcacacattttttttaaacacattc

SEQ ID NO: 77488 - DNA, 638 bp, Cannabis sativa
tttgtcaattaatcaatatatatgtatagaaaaataaaacattaaatgacaataagaataagaaataattcataccaaaattaagtttgaaaaaattatttagtccgataaggtatttcttttttgatgtgttgcataattaaaaactagaaatttatttaatccttaatggacatttaataggttagctgtcatatgtacattttagaattattctaagtaatttgaaccatttttatgttacaaaaaattatattatttttaactacttattcaatttatttgacattcaaaaaaatattttactctattttgtatttgttttttcaaaattgtgtacaacataccacttaaaataataaaagtatcatttaacaaataataattaatacttttcaaaacaaaatatcaatcattaaggtgggtagccttattatgtactcaatttataattattagtagatttgaaagatgtggaaactttagtaccagaaataaacttctaaaattagagtatccttaacaacataaatattgtgaagatcttctagtgacattaatctcaaacaaccccatccatgacttttgccaccacttttgccaagactaaaacatttattaactgcacaatttgtaat

SEQ ID NO: 77489 - DNA, 790 bp, Cannabis sativa
aatctcaatagttcagataaatgtaacggcaaaaaaagttcaagaggtatatagaggcgaaaatcctaatttattaaaacaaaaagcatttggacagtaaacgcaacttctatcatctgaaattgctttttcctttatgtattaatatataatttatatgaacattttcatcatatattcagtatccattcttcaatctgaatttgaagtagaggaaatgtaaagacgacaaaataaatgaaaatagctcatcctgcatcactatcactaaaaaatgggggaagtgaaggtttatttggctgtgatactatctcgggcaatatatgctggcatggttttacgtaccaaagcaatctttaatggtggtatgagctgctacatcttcactttctatcgacaactagttggaactgtcgtcttagttcctcttgctttgatttttaaacggtgacccctctatttaattaatttattactttcttctttcttcataagctcttgtcttatgataattcaattttgtgatcatggcatgttataaatgacaatatctttctttataattaattgtatttcagaagaaatggaacaccactttccgttgtcaccttctgcaagattttcatgcttgccttgttggggtatgtttgttagtatatatttatgacacatatatatgtttttttttataaaaaaaacataatacatatctgtatgttaaataatcatgaaattaagtcagtagctctccgcataacaaccaagattttttttttgtaaatattccatc

SEQ ID NO: 77490 - DNA, 609 bp, Cannabis sativa
tatcatttttttcaatataaaaaattataccatataaaaattttggactctaagtttgggtgggccttaagcacgaacctagacagagttttcctaatactatcataaaatattatagctaatataatattacgatatattttaatttaataattattataaactagtgttaagcattcccaattctcaaattgcacatgagtgcctaataataagttttgaggtaatgtattgttattgttgaaataaaaagaaaagggtattgttagttagggcaaggaaatgggccccatacctttttagcctaataaaacgtgtgaaaacagctcaatccagaaagaccttgatgtaatcactcaagcccataatatagcctccatacttcttcatcatcatcataaattaattagtcaaaaaaagcttgaaagctcaactcctttactttcatttcaagtttcaatagtgacccaatcatgttttatgtatcattctttgaacctttcttgtacatacatattaattaatggactcatgaggcctatagttagctagttctattatttggtattataactattcattcacttaaattcatagcacaaaatatat

SEQ ID NO: 77491 - DNA, 808 bp, Cannabis sativa
ttcttttttttttttttttgtcaagcatatatgctagaacaagagtagtgggaaacagatataaaggtagggcctgtttagcatctgaaaatctactttttatcctttcatattatttgataaattttgtctttagctattttcttttttctattttggaatataaaaatactaaaaatatttttttacatttcaatatcattattgattcaattaagtatcggattttatataccttaatataataactataaaagaatatcattagttaataacaataggacaagtttaaaagatgctagacatcaatagtgctcaaattttgtaacaaaaataaatcatataacatttttatattcttcttattattgagccaaatagtaaaatgaatataattcatgtcattattaggattaatcatcaaagaaaaataggagatttttttacaaatattattaggagaaaaaaaaaacataacaaatatctaaaatgaggatattaactaaaatagaaacaacatccagaaaaataacaataatatcgaccaaattgttaagtatatgtatttatatatacattaaagactttatatatatatccaaaataaaaggagagaaaaatctaaaatacatttgatacaaacataatactgccaatcaaggttataacacaacataagtagtttggtaaaaggataatctatttcaatttcattaaaaaaaaaattatgaatttgatttacaaaatccttttgaatgaaccatatatattaccaaaaaattcactagatacacacaattagatactg

SEQ ID NO: 77492 - DNA, 3826 bp, Cannabis sativa
ttgttttattatttttttaaaaaaaaaaaaaaattagccctttttttaactataaatattggattttactttgtgcagttttataattctttttttttaaacaattttatgtatataaaaaataaaattagaaaaagtgataagtgattactactactacactaatttttaaaataattggttcatagtgtcggggttttttttttttttttttgaaatgatgtcgggttattttgaaaacttaccagttatcatcatatatcattaatatttaatatagtaaaaaaaaattgagataaatatagtaaaaaattgatagtagtaatcagttactatcaaataataattcaattggtcatgtaaagaaaaagaaaaactaaaatataagaaaacgaaatctataaagtgtaaaataaaaactaaatagctcatattttggtggtactttatttatttattttggtccataaaaactaaatacaattacctatgcattaatatctctttgattcttcaaattgaagacgagtcctgaaaatattagtggtagaaagtttaaaaaactatttcaaactagaaatgaactgttcattgtccaagagtgccaataataaacagtcaaatttgctattgtggggtcagcaagactccaagcaaaaatttgtacagtaattgtatcaatcaacacatttacaagaaatatgtcaaaagaataacagaaaacaatgtttttgccaatgagacagaacaaaaaattatacatatatagatatatacatatatagatatatatatatatatattttactaataatcacaacaacatgttcaatgggcaagtgcaaatcatcagcagcacaaagaccaatctcaacttctgttcttttcctttttatgaataaaaaataccaatcccaatcccaatcccaatcaaactcacttcctaggggagttgttgttggccatatgtagtttttgagtgctcttatgccaatttggagaaaccattactccacttttcttcttgcctgttggaatgccttttataaggacaacagatgatgagccccccttcttcatttttctaggtgaactggatagccgagacctgttgcggtgcaagacacaccacccggtaccaatttagtttagtttagacaatgttggaagataaagatttgaactttgaaatggttgtgtaagtgttagtactacacttgcctttttctgaaatcttggctaagattatctggtgattcggtactactgatttctttcctcgtagtattcaggttcttcatcgttgctttgtaaatttcttcgcgggatttttttctaaagttctgacccttcacaaggcaaaccagaaaaaaaaaattattttatgttcttacaagcttattctcaaagccagatgatgacagagctacctctgtaaatctacatatcattccaagatttgtataagaaaaatctatgatggttagagcattttgtcaaagtagttgaaacaatttgaaaagcttaaatcaaaatctactgagcattgctgttaggcaacatggtgcttagcacccttatgaggtgacgccctataaatggtaaccgattttctataactatcattaaagtaaaatcaatgtgagagtgctaggcacattataaaagttaaaaaacaactaataagatgtaaggtcatgcaattgcagtatctctcctcagcaacttttacattttgcaatctcttcattgccatttatagcaacagaatttttcaaatttacagttagaccatcactgagttcaatatagaattgtatttatttatcattataaaacaagttacagcatagatgataaatcttaagtagattctatatttatgttgtgtgtgtgtgtgtaaaaaccatccagctactacattaggcaaatgaccattgtaaaagacaataaagaactctgactaaacacccaaattttaaactctcacacttcatatggaagcacatggatgataaatcttacaccaaatcatatctattgaagtaataaaacaaaccaaatcctacataagccattctgaaatgtatccaaaaatccatactaacatatgtttatcaataccattccaagaagattaaattaaaccatgaaaaaagaaaaacatataataggcttactttacttacttcatctgatgaaggctttatagattgattaccaccattaatagcatgatgagaattcaaagctttaactttcttcttctccaaaacaacagctccccaagacaaatcatcatcaccatcaccatcaccatcatcatcatcatcaccatcatcaacatcatcattttctactttccttttcttcctaacaaaactactcaacttacatttcttctccataactttccacacattctttcttctgaaaaccatcttctctgatttccaacacccaaaactagtatcaattacagtcacttcactccttgaataacccttaaatttcttctcctcattctctaattcctcttcttcttcttcttcttctttttctaaacccaattcttcttcttcttctttatcatcaactgctttaaatctcttaacacgaacattcccttttctcctccgaatcagactattactatccgaattaaacgacgccgttatcgccacaacgccactggagttactgttaacgacggccgtggttgtattacccattgatgtagagaaaattctggggtttgtttgtttcctgggaaattttttcccggaaagtttagaactttcgtcagacccatccataaagaagagttccgataaaacattgttcattgcgccgacccatttccgattccgattagcagctctctgagtcttcgtcgttgtcgtcgctgagttgagctgagctaactcggaagaagaagaagaagaagaaaaagaagaagacgagttagggttttgtgtgaggaagtgatcgaggtcgaaatcttcggccgtaggtaaacccttgatggaccggagccggtcgagccagttcgagctggatttaccggcggccggcaccgaacagagcattgatgacgtggcggaatgtgattggagggtttgtaaagattgtagttagagtcgaccgcagaggattagaaatggaagagagaaaaaatggggatcgggtttcatcattgttagttagtcggagtgaaaactgaatttggggtccgaaagcctgtgagtgattttcaggcttcgtatttgtatatgccacgtgtcgaaaccacagtgaacttgaataaatcacgtgcgcaatataatatcttatttaataaaatacaaaaaaaagtttggagtttttatggtccctttcactatgattggcttccactcaattttgataattttgttgcctaaattctactaatattatttttttttttgggaaaattatcttatttattattttttaatttatgatttgagttgttttggtatttgctttgatagtttctatatgaattgctatataaattttggttatgatttaagtcgtatcttggttgttatgtgagttttgatgtaaatttttgtaaaaataggaaaaaaaatttgtattaaaatgtaaaaataaaaaaaaaaaaaaaatcattttttaaacttaattgtatatattattttttagatgaattattgggtgtataaatattcatcattaggtgagacaataaaagattccaactatgattatttgagccccttgtttgtgaaaataattctaactagtttcaatggattaataattggtttttttttttttt

SEQ ID NO: 77493 - DNA, 581 bp, Cannabis sativa
  modified_base (59)..(67): a, c, t, g, unknown or other
taaattatattttatatattataaataaaaaattatattaaattttcttagaaaaaaannnnnnnnnatatatatatatatacatgagttagaaaatttttgaagatgaaatcaaaataactattgaattaacataatataatgtgaggaaaaagttttgaaaaaattgttgggaaaacaattgattcttgatagatgcatacactcatgcatgattgcacttagaactaaaaacaattcctcaaaccagaagtagaagacaagtgaaattgagagagaaagaatgtatattattagtctaatctgattatggaacaagtacaagttactcacttgtaggtgagtttaccggtatttatagttgtccaaagggactaagaataacagaaataactaactcactaaagcctctctaaatgtcctaactgaataaacagaccacaactaataattttcaccttggtcgacttattcattgtaacagaaacattaaacaaaaaacgaaaaaattcaaaaaattacagatcactgggagcagtgatccctagtaaattcagacaatgtctgaatttggcagtggt

SEQ ID NO: 77494 - DNA, 977 bp, Cannabis sativa
aaatagtatataaggtaattcccttttattttattaggtcagttaaaagaataataatgtgattttatgagtatagttttagttgtaagttatgtatatatatacttatatgcccatagaatcatcaccatagctgcaaagttattcatacaatcatcaaagttgtaccttagtctcaacacacacacacaaataccctcgttctatgtatatccatttttactaagagctctaccttagttagtgcttttcaaacaggtttaataccatcaaccagactgaagttcaaaccaaacacatctagaactataacaaatctcaaccaaaagaaaaagaaaaagactgttaatgaatgaacaacgacggaatttttagatggggtttcttctctaggcccaagcttctctgtgccgttccctagtgttagtatttacaatctcaagtgttgcagtcttctttgcagacttattcaactgaaacacagggtgcctgcaaagcttcctcactcctttcctcaaacttagccaatctccactctcatatccttctttacattcactttccctcattctacacacttcagggggtgttctgttactgtctgattgtggcctagaattgttttcttcatcacttttgggcatagaacaccaaagtttctcatcaatgttggattctacgatgctcaaatcagtggaagttctcggtggagtgccgtgctcagcttgcttgactgcactagtatccgagctctgctcagtggcttcactcttgtttgtatctgtagaagagaggtctggaaactttgaacatgaagagacaaactgagccttggtaggtgatgcctcctccctctctcgcagggtctttaaaattagtgtcttgaggaagttcatgacttgcacagcatgaattaaagctgtcagtggatctgccatctgcaacagcaactacttgctaagtccatatctaatgtg

SEQ ID NO: 77495 - DNA, 635 bp, Cannabis sativa
gtaaactgatgcaaactaataaatttttgcatctatgatgtctacgttagttattggaatcgatagaaaaagtttaaatgtcatttgaaaactgacaaaaattgttatttttgttgtagtgctactaacctgtttattaaacaggtaatatatgggttgacacgcctaacacgaaaataaacgatattgacctatgaaaaatatatactcttacatttttttttttataattctcaaacgtaaaatatatttttttagttgaatatatgttaaattatttataaaagcgtcataaaaatgttgtaagcatgttaataaatatataaattaaccaaaattaagcatgattattgataaaaaataagtaataaaatgggtgagattggattagcccatttatatataaatcattgggtttagttttagatacaagtaatgaatagattatgttagttataatatttgtatataacaaattatataatatatattaaaatggaatggaatatattatacattaacaagagtatattttgtactatgtgttgggttttatgccttaaataaaactctatttcaatgtaatcgagattattcaatatcaataaagtatcagaagtatttttcattcattt

SEQ ID NO: 77496 - DNA, 626 bp, Cannabis sativa
tttttgcttcttttcctctccctctctttttatgtgtctcttagctgagccaccaccaaccctaccgctggcggtgcctaccacaaagaacctaccatcgtcgacaaaaactctctctctagcactgacaacacccaacctcgacagcccaaccaccatcgaagatcccatctcttctcttttctttctccgtcgtatttttctttttgtgttttctcttaccattttatttttgttgtttgcgggtagttctggcagttaactcaaatttgtggtgaaatttttttttagaaaaaagtgttattttggactattacgtttagatttataatttcttggttcaaatcaaactttctcgtattcatcattcttcgtcgaactgccattaaaataaaaatatttataaaaaaatacctatggaggcagttattagcaaataacctcctccataaggtccatttaaaggtgcttatttgctaataattgtgcgcctctaaatgaaccctttagaggtagttctcttttatccttttaatggcccatggaactccatgggttacgaattttgccaaaacttcctctaaagggttgaaaaaatagtaaaggcccatttgtagtagtagagc

SEQ ID NO: 77497 - DNA, 521 bp, Cannabis sativa
tttttttttttacactaaaaagagaaaaaaaattttcattaatcaaagacaaaacaagctacaccatggccacaaccaaccgaccccaacaacctccaacagcagctacatagttaggcgtaaaaacatgccttcttcagcttgaataatcctcctattctttaaattatacaacttgtattttactatatctttaatatcatttataattttcatgatagtgaaacaattattattatgcacacaaaagtttctatttttccaaagcatgtaaattgtggcagcaaagagcaaaataatcacaccaggttttttgctagcaaaccagcactgccacctactgtaatccgaaggccaggctgttactctacaccagtcaaaaatctgcttcaagaccgccctagaaacacaacagttgaagaaaagatggtgatgactctcctcttcaatgctacaaacagggcagtaactagagtctaaaacaatgtgaaatctatagaagttattgttgggttttgtgc

SEQ ID NO: 77498 - DNA, 549 bp, Cannabis sativa
aacactatactatagccacacttctacttttcttaataagttcaattaatgtacattaattttgtactaaatacaatttaaaatttattagaggatccatgcataattttccattttcaagaaaaaaagattaatgagaggcatgcatgcattactatatattactattattgaagaacaaaagtgagtagtctaagtctaaccccaaacacaagaaaaatagaaagtctcgtttgaagaacttattgggtttgggtggcatggaatttggaatagaaattaaaagcataaaccaatccaaatggtacaagacaagatttatcattttcttggtggattttcctcattcttcaataatatatacgagaaacaaactacttcctcttgagtcttttaattaattaataatcaatattattattatatataaaaataatattgttgaattaacgtgattacgtgttgggaataatgccacaagaagtggacctagctacttcatttatttgtgtgtcaaaccagaactcttagcttccccatattcaaact

SEQ ID NO: 77499 - DNA, 808 bp, Cannabis sativa
catccaatattgctaataatatagccatattgggacaaaaaaatcatttttcgtcagttttaatgacaataaatcttttttatttttctagcttaactaaacaatgaggcccaaaaatgacgttcataaaagatgaagcccaaaagtgtaacccaagcccattaactcaccaagcccactgcttccacagtttctccatttcagctctccttagttttcacacgtgggtcccgtttgcattgtatgtgcttccattcagcgacatgtggcgattatggaaaccttcttctctatttggcaactttcctcaacttgtttactgaactcaagtgatgttgttcaatatttttaacatgggaatggtttgttagttaattattatatatatatatatatatttatatatatatatgtgtgttgttttgggagaggaatagaatatgcgtttgcgagtggtttggtcatcatttgttagataggttggttagggaatctgttttatttgtgttctgtcgttgttaactaatttgttaatacatcaacttcacttaacatccaaattccaaagagaagaagaaaatgatcagtatataagaggagactaatgttaattggcagctaatcactttttaattactttattctatcatataactcacaaaattctgaacctactgattaattatgtatatttcgagattttaagtataggattttctacaattagagaaagagaaagtatagctactaccaaattatgtaacgtacgatcgattgcaaaatattcaaataaattatgaatgatatt

SEQ ID NO: 77500 - DNA, 649 bp, Cannabis sativa
tttgctacagctgcctacagctgctttttttctcacagcacagctacagctgctttttcccacaacacaactatgccaaactggcttgtactaataaattaccctgaaatccatcaaccacaacacaagtatttttcagtgttgctagtctctcacaatttagaaaatacaacttaccaaaaacattatctctaaatgtaacttcactattttcgatttttttttttgtttttttaaaaaaagtctgccatttcaaatgttactaactctcaaaaggaagaaaaaaaataggagaaacgaacaattttattagagagagtcaaggaagaatcattattttgttccattattttttttttatttttttttataagaagtataaagctgaaaaaataactttcaaaatagtgaatcagtacaaaagttgtttttcttttcatgtcacaatatttttgtaattttaaaaatttgtaaatttttttttctttttttttgaagtaaacaagatttgtaatcgaaaagagaacaagaggaaccaggtcacaaataagggtgaaaatcggtcggttatggtcggtttttacaattttataaccgaccggtcggttacagtttttattttacgaaaattgtaaccgaccgtttagaa

SEQ ID NO: 77501 - DNA, 1319 bp, Cannabis sativa
ggccttagtcattctatctctccacctggttttccaagacttcctccacctaggcctacatctctcaacgccacttcccaaccattcttagacacacctgcatccctgcttcccatatcataaacacctcttcatatctcaattgagcaggttattgcagctaaaagtggcaccagtcaacaaccatctaggcaagatgttgcaactgacattatcatcagtactcctattgaggatgtcacttaaactacaattactttatccattccaacagaggtaattcctgtctctcaacctgctgctactaacagagttcctattaatcccattcctagctctagcaacactcaccctatgaaaaccaaatccaaatctgatatctctaagccaagaacttacatggtgagtagagaaccacttaccttgaaagaagccctacaacaaaagcactagaataatgctatgggtacagagattgtagctttgaaaagaaatggtacctacacccttgtaccattaccagctgaaagaacaccattagggtgcaaatgggtggacaaaattaaagaaaactcagatggctctgttaacaagttcaaggccaggttggttgctaaagggtttcaccaacaacctggttttgacttcacagagacatttagccctataataaagcaagttaccatcagagttgttctcacattggctcttgctcacaactaaacagtaaggcaactagatgtggacaatgccttcctcaattgtgatctgcaagagaaattctatatgattcaaccacctggatttgaagacaaatctgcaccacatctagtttgcaagcttcaaaaagctttgtatgggctaaaacaggcccctagggctggtttgagaaacttcaacagtccttactgccacttggctatttacttcatctaaggatgattattcattgttcattcatcacacaaattcatctacaacactaattctaaaaaatatatggaaagttgaaactcttttatgattcaagaaccactcatcttcccgaacccatatcagagaagagtcgtatcatggcttctctcaataacagatccacaaaacatatcaagtttttggagtgtgacaatggaaatgacattcctcttctttgtacataactcttctgagttctttttgggtctcaaacccagaattaagaacttaaacccaaaagccaaatctacagcgagagaaccattgagagcgttgagtcaaagagagatcacctgtcgaaatccccattcatcatcttattcttcttccttaacgttttcttc

SEQ ID NO: 77502 - DNA, 527 bp, Cannabis sativa
tgctaccatgtgtaggtaaaggaaaggctaaagcggaggaacagtgagttggaggctcgacaatgattgtacatatcgtgacagtgtaacctagagggtttcaatcattttatgttttggatttagtttatgatgccaccctatgttaaaaaaaaattaacattataagtatattttgtattttccatatgtggtttttaacactcgggatcccaacttataatttcatgtatatgtctatataaagttataaatggttttatataaataaggctaaatccaaatagaaaggttttcaagtttgagtgttacaattttagtatcagagtcactgggttgttcactgaagaccgtcaaaattatttggcaggattgaatgccaaaattaggcaggattgaatgccaaaattaggcatgatttggttatcacaactaatgataccacaacttatgccaagatggttgacaaggctcttcaagcagaaggtgcggtaaagtttctacaagagatacgagaggcccctagt

SEQ ID NO: 77503 - DNA, 1208 bp, Cannabis sativa
atacatatttgcttctaaatgggaattatttctttttataatctcataactatttaaagattattttggtagaggctcataaatattctcatttttattaagagggagttatatttacatcttaaaaaacctataaatgcactccaaaactaagtttaccccattttatttattaaaatataaatttttataactatacccaatttatttatcgaattatccttatttgaaaaaggaagtacattccaagttagcttatttttcttcataccagcattaatctaaactgtccttcttctcttctactcccactgctctttccttctaatttatattacattacttttgtaaatatagatctaataggtagttaaaaattagtaaattttgtacttatatatagactatattgattaaaagtctactgaagaaatgatattattttgcaaacctttgttaccttagttatatttctttttttctttttttctttttttcaatatcacattgtttatattatttttgattggagaagttttataaataataagaagtgggtgtggtgtatcggcaaaatgattataactcagtgtaaatttatatcaatctttgcatatgtttgagtaattatttatcgtgagtgatgttgttggtttttcgggaggtaagaggggtagatgcatctcatttaatgaggcaactatttttcttttgcccagtacttctactgctcaaattttgtctaagtattgtcttattggtaagcttctctcttccagagcttttggggaaaatgaagtggaaaatttttgctcaaagctttgaaagacccaggtgaaggttgatgccccattttattgtcaagttgtgttgaatatttttcgctttggctttgataaagtttcagacagttaatgggtgcttgaccatggaccttagtgcgttaagggtgatttgcttgtgttactctcgtggtcctctggtttcagcttcaaagagctgactttcaactcaacccgactatggatacaaatccaccatttgccgcacgactattactccagatcaaatgccaatgttctagctgctcaagcgggtaaggtcatgtctatcgagttggatgagtcaaagccagtctcttagaatagatggattagagttcaagtggagattgatgtgaacaatctattattttgtggttatttttt

SEQ ID NO: 77504 - DNA, 892 bp, Cannabis sativa
  modified_base (818)..(827): a, c, t, g, unknown or other
tttaaacgactgtttaaaagcgtcgggaaaacccatttttgtagtagtgtcatttctccattgtcctccagatgtttgagcttggttggaactatctcttcagctgaaatttaggtggttgctccatctaaagttctacgtatggctgaatggcttgttatattgccctaaggcattacattgctcctcatgaaccccctcatttcattgtaaactaagcagtccttagctaaatgctcattttctccacaaacaaaataaggttcaagtggtcttgtttgtgcttgggcatccatgcgccctttttggccatctttagttgtaaggattttaattttcttttttaaagctttgacttgggcctttaagttgtccttttcccgaagttggtaaatctccgctggtcgatttctattggtgctttcagctacacttcgactagtccatgtctgagatttttcaacaagctcaatgagaaactcaagagcttcttcgatttccttttgatggaactcaatgttgcacatcatttctacgaactggcgctcacgacttgtgaggcctttgtagaagtaggtgacgatgtgccaactctcgtacccgtgatgtggacactgacttaagagttctttaaatctctcccagacttcataaaatgtttcattgtcttttggaaaaatattgagatttgtcttttcaaactactggtcttattgatagagaaatattttacgaagaatgttttggtcatttcatcctatgttccgatagacttagatctcaaataatacaaccaacttttagctttatccttcaannnnnnnnnnaaaaactttaagcgtgcatcatcattgatggttgctcggtcataaaaagtgtcaacaacttcctc

SEQ ID NO: 77505 - DNA, 1238 bp, Cannabis sativa
ttttatattatatagggtcatgaacaatatgctgagtcagctatgcgtgaaggtcctcctagtgttcttaagagtaagctgagagcagttgaaatttgtaaggttgatatccttgaatatgcacgggatttaggttctggggaaagctgctgcaaaatcagacttaaatttataggtccttcttcaaatgtatgtgacaactcactccagttgacacttcctgagctgagagatttgcccgattttgttgttgagaaatcattgtatgatgctgcgattaaaagaaactggagcattggagatagatgcgatgtttggtggaaagatgcgaatggagaaggtggtaggtggtgggatggaaaaattacttcatctcaggccaagtcagaggagtttcctgatagcccttggttaagatatgaagttcgttacaaggaggattctggggaagagacagagcattgtccttgggaactacacgatgagaacatattgtgggagcgtccgcatatcgactctgaaacccgagacaagctactgcatattatttcaaaactagagcagtcggtatgattctcattaatacttacttgtctggatgctgcagttttgtcttagggatccaagtgattgttttactgcttctcttgcaggatggtggcatcatccagcagctcaaccaagttgttcgaaagtcagatttctgcaacaggtacattcttcaaatttcaacaactttctttctagagcgtaatcaccttgtttaaagtctaagaatgcaagacacgcatttaaagcccatttattactccagtctgttgaattttttctgctgtggtaccttttcataggataagttacaaatattagctgtagtaatttgagaatgctgttatatatttggatttatggatattttgtagggttgcggttccattttgcccggaactgatcaagtcaaggttaaggaacaattactataggagcttggaagcagtgaagaaagacatgagtgtgatttttgagaatgccaaggattactttaagcaaaaagaattattgaacaagattgtacacttgtcagaacgatttacaaggaaactgtcaatattgtgtcgagacaatgcagtaaattctgtataggtttgcattttccattaggtttaagcaactcctaattcacaaacagacataaatctaaaatatcctggttttaatgggaagggaagggaagggaa

SEQ ID NO: 77506 - DNA, 621 bp, Cannabis sativa
aatgaagtgtattcagttttcgcaaaggtactttaaagtggtgattaaatatagttgtgtggttgagatatcaaatacaccattgtatgtaaaaaatgtgtaatttgagcgtttgcagaatattcctagtctgtttacattatgttcttccttcttaggattattattattattattatttgctttccagcaacaaatataaaagcctagtaagttcaatttttattcattgaagtatcaaaaaatttaacaacacttcacagattgtaaagagtataaaatactaatccttccttccatgcaaagcagaatgtaggacatcatcatcaatcctatatataattttatatatttatatacaagagaagaagtctcacctgcatccatgtgtcttccataacacgttctggagatgtctcaggtgattgcaacggaggtggcaatggatgaattaactttggaaccacaaccaatcccctgccaactacaagaatagctccagcattgttcgccgtccctaaatgcaaatgtcatacaaaaattactttttttttgcccaacaacattgtttgctgtccctaaatgcgaatgccataataatgataataatttctttttaat

SEQ ID NO: 77507 - DNA, 1141 bp, Cannabis sativa
  modified_base (40)..(54): a, c, t, g, unknown or other
ttaatataaaagttttaaattgacacgtttttcaagaaannnnnnnnnnnnnnnaagattgcacaataattgaaaaagtactgtagtgtgccttagcattaggggcgttacatgaatcttcttcattgaaagtatttcattgaggtagatttaaactatctaggatgatttatgttttatgtgcctttgtagagtaatcaattttgattgttgaaaagctatttgtttcttcaattattaaagggatgagattatttatttatttagataaatattttattcttcaaaaacaaaaacttaatttattctcattggagaaagactatctcatggcaagattttacataataaaaatattattttctcatcactttgtaagaaaatgttgtgaatagaaaaatcagctcttgatgtaatttattctgttaaatatacgtaatttaatattttttatgctattatctgaacctttatcattggattgctctattctactcattctcatttacataaaacaactacacaattattttattctcgttggcttaaattgagcctaaatattctttaagcttgatcaatacttacactacattctaatctctaaggtatatatgaaattcaagctgaatgagaaagtattgtacttatgcattttaacttatattattgcatgtgcatcctgcatcaaatagaatagaaaaaaaaaaaaaaaacatccgaaaactttcttaaacagagaatgattaaggatgtaaaccttgtctttactaaataaattttgcatattgtatgaggtgagttttctagtattgttgtttctactttgtgataattaagaattgaaaaggaaggtttatgtactaataaagtatattttttttcttgtaatattaggccagtgatgctagctaattatgatcttataattagttttgtatctatacctgatatgttgttttgggtaggaaaaaatataaatggttgttgaggtttgtatttatcttactgaccaaaaaaaaaaaaaaagggaaagctaattggataatatatgagatgtggctcttgttttacacaacatgtgacatgtgagtatgtgaggtattttttgtattgagtgatattgaaaattctttgtatt

SEQ ID NO: 77508 - DNA, 1599 bp, Cannabis sativa
  modified_base (27)..(41): a, c, t, g, unknown or other
gggattgcacagcttacccggtatttnnnnnnnnnnnnnnngggactactgactgtcacagtatggtagagctaaattgagtgaatccacttcacccacaaattcttattattttcaatagcccaagagtagttctcaagagccactaagttccaagtttccacatcttggatatcaaggccactatttttcttactcttacacacatctttccaagcaacatttttcctgttcatcaaaattagttaaatcttttcatataaaaactcgacaaatcttattaatcttattcttatattggagatgcaccacctcttcttgtttgatattgttattctacgaattattttttatagtgggaaaatattcaattttttttcttgtgggggatggctttttaatatatttttttttatatctaaacaagttttttgataaaagataattaatttttttaatcgcttaattagtttgaaaattttaatttcttttttaattttgataatcattcaaaatgattttttaaggtataaattaattttttaagatatacaaaagaaaatatgaatctttctcatttttattttgaggaggtacaaattgataattgttaaagtttagaagataaaattgctaatttacaaatgtacgtcaacatttaaatgaaataattgactaaatttctataaatgtaaaacttcaaaagaatttttaaagttatatattttagggagcaaattatcatcaagtttcaaaaatttaaaaaggcaaaaaatagataattattctcttttttattgatggcatgagtatagataaatatgataaatttatccatttataatatatttttacatggtattgtatattttgtattatgcatatatttatattacaacactattatatagatattatattttaaaaaattatatgctaaaatatagcaatatagaaaccctatagcatttcttggatatattttaaagtcgtagctgagccagttgcttgatatcaataggataattgtctgaagcatgaagagaagtataagatctggtcgcagtatatttatttagagtttcagatggatgaactttatcccaaaatacgtatgaggttctgttcttacatgtagtgcttgaagggatacagaaaccaatcgatgttgttggacaacaagtttcattaaaattagtgaatcctgaaaaataaaatattaaccgaactttaaaatataaacattttaatacgtggttacaattacacatataagaaatattttatagtaagggtttgtccttattagtaagaatatctatttttaaccctttgagaaattataattgaaatatttttataagtgtgaacattgtaattatatataatatgcattcacttatttttagaaattttttaataatatattttatagaaaataaaatttaaatatttaattacatatgtaatgtactatttcaaactcagtatcataaattattaaaaaaaattgaaaacaaaccggaagtataatatatatcatattattgagattgttggattttgacatatactaaatcatgctctctgaacttttga

SEQ ID NO: 77509 - DNA, 1329 bp, Cannabis sativa
tacacagtacagattcaattgttaaattgttaaatataactctaattgggagagttcaaatcttataaggagcttttttttttctttctaatattaatttttttttttttttgttaattagaaccattattctttcatatatatagccattaaaatcaagctaactttttatcaataattgtcaccagattaggctcaccgagttcaagagtccaaaatatttttttatttttgaaaaatataaataatttctagtgttttcataaataccattcatttcttttatgaggtccaatagtactttttgtcctaaaatccacaaactttcaatgccagccccgattggcacctatgttataattaattaagggttaattactgcaaaattctcaataattttattttacttgcaattaatttttaaaattcaaattttaggagtaaaactcccaaaattataatacagtaccttacaacttctatccaaatttagccgtgtagttatagttcttactttttaccaaaataaaaagaaaataatgataaaaataattctccccgatcaacaaccctaccgatttatttttctttctttatgtcgataggtatagctcgctacacatatggataaataatagctttcctatctccttacaaagatataaatatacacatagattaaccactatcgctacttatcaatttacatgcatattcctctttttatatataataaactttaataattgatacgcattcacttatatatgtatggtatattattaattaatacagctatatatacatataaagaacgtacatgactgatcgataaacactagtttcagagtttggtctccaaatgtactatatagttctcacctttgtaccattttggatgtatagattttgattaatgaccaagaaaaaaattaaagaatatattattgataatattttatatcaatattatatatatttacaagattaattaagaatcgatccaaaagtattttatacttcgcctatgatcagttggcaaaaagatgaagagagagatatattcaattattttcttttaattattattgcacactatatagtttttatttattaattatattaatctcaaatcatgataccatttctgcagcaagcttaagtacttatatattaagaggaaatcctatagaaaagaacgaaagcttgatcttttcttggaaggatcagagtacacaattactgtgttctagtgttcatgaatacaagaactaatacttctaattaattattaaatggattatcatataataaatacacgcgtaactc

SEQ ID NO: 77510 - DNA, 514 bp, Cannabis sativa
tttttttttttttttgtgtgtggtgagtacttctaactcaaagacacacaattaaaaatatacggttaaccataaacagaatgtcacccaccgccgctgatcaaggctcaaagttgtatattttaagtccttaattatgtacataaaattaatatttcataatatttaatgttaaataaatttatttttaattgttgaaaatatttaatttactttgattttgtgtcatttttcagattgagcaatggtataagtaaagatagtttcaagcccatatgaatcagcctgcctcatttcatctatctagttaaagcttcatcattgactatttttcaattgtggaaattacgtgcagtatggcttttttaaatgttttatgataaatatggcatagtttagtttggacactttttatgacttttttaaactttgggcatgttttatgggtttttaaagtacatacatttggaatgtatgtttaaagatcacatattttattgtttgtagtttctgt

SEQ ID NO: 77511 - DNA, 2729 bp, Cannabis sativa
gaaacgtcttcatgagccagtcgatcgagtctgcgagtagaggcagcaggttgattgaggttaggagcaggttgagcaggggacgacaggtttggttcgatgatatcttcttcctgggaaggtcgagatctggaaggtggaggtcgacgagaagccatggatggattggcgattggtgcggaagtggaatcgggattggatttcgatgtgttctgctctgctgtagatggcggaagaccatcttccgagcgagtggagggccttgccattgaatattgggcaaggttttcttctgataccatatgaggattgagaaacctttgagaggttttgcagagaaatagagaaagaaactatgttatttgagaaaatgtaatgttcaatctcaatacaagtaaagggtgagtttatatattcagcaagaagagtaaaacaataagtctaactaattaagaattagttacaatgataacaaccaaattaatctcttaactaacataactaaccacctaatcctaataaaacgttagaaactagatttacagcgttggcacaaataaatagctatgctcgactcatttgtgtgtgattgtgaaactatttgaaaattacaatacatacttcttttttcttttttctttgtttactttttttttttcaattattctattaattttatgcctattgctttacaattactttcatttatctctaatcaaaattttaccttaactttcttacatatttatacatttatctttgaaaaacataaatttattatatttaaaattatgtattaattatatgaaagtatgaaaataattttaagtacatataatatttataaaaaaaatctatttaaattaaatttaattaatttataaaaaaaatattattcaacttctctcaataattttcaaaacaacaacccaaaatttgggtttaatattgaatattatatcttttatcttccatatggatctgtaccttttattcaaaatattttgaacgtgttttatgatctgttttgaccatttatattactctcaagtctccaactcttgttctccttttgccattttattgacccatatgtatatattacctaataaattcttctcactaccggccacgattaattctagaatattatatagctaactaagtttttttgtcctttgaacttatgtttttttttaaaaaatttttgaggtcattaaaattttttcttaaatatattgttatatttaaattttattatttaatttcattcaattttactaatatggtcacggtttatatattaaattgtgtctcaaatatttttttaacacgtactgaattatacctcttaaattttcatctacatcagactttctttaacaaaattaaataaatgtttttaaattttttttttctttttgatttaagcgtttatatattacaatcatgttttacttgagactcaaacccaagacctccaagacacacacccacctatgaccacttaagctagcctcaatacttactaaaaaaaaagttagcttttttatatttataaaatacaaatactatgatgtacttgagaccataatagactttataataattgaatatatatataaaataatggcctttactatgccaccttcaacattttatctctgtttttgtgtaaactccattattttttttttccttctccaattattttatggtgtagaatgttggaccttaaaataaataataagtcaaacatcacaatactttatttatatataatatttcccatagttaaatacaaaaaaacaaagcttattattattattcattttcgaaccaaaataatcctctctctctctcaaaaaatgatcattattcccaaacactttcttctcttcttcatcttcatatcatctttctcatacctcattacaagcacagaaatcccatgtattaaagcagcttgtgcaattcgtgaaccaaatatccgattcccctttcgaataaagaacatccaaacagaatcatgtggctatccaggttttgatttatcctgtgataactcaaaccaaacactcttcaaactacccaattcacaacagtttacagttcaaggaattgactacgccacacaagaaatttggttaaacgatccaaacaactgtctacccaaccgaataataatcaattcattgaatttttcagattctcctttctacagtccgtacagtgaagatttcacattctttaattgttcttcttcttcggattatttaaggtaccggttgaaccctatagcttgtctaagtggttccacgtatacagtttttgcaacggcgtcgtttaatgttgcggatttcttgttgaagagaacgacgtgtcgttcgataggcagttttggtgttccagttgaatggcctttttatgagaaagtgttgtcgtcggaccttaacgatcatattcgtctcacgtgggatgttcccacgtgcggaaggtgtgagtctcgaggtggacggtgtgggtttaagtctaattctagtcgtgaaattgtttgctctgatatttcttatcgaggtatgtgcaaatcttcttttcaaattttactattattctcattatcaatagaggaaattatgtagaatatggcatatggaaaaattagagatttacttaacttatggcttttttacaatttaagttagttgtatggaaaaatatttccatat

SEQ ID NO: 77512 - DNA, 610 bp, Cannabis sativa
tgccctggtttggtgggatatggtagctcttacttgggatgtaactacaattacctgggaataatttcaagagttgtctaatgtaaagtactatagtgaggcagtccgtagtgcaaagaaaaaggagtttactcaaactcagaaagagaatatgttaggtaatggtgatgctatgaagaataaagaagaaggaaaaacaaaaaggggaaaaaaagaaatgatttgttagctgagaaaattttgtttgtttactttttatttttttaatgatatattttttattttttcaatgattcattttatttttaaatatttatttaggtggatcaataatattgtacaatcaaccatgtatacagtgtgttcacgtggacaatatatacatggacaaccaatgtagagttcaatgccaaaaatattgggagttcaccataaatgctaacagaacacgaatattaaaagttttatcgccgaaatttaaattttaaaagttaattgctagtgaactgaaagtattaaagatttcggtgcaattaactcttaatattttattgtctttcatttctccaattccgagttgtaaaactcttcgattatttggggccgaagt

SEQ ID NO: 77513 - DNA, 3283 bp, Cannabis sativa
tgctaacactcttaacaaaaataacaacttggttgaaatccaaagcatctaggagatcagtcaacttgcgatttttctctgtttccatcaatttaatgtagtgctgaacaaaaagtaaggatcagcacaaatagagaaaaaaacattcctccaacagtaaattcaacatttgaaaccaaaccaatgcacctgtactagaccatgaagggttaatttggcctcgtcatctacatagatttccatgggctgaaacaaacaacaaaataaatcaaaacatcttaaaactccgattgaaatagacttccaaagctttaaatgactagcttcacaattggtcagtagttgaacaaaagacccaaaagttcctaaggtaaaggacttcactacatctttaaaagaacctgggtgttgaataaagcttaattattgaccattaaaaagaagagaaagataatttaaatattttaaaaatccggttaaagtaaaacatattcctatgattgcataaaagataattattaaaatgtaaatatatacacaattgacataacatgctatatttttgtcccacaagaacaatctagatattacatcttgcataaatttcttgcagacagggcgaatctctttgctgagtgttgccgaaaacatcatcacttgcttatcatgaggagtcatcttaaaaatctcttgaacatctctcctcatatctgcaatacatatagacacaaacaaatggaaatattgattagaaggaaaaacaacataataggttaaatttcagaacagaaaaaaaaaaattgatacttcagaaacatatcttgaaactcagaatgcttaaacaagaaaaacttaccgagagactctagcatcttatcacattcatcaagaatgaaatgcctcacattctttagtccaagatccttatctctagctagagccaatattctcccaggtgttccaacaacaatatgagggcattcattttttagcaggtccttgtgaaccttgacattgacaccaccatagaagacagcaacctttaagtcgggcaggtaagtgctgaacctctcaaattcatgacagatctgtgaaaaaacagggaagttatagatgtcaattaattaagttaaataaccagaatggtacaggtattaagaaatgatacaagacaaatctatctacatgcataaaatgtagtcataaaaattagaaattgtaaaagaggataaaggcatacctggtaagccaattctcttgtgtggcagagaacaagagcagcaacctggccagcaactggttctatttgttgaagagttgaaagaacaaagactgcagttttccccatcccagatttcgcttgacaaatgacatccattcctaagatagcttgagggatgcactcatgttgcactgatgaagaatgaaacaaaatcgtaccggacgaaacctcagtaagtataaatgatcttccagatccttttaatggaaaggtttaccaaaccagttttcctggcagaatcatgaatatggaagtagtgatgattacctgaacacaacaataaatattgatatattaggaatcagaacaataagaataacaaacaatttgcttcaaatgaacaattagaataaggggatgcaagtaatcataagcattgaaacataggaatcagtatgccactagaccatgtatgcatatactatgccgagcctcacatacagaacacaataaaactagagtgtgtttggtaaaagtaaaaaaggggaagaaatgagaagaatgaaaaattgttggatgaatttgggttactggtaaggtagttgtttaatatgaaggattctaaaatagaaaggatacagcaaaatatttcacatcctccaattataaccaattttcaagccctccaagttatagatacttgtgaaatttcgtggttcagcggtcatactaaaatgaaaccttttaatacatcttttcagatatgcaaacaatacctagaatcatacttccctgagtttatttaagacgcatttagtctaccattaatgagtacgatcgtatagtatgacattaatggcaaagagtacatatataaaatgacgaagagttcaaaattaaaaatatgcaagtgcccatgtgtatatatacggattcaaaacatatataaaatgaaaccaagataaaaaaattgccttcggaaggatgttcgaatcccgaatcgacaatggctcgtagaagctccggtttcaacaggaagtctctgaaacccgaactgtggataccaacatagcccctacaccacaaaataaaaaatttccgaataagaattgagaacttcaaaattaattaacagtaaacaataaattatgacaagacaaaaccggtagtctattttactaaaaattatatagttcaatttaaggacgaatcaaaaaaaaaatgaaaagcttacttcttgacagattcgccagacggcttagcggagacggagttgggggcattttggtcttcttcttcgtagtcaacgagctcttcttcgtaaccatcgttgtctttaacttcacccatctaagaacgacgaaatattaaaaaaatcaagttctagggttagggttagggatttcaaaaaaagaaaaaaaactgcaaaggcagtagagaaaactataactttatcgcatacctttgaactcggagagaataggaaagagcttgtgcgagtttgaacttctctgtggaaaaaacaacaaaaataataacaacaaaaaaaaccctaaaatctgagagagggagcggagaaaggctcgggataaaccctggatctgagtttggaccgagagagagagagaggaagataaaagggaagttaacgaagtagggcacagtatttatatagtggtggattttggaattatgaaaagaccaaaataatatctcctatatttcttattttatttagaaaattaaataaattgtactttatttcttttctaatatagatgtcgtttatagatgatggtaattggttttcgtttaccatattttggatactttatttcttaaaaaggtataagttttagctttaaaaaatgataattttgagaatgtatttttttgaatttgattatttgaatgtgtttttgaaatttaataaccagttttctttggttattttgttaggtttagtattaacataatttttttgaatttattctgttagtcttcctttctattctagatctaataatattattactcattctttagctatttatgcattgt

SEQ ID NO: 77514 - DNA, 611 bp, Cannabis sativa
ccttagacaatataaaatatttagagaaactttaacagactaatttaaaatattttacttaaaaaagttttatcttatttagcttataagttataacattattacaaaaagagtcatttaagaccttttttgatggtcatgaaatattttctatattttcacagtgttggtcgttatagcaaagaaacattaaatggtaaatactattttaaaccttgtattttacaaaagttaccaattagcctcctattttattaaataataaaatggactttgtctttttcaaaatagtacaaataggaccctgaactgattttttgttaaaataaaacttaattataataattcaatttagagatgttgtggcaaaactgattacattttctatatatgttcgtgttaaaaattatcttcaacagttagttatattaaaaaataaaatcttgaaaattgagctcatgtgctatttttaccattttgaaaaaatatatagttcattttatcattaacaaaacatagaatttaattagtaatttttacaaaatataaagtctaaaataatatttacccaacaaaatacatttttttttatatatgtaaagtcctttttt

SEQ ID NO: 77515 - DNA, 1208 bp, Cannabis sativa
gccccatctttctctgtaaactttcccatatataattatatatatatatacgtgttcgtatgtatagacaaaaatccggatatatctttacagttgtcgaacgaactgaaagtgggtatttggaaacaaaagtagttaatcacgatcaacactcataaaatttacgagcattggattcagagatgttagattgggaaggcacatgggtcttgaactggtagtagcacttcagagaagaaggaaaatggaagttgtggaaatatctccaaggagaagtgaagaagaagaggaaaaaagaaaagagggaggagtgagtgaggcaacagaagagagtgggagctttatggctttattttatttttaagtcaattattattataattatttgagagttgtctgtctgatatgtccaaattgtaaatgaaccttccatctgaaatccagcttcttagggactgtattgcaacatttgctccgctggcttctacgcgtgaacttactttcttttctttccttgtgtttttaaaaaaactactttctttcttattactaattaattacattacattatttatcaaaggaaacttcccttattttttttttctttaagacttccccttaattcttcttttcttttttaacaaaaacttcacctaatgtataactgttataaatactaataattatgtcatcctgtaatttttttatttattattattaattataattaatattctttttttttttatttttcttttttatagtttcctaatatttaactcttatatgtgtataaataagagatcacctattaaaataaaaaactaagaaaattctcatctattctcaattttctttttctaaattataattaatacattatcagcatgggcctctaaccaaggtataataatatttgttatatgtgatcttgaattattttaaagtcatgatacgttaaatatatatgtatatatatacctatctaactgaaacacatttgaactagctatttttttatttatttattttgttttgaatcaatatttatacaatatatatctatgtttatatatatatatctatataaatgcctatatgttatatatgcgtgtgttaggctatttttagcctatattttggatcgattttatgtgcgtttttcactgtgttgggacgaaattacgcttgttttttatgttttcagg

SEQ ID NO: 77516 - DNA, 595 bp, Cannabis sativa
tactagtattgtttttcgtttttatatatatcgggtacgtgcgtatacggtgtattttaatttatatatagtctcgagaaataaataaaagtattttttctatttttgaggacaataatgttttattatatctaacggaatattttaagaacataacaatattctgttaaatttaaaggtgctacgtgttagtaggtttagttttataaatatatataaatattaatattatggggtgcttctataatacaccccatcaaaatgggtatactaatgcaatttttaactatttcaatatctataagaattttttagtctaatttttttaatagtcgtgtacgttatacttatttaagacatcctgtaaaattttaagatttagaataatttataatatcgaaatcattgtttaaactgtctattttacacgcgtataaaataaaaaagtcacgagagcaataaattctttgaacactgtttttgacgtgttaagttttttcgaatttatcaaaattttgtcaaatgtcttaaataagtactatatgaccataaaaaaattggaccaagtaattttttaaataccgaaatagatatg

SEQ ID NO: 77517 - DNA, 558 bp, Cannabis sativa
ggatcagttgcgttatcggcctttacttcacctacttcaagattccggtgagtctattttcctattctttccattcttttttatttaaattgagaaaagtgaagtgatggaaagaaaagttggaaataagataacagtcttttacaacacaacacaaaatcactttttctattgtaaaatttataaagtggtgaaaaatagttgataaataaaatatttttctatcttttcatgttaataaataataaataaaatatttttttttatactaacttatatttatatttttaattttttaatcattaagtaaaatagtagaagtatataatgtgcattatttatttattaactattatttattgcgtcatttgttttacaataaaattaaataaaatacaataaaaaaattatatttaaaaatcatattttgaaaatattattaatgaaccatatactataagagcacaatttaattaataatttttcccctaaactttgacatgtacaaaatcgtgtcccttgaatttttttggccgttaaaaattccctccaaactat

SEQ ID NO: 77518 - DNA, 658 bp, Cannabis sativa
  modified_base (541)..(555): a, c, t, g, unknown or other
tgtcagaacagtagctactgctaacgatcacaatgcagcaagaccagcttccatggtagagaagcatgtccaaacctggttgccaccgcagggtcatggttacaaactcaacgtggatgctgctactgatttggagcaaaagaaaatgggtattggggtgattcttaaggatcataatggtttggtggtggctgctttttcatgctgttaattgggtgatgcaatctcaactacctctcattcatatagaaaccgatgcttcttgaatttcatctgctttaaatgtcttaaccacagatttatcatgtttttcgaatcttattatggatgtacgttatcttttatcctttttccctcaagttttagtaagccatgtgaatcgaactgctaatcaagcagcacatggtttagctaaatttgctttagggttggatgatgacataagttggataggagaaatttcctatcctattttctctattgttgtaaatgatttcaatctataataacagtgaaatttctcaaataataataataatannnnnnnnnnnnnnnataataataataataataatgcagattaatacaaaccaaccgaacaaatgaaaacagagaaaattgattaatatctcttatattatagacttacccaaaaaaa

SEQ ID NO: 77519 - DNA, 3397 bp, Cannabis sativa
agtgatgtatagttttgatcattcaccaaaattatgtcatgatttttggtcatttctcgcgatcatatattttgaatgaatcatcaggcacaactataaaattgtatctaaaaattatacattacgtaaaaaaaaaaaaaaaaattgtttgaaatttgagctcctctattattgacttaagtcttttaattttatttatttattaaaaatatcataattaatttactctaacaattgtgattaatgccataaactaaggattttagtttagttcagttttttaaaaaataaaaaatagtaaatgtacttaaattaggtagtaagaatcttggattttatttagattaatgctttgaatgagtgttaatgatgataagagctaggttaagcttttttagagtcttaacgaactttcctcgttcacctactatggtggctttccctctctcttatcatcattaaaactcatttcaagaattaatctagacaaaatccagattcttactacttaatttaagtacatttattattttttatttttaaaaaaacctgaactaaaactgaaatccttaattcatggcctttaatattcacacaatagatatgaaatctcgcttcttttattttaatttgattttggttccgtctaataatttttctataataaaaaaaaatgaaataattcacagaagtactttattaaacaaaaagtgtacttaaaaaataataaaaaaaaattgtgggaaggactaggaagtagtagtaggacaaaggcaaagcggcgtgagagtaatattattataaataaaacatctatctgtgtaaccgtaatttgcagtgcacgttatatttttctgcttgaagaaaaaaaaaattgataaagaaaaataaaaatctgtgggatgaatttgactctttggctctccattagagacccgagaatctgagctttttacgagttgggtttttgtttgtttgtttgttttgttttgaattgggttgccttttttttttttcgtctagtttcgttaatggcagatgaagtggtgatggaaaatgacccatcatccattgcggcggagaagaagactgtggaattgaagaataagttgcagagattggttaaagccattgtagatgaagaagaagtagaagacaaggagggcaacgacacagacaaagttgaggataaagctttgagggtcttgaattctttgaaggatttgaaattgaaaaattattcgtatgatgacagtcttgctgttcctgaagtattcaaatgtccaatcacgagagaactcatgggagacccagttgtcttggccactggactggtcagattctcatctttttctttctttctttttcttagtgtttgcctgccattttcgccgttcagctttaatgcttttgaacctgattgattaagcatgcaaagtttaatttattgtcgttatattttctttcttctttaagggtttttctctcttacttttgatcattctgcttctgtagtttatggtttgattctaatgaaattgcatattcttgttagtactcaatggatatatgattctctgaaatcactctgttattttcaaccttgggaatttggaattgaaactttggataattctttctgggatattgattctttgaacttgcatcataggtccaacaccacactgattcctcttaagtcactttgggtttgctaaacaaatttgttgttttctactgtataattctttttgattccttacggagcctaatttccatataattgattgtgatgtagcagcatatgtacaaagttgattgactgtaaaaaagaaaaaacacacatcttccttaactctaaagtttcaaagactagctagctgctaatcaaattgtttattgtaaaatggaggaaaagggtttttactgtcaagctctaagatgataagccatggtgaaatttttgtgtgttgtacctatccttgatggtctagtctttggctagtcatatttcttggtttcttgatgataagcatttttgtgttggattttaattgtgttagctgtcaacttcaaattttcaaatcttaataatttactttttacttaataatgatttttttaagtgcagacttatgatcggccattcattgaaaggtggttctgtgaaggtcacataacatgtcctcaaacccaacaagtactctctcatactggactcactcctaattacttagttcgaaaattgatttatcaatggtgcattgagcgtgggattgaacctccaaaagtctgccaagataatgatgtgatcgtgttaagaggggatgacaaacctgacataaaatctctccttgagaagctatcgatgttggaatatgatcagaatgaaacagcaaaagaaattcgttctctatcaaggaagagtccatttactcgggaatttttcggcaagtccacagaagcaatcaccaaactgcttggcccactaacaccaggggaggctgataggaatcctgatctacaagaaaatataattgaaacacttcttaacgtttctatagttgatcagaacaagaaattagttggggaaaacacattagcaatcactctgcttgttgaatcaatgcaatgtggaaccattagaaccaaaggaaatgctgctgcagctttctctacactggcagaccatgattccaacaagattattataggaaactccggagctattaagcctttgatcaatcttttagaggaggaggaccaatgtgtggttaaggatgctgcttgtgcactattcaacatttgtacctgccatgaaattaaacagaaagccattaaagaaggagcagtaccagtgcttgtaaaaaggattcaggaagatgtgatggtcgaaccgttgttttctatacttgccctgctttctgcccatcagttggctgtcgatgaaatgaacaaggttaatgtcatgcctttgttgcttagcattataagacagaatacttgtgagaagaccaaggaaaattccatttctataatccagatacttcttaacaatgatcggaggaaaatgagggcaatcaatgttgaggaagctaatcatggtacaattaccaaactttctcagactgggacttcaagagcaagaaggaaggctgcaggaattcttgagaggctgaaaaaaggtgctttcataacacatactgcctgatatgccccctccccctcaaagttagattcttagacaccctttgtctatattcatgtcaccactaacttttttcaatccaattatatacacaatacatgataagttgaagctattggccctggaaaattcctgtgtttttcttaagagctctcttttcatgtatcagttattgtatagatcaatcca

SEQ ID NO: 77520 - DNA, 710 bp, Cannabis sativa
tgttaaagttataattattgaaatgaaattagtgaagcattgccattgttaacactttgctagaatgtgttttataaaagtagttgacattgacaaccatgaaaattatttgtcaacaacaaaaactggattggtagaggattttactagactcaagtgaatcgaaccgacaatttgtactccttcccaaaatgatcgcgaccggaggtgctccggttgaaaaataacaaagaacccttttatccacattcaaaaccaaagcattacacacaataatcatttcaaggttatgaaacattgcagatgtataaagcattagcatataataccaagttaataatagtgtgatgtttatcaaaagaataaccaataggggcatcaatgaactaaatggctactacttaacattttttactattagtatgtacaaaccgttgagcatcatttcccaatctatgagagactaattctaattcagaccaagtcatcttcttccatttctttggctttgagagcttcctttaccctcagcagaagcgtagtcttccacggatcctgcataagatctcagagtatttgcgattagagcaaccccggtaaactaaatgtggaaagggaaaactaaagaactctttcagcttcaagaagagatctcatttagtttttgttcacaatgaacttaagaacaccgagaactagcataaaagtaa

SEQ ID NO: 77521 - DNA, 500 bp, Cannabis sativa
ttcaacaatggagttgcttgaggtatgactttttatatagtggagtgtaaatgagatgagataagatggatgagagaaaaaattaaaatagagtccaactagctacaactttaaccatagtttgagcccagatagaattggggccgcccaactagatgcacagcggcatgaggaggaaatttgattgtatatccactttactttacttgtcttattttttacttttatttttatatcctttaaaatatcacttttatagatgatatccctattataccctttaagtttatataaattatgtgctaaacttaagtggagggtggggatatattgggcatattactcacaaaagtgagttgaatgaaatataatatgaaagtatttttgattaatagatacaaaaaaaaagtattcttcaacttttccgcagcatgagtggccaaaagcctgcaaaacaaaatgtagtttcactcaaatggtgtcacttgacttggactaca

SEQ ID NO: 77522 - DNA, 698 bp, Cannabis sativa
cgatgaagacatcattgtttgttgttttcctggggaatttgaccaccaacaaaagggtttggaagacattgcatatgtcatgcaatcttgatttgcttgaatatgttctaagtaatcgttcttgggtaagctttttacttttgctgatcctgttcatttaatatcattcgtaacgaataaattttagagtatcatttttttgatatggatgcctgtttgttaattttatgaagaaagagtgaaaaatgtatatattagaaaaaattgtatggaatgtgtgtgtttagttattttttctaaaaagtaaatgtgtgtgctttttttttttttaaataaaaatagttaactatgacccttggctgcatatttatcaaccaaaagattctgtaaagtgatcaattttttcatcaaaaaattattttgtttcatttattgttaataaattctttttttttttccatttccacacatttttctataaacatgcttcatctgtttcatttcatttaaacaggttaagggaaattgtattacctgccctgaggagaattgctacaaatttgacgagaagttagtgaagagtctatcttccaatatgaatgagtctcagactagtgcagttcttgcttgtcttcacatgatgcagtgcaagagcagaggtgctttggagcttgtatggggtccgcctgggacaggaa

SEQ ID NO: 77523 - DNA, 2172 bp, Cannabis sativa
  modified_base (627)..(627): a, c, t, g, unknown or other
taattaagcaaattttagttaatcacgattttcaataacctcgttgattagcaataggctgcacaatacgtttaaaatcacgctaacatgccaaaattagttaggctgttacattacccgtatcattttaaatttttgatcagaatattaaattagatagataattttagttttcttttcattgttaaattagaaaattagaggaaaaatagaagaatttatatagactaaattaaaattaataaaataagaaaattaatgagaaaatagatagaagttattgaagcaattttaaagtaccacatcactgcctcatacttctcctttatatatatagacatatatatatattgaatcttctacttttcctctaattttctaatttaataatgaaaaaaaattaaaattatctatctataatacattacctacattttaaattttttatgagaatattaaattagatagataattttagttttcttttcattaataaattagaaaattagaggaaaaataaaagaatttatatagacgaattaaaattaataaaataagagaattaatgagaaaatagatagaagtcattgaagcaattttaaagtgccacatcaccgcctcatactnctcctttatatatatagatagattgtttgattaattaaaaatatatttaaataaatttctccaaatatttattttcttattttttaatatttttctcacataaaaaatactataaatatgccaaaaagaaatctgttttcatatatgaattttattagctggtaaaaccagtaaagaaaatagagagaaaacagagaaaacaagagaaaaaggagaaagaaaatgtagctgctatattcattcagtctaaaatgaaaatacaagagatcacagtccatgaatatagctgctaataacagaaagagaaagaaccaacaaactacaactagcagtaacaaactcttacagttataacatctaagcaaaccaactaactaactaaaactagctaacgacttttgacactccccctcaagatgaactatagatgttctttagtcccatcttgtctttgatgctcttaaactgattaggaaataggggtttagttagaatgtgagcaagttgatccttagatgaaacatgcacagttttgacaactccctcttgcaccttttctataactatgtgataagctatctcaatatgtttagttctctcatggaaaactgggttggtagctatgtgttgtgcagatttattgtcacaatataataaaccaggtcctttatgttctatctttaattcttttagaactgagagaagccacacaatttcacatgtagtaattgccattgccctatattcagcttcggatgaggaccttgaggtcgtttgttgcttcttacttttccaagatatgattgagcttccaatgaatatgcaaaagcctgtggtagaccttctaatgtcaggacaagaagcctgatccgaatctgtgtaagcatgaagctgaacatctgtgttcgaagcaaagaatagtccctgtcctagactacttttgacatattgcagcactctttgtgcagcatgaagatgagtaacacgaggagttgctaagaattgacttagcttgttgactgaataagagatatctggtctagtaattgttatatattgtagctttccaacaattcttctatacaaagtaaggtcgaccatcttctctttttcatcttgtccaagcttcaaattggcttccatagaagtgttaactggtttgcagccaagataaccaaggtcttcaagtaattgtaatagggtctttgagagacaaaaatccctttgtttgatctagcaatttcaagacctaagaaatattttaaatttcctaagtctttaagctgaaaccggttgttcaatcttattttcaaggcttgaagttcatctagattatttcttgcaagaataacatcatcctcatacaccaataagaagataaaacttccattgaagtgcttaatgaataatgagtggtcggttgcagagtgatgaaatccctcatcaattagagcactagagaacttggcaaaccattgtcttgaggcttgcttaagcccataaagagacttttgcaacttgcatacagcattaggtggtaactcc

SEQ ID NO: 77524 - DNA, 1453 bp, Cannabis sativa
aaataattgttagcaaaatattatctgtactgacaaaattagagaaaaattacagttttacaaaaatcgggtacttatgccgctaaaaataaacattgggtttatgctgcttacaaacatacaactttgggtacaacttatgccgttatttaccctaaataaaattgctatctatcaagcactttaaataaaaaaaaaaaaaaaaaatcaaagttcgaattcaccaattttgcttctatcaataaagatgtttttttcttttttcttttttatactctttgtcattctaaatcagcaagtggattgggctttaaaagtattttggattggaatatagtaattatgtttaaatatgtttgggcgattgccaaaaaggaagacaatttataggtgaaatgggttcataatatctatgtgaaaaaaaggagtggtgcaactataaagctccggctcaagctagttggtattgaagaaaactatcaaaaaaaaaaagttaagagtttgttagatataaaccagtttgtgtctaacaggattcaaattgccaaaggatattagttgcttgcatctaatccaaatagagtcaaatggagtaatattgtttggagcaggcacaatattcttaagtatagcttcatttatttatggttagttatgtttgggagaattgaaagtaaagatagattgttgaaatattactgataatgctacttgcctattaagtaatggtaaaatgaaacaattgatcacttactttttagtgttcattttctatcaactgtttgaaccaggtgaaagactagctgcaggttaaagatatgataaaagattggtccaaaaatgtaattaataggaaaaaagattggtttgacaacttgtaaaattttatagatcactaggtcctcttcaattttagaggacgctattagtttgtacattgtatttgttggagtaatgatatacttgttgattcataaaaaaaaatagaaatatttttatttgtagtactcaaaaaaattataactcaaattttgttatataatcgtgtacattgtagttatattaaatatttcacttagaatatatagtaccgaaaataagaatcaattattcatgatttatttaaaagtagataaaatgtttactataactataatataaaaattgattataatttctttaaataccgaaaataccccaaaacaacatcttacttgcaattatatatagtactataaatgttatagaatagaaatgtattattatatttatagttgaaagtgaggaatagctgaggtaccatctagtccctttgagacataaagagttgtatattccttaaagtggacctctttgtagagtggtgggttggtgtgagagagaagctctttaattgggccgtaaggtttcgcaatattgggaatgcttggataaaaaaagcaagctgctgata

SEQ ID NO: 77525 - DNA, 1524 bp, Cannabis sativa
  modified_base (1069)..(1079): a, c, t, g, unknown or other
gaaaccctaggttattttggacactaatcatacaaatctaaaacaattagaaaattaataaaattagcagtaaatactattttgtacttgtgttttgcaaaagttattaattggactctctgttttgttaaatgacaaaatggaacatgtattttctaaaattatacaaatagaatctgaactgattatttatcaaaataaaacttaataataatctaatcgttatgataaaactggttacattttttgtatctgtttgtgttagaaatcgtatattaaaaagtgaaattattaaaaattgacctcaatgtcctatttttactattttagaaattatagggtctattttattatttaacaacataaatggttcaattagtaacttttacaaaatacaagactcaaaatgatatttaccctaaaattaaggaagtttaacatactagtaatttgggcataaatagataagtttagatatgattacaaacctcaagttgtcatagaaagtattaagaagtatgtgtgtgggagtcataggatcaaagtaactcatataaatataaaaataaaagacccttctaaaacctataaaaaaaaattgattatagataaatatataattaaattttttaatagtaaaaatgccttttgttacgattgtgaaatttatgtaagtacttggttgttaagtgtcaggttagtgtacgcattgttatacctaaaattcggctatcaaccagaagctgtcacatgtatttcaggaggaatatgaatcaactcaatgattatagtattaaattgcattattaaatgcaacttaaataactcatttcaataaattacggttgatagaaatattcaaactccctgctgttggaagttagtttaccaagatctagatatacttatgtatgttgattataattttataatctaacaccctaaatatgaattttctaatacgataaaataaacatataagagattaagaaatctttacattgatggcagcagaataataatgactcctttcatttagatctcaagcccttgatttctttctgtagcnnnnnnnnnnnaagatctgaatctggatcttctctccttcaatttggttggattattcacattcttccacactatgattgagtacttgacttgatatgagtgggcatgatactctatcactaaatgaacaaaatcaatgaagaagaagaagaggggatttgaaattactataaaaggagactctcaatttttagttgtctgacaaagaatgaaaactaggttattttagatggatgagaatgagagttatcttattccttttatagtatttcaactagagtttagtttagaattaaatggaattaaaaaagataaaataatggctttattagacttaagtggtattccatgtcatggacctcactagttacaattttatcatttatttaactcatctttcttttcacaaatgccatattttaattctaactctataataattataattaattatca

SEQ ID NO: 77526 - DNA, 7435 bp, Cannabis sativa
  modified_base (7404)..(7410): a, c, t, g, unknown or other
tccaaagcccaacttttcaaaaacaccatatttttcacttaaataggaaaataagcatcttttgagagaattaatggattgggcctaattaagcacataaaattgggaaatttacatagggtctgttcggcaatcattttgctttttgtttttttttttttaaaaaaaatttacttaacaaaatcttgtagtttcttcgtggtttttgattaattaatcaaaaaattgatttttttaatgattaccgaacaatactatagtatactaacttttgtcattttttttacaaaaatactgccatttactgtattttttataagtttcatactgcagtatactgtattaagttttcactgttgttctactggtattttttagttgttctattgttgttttaagttgttctattttgtgttttactggtgttttataaaaacacagtatttctaaaaagattttcgtgtgacagtatttttataaaagttaacctaaattccagtatttttgtaagtttctccataaattttagggataattacatcacatattgaaatttccaatttttttacttttatactatggagcggaattttttcaaaactacaatattttcttttcaaaaatactgtataagttttatactgtactgtggtaagttttcactgttgttctatagttaatttttagttgctccactgttgtttttagctgttctgttttgtgttctactgttttcttagaacatcagtatttttgaaaagatttttatgtgagtatttttgtaaaaattaatctaaatttcagtatttttataattcccaaattttattaagaccctcaagtcttgggccttgggccttgggctagttttgttgtattaagaggaaaggaagaacaagggtgttatctagtaattgtactatctgctgcaattttggattcattccacttcgagatgagcaaaactcatttcctgacttcatcctactcctcttcttcttcttcttctgtaagtttttgtaactaattatctcatctcaaccctttttccatttctttctctcattttctttcccttttcttttatcttttttcttgctgagatataagtgtttattattgttatttcatttagtgagctgtggataggaggcagccatggcgactgaatcccagtctcctcctccttcgacccctgctgatcaaagttcccagaaaccaggttttttttttattcctttgattctttcgaattttgtttttgttctccttttgcgttttttatttttttttagttttcaattttatttaactcaatagtttatgtatgtgaaaatttcttagaaatatgtgaattatggtctataagttgtcttcaatcaaatgggtatgctggcaattatttttgaaaattagttgcaatccaacctgatattttgtagtacttgctagctctgtagcaattctttatgttataatcgatcttgaaggttttgtatgttcttatggattcatgagtgattctgtttggtttgaatttgatgcttatgggaaatatacacgatcattatctttggtacattcaagttgttcactttgcttagtattagtaattagttcctttgtagtttttcaattgtgtgtaaagatttgtcttttattaggctttacatggcagtttcaaaataattttattccgtattgaaatactatggagtcaaagttttattaccacgtaattgtggtttctacaaagaaaagaatctgaaaaataagctgatatgcaccatgtactgtccagaactaatcattcaatagtcatacatattttatagtgtgagtgttctcattctatgatatatttgtatatatattttgtaaagattatgcttttgcatatattgctcgagccaccattactctctatgttgaagataacagtgttgtttcttcacttaaacagctagtgtcatgcaaccaagtctaacaactgagaatcagcaaaatgtccaggcggaagctactaaggaaaatgcttcaacatcggtgtttgtgaattcggaaccaatgcgagaggatcaagtacagaatgcagtgaaattcctctcacacccgaaagttaggggctctccagtattgtataggcgatcttttcttgagaagaagggcctcacaaaagaggagatagatgaagcttttcgacgagtccctgtaagaaagcttttattttgtaaattatacaatttcctacaaagtatgttatattgccttatcattttcaaatattcatgttgttaagagaagtgctttcacaaattacaggacccacctccaagtgtacaaactgctggtgtgaatcaaggtagttttttcatacgggtttatagatttgaccaaagtttcactatttataacacaacttatgtttgctgttgtggggattttttctccttgtcgcagatggacagaccacatcatctagtgttcagccacaaacatctgcacctgctgctcctacaaatgctgtttcccaagtggcttccataacacgttcacggtttcattggtctcatgctgttcttgctgtaggattgttggctgtttcaggagctggaacagccatcatatttaaggtattgagatttgacctgcgtacttaaccatccaacaagtgggatatgttaatggtcattatcttgattcttgtccttaagatcgagtgctataatcttgttagtacataccttataatgcttcttgttctgaaattcagtttcagctggctaaccctattcttatactgttttaccttgtaacacttttcctgttttagaatgctgttattcctagattaaagtcatgggtacgcaaggttatgtcagaagaagaaaataactctcttgagaaaaaagatcctaaaccaagtgtagcagaagaagctgcagctgctgcaaaagctgctgcagctgcagcagctgatgtggcaaaagcaagccaggaaatgatgagttcgaaaaatgatggtggggtgttttatcctactttatcttgcatgatgatctgtaataagtcttcaattttaatttgttgtttcctttttcttaccatttgatgagtgattaacctaactttatttgtttttgcttcagagaggaaatactttggggagcttttgaatgtgttagacatgcaagtgcaagaaatgaagtcaatgggtaattccataaaaagattggaaggtacatagaaattactttacgatcaaagtagtagatatgaatcagaggaccagtgttgtgctcatgaatatttgctattacggctgtacataaatctgaagatatattggtttctgctttggtgtaggaatttatatttgaatattttttaccccagataagaatttattaagatgctattcaatcgctcttttttgcctattcatcaggtgaaacaagtgcacttaggagaaattctggcagcgattatgaaaatcatcaaatgaatgtcgtaaactcaagggttagttttatttaagcacaagttaaatgtaaatgctgaattatctggaaagcaataacaatctcttttgctcaagcgttggttctaactaactctcctttttgtacagaaaccatatggtaatggcagggcagattatgactcacactcaggttgttgttacacttctaagtttactgtttcttacaattctaactgtttcttactagatttaaaatcttacaattccccgtacagttagatctgcctcacctcctgcatctgctgagctgtcatttgcacctccacctcatccaaagtcttatatggacgtaagttgttttctacatcttttttggcctaaaaaacgctcttaaatcttaatagttgatgtttagttatcaaccgaaattttgtatgaaagtaagttgttttctagatctttttcaaaaatgttcttttaaacaactttttttagtgttttaaagacctttttccttgaggttatttagctagtctttagaaatacaaatattttgaggagcatgttagtgttggatttattatcctgttgctgcagtatctgtaaggatcttgtttttacactaaactgatgaagtgtgactcaaatacttctggtgtgttttctcatatctaacttttctgatcagctggttaatttcaataaactatgctcgggtcttcaaacgtaataacacatatcaatgtcatatgtgtctatctcctttggatgatatctaatattatctttgttgctccaactagaaatgagtttattatttgtaatggtcaaagtgtttgatgttcttaattagaaatttattgatagaaatgtttttatcaccggctgacattaattatatgtatgttgcaggttatggccatggtacaaagaggggaaaaacctcctaatgtcagggtaatccactacttcaaatagagatcagtttagttctaatgtagatcagtttagttttattttatatttattttttatttttctggatttgttggcaggagatcaacgattcacctccaaaccctaatcaacaaccatcaaatcctcgtttagcaccaagatctaaggttagcttgtaatgcatcatttttccacttcaaattcttgtttcatttgtatgcctaaagagcagaaaaaattcctagatagaaatttccaagtcttttcagtagttgcgccaaattaaactgaataatgatgtatttccttgagtagccttgggaggctagtcaaacccagtactaccaaagccaggtaattcaatctcaagggagcggtgaaggatttacttccaatccacaagacaatgggccgaactattcatcaaatggagatggtccagtgccttggtggcaacaaaaaaatccaagaatcactgaagttgaaagtgaagatgaattgaagactaggtcttatggaccgccaaccactgaacaaccaattaggcgttcatgggttccacctcagcctccaccagttgcaatgccagaagcagctgaagccatccgaaggccgaaatctttatcgcagaaggagctttcagctgatgatcagtcagagacacgttcatcagatgtaacggatgagttgcagaggattacaaaaatatctgaatctggaggcccggttgaaagttatagcgagagctcattgatgaactcaagcgagatacaagaagctaaagatgaaatttatgggtgataccagcttcaatctgaggtatacatatactccaccttcattagtaatgctgccatgaatggtattagcaattaaaactgctaatatattttagaatctcaagctaccattggtataagatccctaagatttagtaccaaaacagaactctccaccctacccttaatgtgtgtgtgtgtacttatataatcctttgatctttagataatagaaaggataatgcacaaccctgcatacccaagtccatggtattaggcaaccaagcatgttttctttcattcggaaactagtacatgtcatgtcacatgcctttttcctttctactgaaattaatataataataaatagtaattagtgatgcactaaaccaattcaactaatagtgtcttgccagcattgtactctgcttttttttttctcacatagacttctagtctactgaagtggggtttatggagtggacactctcttctcacccaccatcggtctttagagtgcatgagatttaaaagcgtacacgtttaacttcccactttcttagttacctgtttttgtggtaattactacttgtttgatactttacagtcatttataatataagttgactttttctgtaaactgtttctggttaggttttggaaaccatgatggataccagaattgtttatctcaataattcacagcttttggatcttttggacatggaagcattatcagacaacatattagtatatcagttcattatacgcatcaaatttgatgttgaagtcagtctgttatgaggggtctcaacccttataatttgtgcaacagagtttgtataatgaggattgctatttgttttagtttgtaagactgcatataataagaaataatggaaaattatagcttccttttaggtaaacatcaatgataataataatataatatcaattttaatcagaggtggtatattgttattggtgcaattcaatattggttctaaatagcaatgcccatttatgtattctcaactggaagattttgacacgacgaggcatactatgttcaagtttccatttcttctagaagcacaagcattaaaaactcttccaaatttcttgccataacgtgaattttgttaccctctagactagaaggccctaagtcctaactttcattagtttggtaacttagcccctttcacaatgacaattgtgacctcataatatcaaaaaatggctttattttttggtaccaattaggtcattttgaagtattgcagtataagtttaaggctacttttaattaagtatctcatcacaaaccaggccaagctattggttcattgcgatgaaagaggatctatgaaatcacaaagattagatacttttaaataaaaaagtaaataagtattgttcaaaaatataaataaataaaatagtccaaagtgaccgtcactcggaattgattatgctattatattataaaatgagataatgccatcttttactttatcttaaattgataagcatataactgtttttgtctatactgacccactaatcactacaatttgcttctttatttattgcttaatagttgttaatattagtattgattagatggccccaaaaatatgaacaataggatattttggtattgagcaagaaaagattccaaaagcgaaatgtgctatgcttgttttgaaaaatgtcgttttttagtggtgggtagtttatttgacaaatgaaattgttgaaaggacatttgtgtctttatcattacaattttcactcatgatctcattgattttaacatttttattttttttctaacagaatgtttcatgttttgggttgtaataatgtgtttttcttgctaataaaaacaggatactatcaaatctttgtgacaagaatactaaatattttgtaatagttgcacttaaattctcaatttatttcttttttagggcaataatatcaaacctttattaataattttattattattgacaatggtaaagaggaatttgaatatcaaatctttaatagtggatgtatttatgtaccatgtttattttaatgggagaagttgaaagaatattttatatatatatatatatatatatactaattaaatttattttcaaataaaattaggaattatttcacaaatannnnnnnataataaaaaaaaaattataaaaat

SEQ ID NO: 77527 - DNA, 708 bp, Cannabis sativa
gattgccataaaagaaaaagattgaagaaacttactagaagtatctcaaactttttgccggaacttcccaccacaaatatatgctcaaccttggattcgtgtttcaacttaaggaaaacctgcagccaaatcaactcatcagccagctgcacagagtacaagaagttcatacaaggaaagatcggctgaatacaaacctgatgaggcttaaagacatgcccaagaggagtagttagttgaaaggacaagcgcagcttctgaaggtggttggctgatagtgagacgacattttccccagctaaatccagcctagatagttcgatgaagtagatcacaaaattagagttgtacactagagttgtttgagagacagtaataataaattgtaaggcaaataaatttttcacataaccgataaaacaagctccatggcaaataggcagcaacaaataaatgattggtattggtaatatatgtgtacaagtaagccaaattctacagcagaaaacaaatggaaaggtccaattttaaaaatactaactttttctgcgattccacactcccgaggtcactatcaagtactgtaatttcagcattatcgactttgataagtcctgtgacaaatactggtactttagtctggcctccagtagcataacctttttcaagctcagagtcatgaaggacaacctacaaaggaaccaattt

SEQ ID NO: 77528 - DNA, 1202 bp, Cannabis sativa
  modified_base (660)..(662): a, c, t, g, unknown or other
  modified_base (739)..(747): a, c, t, g, unknown or other
aaatcttagtagtgttagtcacttttgttttctccttttataaaagaggattgagaaagaacttctaataataataatagcccaatatgatgatataatatagatatgatgatttttatagccttgtcaagcaagccaataatccatattattattatgtgatcttgttattatttccttgtccatgaacaacactacaaaagccaattttctttgtaagtatgtttgaaaaaaagtaactattccctttgccaaaaaataaatatataatagcaataactacctcaatgtgcaatattccaattctttttaagctcaaccatttcgctttaaaggacctaaccaccaaccaaccactgtgaagacatatttaaatatggttttttatatatatatttttttcgaaaatcaacataatataatattcacatagcaaccagcgaaactatctaattaaatcacaatcgaaaaaaggttaaaaatagtaatttccctataaatattgaaaataattgtgagatatttaaattatacatgtgattatgtgaatttttttgtatatttatattctaattttctagtaacacttattacaggtgcttttaggttgcattgcaattttttttgggaattaccctatatattatttttttaattttnnntttcaaatttacagtttggatttctaaaatagttgcagcgctagttgcaatagggatttctgtacgattttttgttnnnnnnnnngttgcagcgctagttgcaatagaactttctatgtagaattttgtaaaaatacaaaaaaaaactattttaaagtgtaaaaatgaaaaaacttttttttttattagagaagcaaggaatataaaaaagaaatgaaaataaatctaatctatttcttttttttttaattgttctattttttacccaaagaaatttttaattgttcatttgccgattagaaattatatttaaataaataaataaatagatgatttgtagtactatattaaaagctaatattaatttagtaaagagctactattatgattcgttgtcctatcccttttctgattttgctgatcacgtgggcctaatatatcaattttttaaaaggaaatattcaggagggcaatatataacataggaaaatacagtcacgaaaaatatttttacatatatatattttttctaattatgtg

SEQ ID NO: 77529 - DNA, 1058 bp, Cannabis sativa
tccacaataataattctaacatttgttattattattattattgttattattattgtaatttgctagtttggaaaagaagaaggagcctctcagaatggatgggtacaaggatgaagaagaagaacgaatcaacgagatgacatagaataataaattttgtacttttgctaaaatgggtagtagaagtaatttgtttagttattgcttatttattattaaaattattttttaattttaaaattaaaattaattaattaataaagaatattataattttgtttcacatttgcatctatagttgttagttttttagacgaaacaggctaaattgtttacaagtgctattattcgggggtacttttgccaaacaaaataatttagggagcaagaatttacaagtattatagtttaggggttaaaaaagtttttgttctaaaataattagaataattaatatttttgtcctctaaacttttgataccatcagatcactcccgataaattatactatttgttaaaaatatttttcttattttaccagtaataattaacctttttactattttaattattaaaatcaaaattataatttttttccacgaaaataaaaaaaattaaaaattaaaaagtaaaaataaaattattaaaaaaactaacgattttttttaattattaaaaataaatttacttaaagaaacataaattataccttaaaaaacatattcaaattttatcttattcataaacacatatattaaataattaaacaaaagttattaaaatccaataaatttttttaaataaatttagattttgtgaagaaaaaaaaatcaagtttatttatatttacaaaattatatcttaaaaataaaaaataaataaaaatataaaattattttttaaaatgaaaaagaaaattaaaacataaaaaaataataaatttacttaatcaaaccttgatatctggagaaaaaaatagtttaaaacttattccagtaaaattgaatttttttttttttgagatgaaaatgccaattatattaaattaatcatccata

SEQ ID NO: 77530 - DNA, 504 bp, Cannabis sativa
tataaaatttataaaattctacagattcagaaagcttcgattatagttgatgcgtcaaaatatatttcggagttgaagcaaaaggtggcaatattgaaccaagaaattggctctaattcctcaatctcatcaattcatcaaaatcacttgcctgtggtaagtattaatgatttattttgtatatatttattattaagtaatattattgttaattaattaattattgttttatatatattttgatgatgatcaggaggttggagtggaaagcattgaaaagggttttgttataaatgtgttatcagagcagaattgccctggtttgcttgtctccatacttgaagcctttgaaaacttagggcttgatgttcttgatgctagggtttcttgtactcacaattttcaactccaagctattggaggagaagtaagtatataaatatatatatataaaaatgttttcaactcatttgtatttagttttaaaattaataaaaaaaaaaa

SEQ ID NO: 77531 - DNA, 961 bp, Cannabis sativa
aaaaaagttgaactacagatatataatatctttgatcgaggttatagttttcccagaacccctcgtttaaatagaatttttatgttttcccaatgacatgtgcatgaaaacattgatatatcagtggatgtttgtcgagttgatgataaagtactgcagagctcaaatattttcactaatttttcaactgttactccttttattttcttatttttagaggttagcagctggtgaatggttcactgctcgagtttctgcatgtgggctttttcatattgcatatcctagtgcgccagatgcactgaagacagaactgcgatcaatatacaaccaattgtgtcaagatgacatgccaatggtcaggaggtctgctgcctcgaatctggggaaatttgcagcaactgttgaacccgctcatttgaagctagaaatcatgtcaatatttgatgatcttacccaagatggtaattgagtgctgtttatatttacgttcaaataatttgtttgtatacattaattgtcatcattatttcttaaaagtttctgtagatcggaattttaagaattaaagtaagctttcatattataccacaatacattttgcaaggacttttgacattctcataattaattttatctcagatcaagattctgttcgattattggccgttgaggggtgtgcagctcttggaaaattgttggagccccaagattgtgttgcacatatcctccctgttattgttaacttctctcaggtacaccttacgcataattttgggctatgagagagcagtaaaagtatatggagattctaggaaaccatgtataagactataagttgcatacttctcagagatttcaattccattgatttttgaattgccatgtctgtatctgtacgtcatattttctactgatattctaatatgtatatgttaaatctaataatgtctttattatt

SEQ ID NO: 77532 - DNA, 1333 bp, Cannabis sativa
accgcctcggtcttcctccatgccgtcgcttccgccgccgtgtcccaagtcaccgccggcgtatccagatttgtatgggaagcgtcgggagacggctaaggttcagatgcttgagagggagattggttttcttcaggtgtgtttaaagttacatttcttttgtcttatttgaagtgtatagttttattttttttttttgaaatggggttgatttatttgttaatgcattttataataatgcaatggtttgtatttagctggagtttaagaagaagagaagaaaaaaaaatatgggaccgggtgaattttgaaatgattggctttcttatggcaattttgagattttctctcttttttatgactctcttttgtgatcaaacaactggggttataatggaaagtgtaaaggttaactttttttgttttttatctcctgatctgaggggatttctcatttgtttttgtgagaaggttcgttatgatctttttttagagcaccccatatcagattatagaactgataaagctaaactaagtgtagtgctatgaatctaaaagaggtttcatactgaaagacattattgtttccagtttgcatactaactataaagttttagtttttacagttattcaaaagcttaggtgtttagacagtatctggtctgtctgaatagtggaaaaattcagtttgttatacaaaagccctttgtggattatttaactagtttattattgtatttaaattgaataaactagttagtcaacttgtagtggagaactacttaatcaacttgtcttattccagtttctttattttctaatggggatttcattgataccttgtcttgaacaggaggaattaaaatccgcagagcgcattcaacctgcttccagatgctgcaaagagtatgatttgttgttaaatttccttgtaacaaaaagttttaatttttctttgaagtagaagatgattaaaattttcctactctagtaagattatttgaattgaatgtgcctattttacagggtggctgattttattgtggctaatccagatcctttaatgcctacgtaagaatactgatggcccatatttgctcaactcacatattagtttatgatcttgacgttttccctttcaaccaggaaccgaaggaaacgccgctcatgtcgttgctggaaatggctctggtatggctgacaatgacattattttcttcttatagttttgacaaattattagtcttaagactctgaaatttagtattgtagaagcagaatgcaacatagaaagttccattttttaacccgaagtattgctgtttatgcagta

SEQ ID NO: 77533 - DNA, 685 bp, Cannabis sativa
agggcataaaacccaacagtacgagcttgactaaagtgttgaatagcatagtccaatgttagtgcattgtaagcatgagctagtgtggcctgtctttgtggcagatggacaagttggtgggcagtcataaggtgaggatggcgtatgtggggacaaagtgtgtgtgtgtgtgtgtgtgtgttggcaatatagaatggattggaggtgatacaaactttagctctaagggtgtgatcatagcggagcatggggggaacagaagacgaatcacatttggccaaaaaatcagcacagtgattcataatatggcttagtcgtccgcaataatggcaaaaatcaggaaaaatttcatatagaaactcaagccaaataagggtagccatattggtgaagtggaaactggttccacgaggaaggggttgtgacatcgattcttattcacacctgaatataagggccccatgtttctttaagagaggcagtgtccacttcgataaagcgaccgagaatctcactaagctttcgtgctaaagcccatgaccgatgaagaaaagggtttttaaagacttggatccaaaagggtgttgagctgagcatctcgacagtgattgttgatccggttttaagggggtcataaccataagtttgtagtcgaaatgccaaggttggccaataagaacacgcc

SEQ ID NO: 77534 - DNA, 786 bp, Cannabis sativa
ttcatctctatttctatattaagtttatttatcctaattgtttattgttttcttttgtttctatgcagactacttgtacgagaaaggacgttacatatacaccggtatgattatatttttcaagcaaacgaaaacttttattgaagcaagttactcactataaaaaaatttacttttaatcataataaaacttgtaactaataataaattatcattcttatattttgattaaaaagtctctggctaaaagtattagtcaccaaaattataatttgttgtgactaaatgtgtttttagtcacaatatttgttatgactaaaactaaatagtgacaattgtatctcaatactatgttttagtcacaggtaattttttgttgtaactaaaaatcacatttagtcataaaaaatttatgttgtgataaaaagttgtcactaaagataatttttttttgtagagacttttcattccaataattttttttatatttagatcttttgaaatacttgacaagaaaatgctaattatattttttttcttttacttattttaataattttatcagtgggatttttcgcgccaagaacattgactggactattaattctaatttctataatggtgtatcaatggagaagacgacatttatcaatgtacaatgacatagaagatttcctccaaagtcataacaatctcatgcctatacgatattcttatcgagacattaggaagatcaccaaagagtttaaggagaaacttggtgaaggaggatttggctctgtatat

SEQ ID NO: 77535 - DNA, 3803 bp, Cannabis sativa
  modified_base (3656)..(3664): a, c, t, g, unknown or other
acttctgaacggtgtgaccaggacggccacacagctggcaaatcggtctacttccacgacctccacgatttgtgttctgtcctctaccgcctctgtaagatcctctgtatccacgaccgccacggcttccactattgatggataaatttgcaagattggcttgcacattgtgtagggctgatgctgagagttgttgcagacgaacttcatgactgtgaagcatgaattgaagttcttgaatggtgagaggttcagatcgtgaggtgagattaaccacaattgattcgtattctgaacctaggcctccaagaatgtataacgcaagatcctcatctgtgatagcttgatctgctgctgcaagactgtcagcataccctttcatcttgaggatatagtcatcgatggttgaagaacctttcttggtggattggagaagtccacgaatttgtagtagcctcgctctggatgtggtggcaaacagttgagcaaacaccgtccatatctccgacgatgtgcggcagttaatcacataaccaagcatgggttcagtaattgagttcatcatccaatgcatgagaaactgatctaatcgaagccattgatgatatgcttggttaggaagattacctgcagttaatcgagctggaggaggatttgttccgaggaggaatccatcaatcaagattgtatgctcgaacagacagctgcaagaaccagagtgcgccagaacgtgtagttggatcgatccagtcgaagattgagggggagtagattgttgttgggaaaggatgtaggagcttctgcttctgtaggtgtatcactttgaacagaggtttctgtgtctttggacgccatgaatacctaagcatctgataccatgttatggagagaatgaaggtgaaatgaaatgacaatggtgaaaatgaagctctgctctagaaagaggagccagctgatattatatagcagtaggtagttacaacagatttacataacagaattagtacagctgttcaagagagactaactaactacctaacctctactgactaactaacagaaaacagaaatacagttagtcattactatctctaacaaattaataattaatgtaccgattcccgagcacactattcattttgtgcaaatagtaaattatatctaagagagtaaagagaatttagaagtccgattagtcacactaactagtttccttttcttttgtaaatctaaaactaattaatgtttaaacgtatttcgattacttctggtcatatacattcggtttcctttattttcccacattacaaattgatcggatacgcttcaatcttttcacatataataatgtctaacacataatggcttccctaaaaaaatgtaatttaaataaaaccaacccagtactctgaacaaatatacatatgaagaaacatgatcaacaaaagaaagaattttccttaaatatttcatgtagaagagaagcgttcttttgtatctctatcagaggatgagtaaagaagttttgtattaaggccctgatgatggtggtgatacttgggagatacagcagccaatattacaatgccgcttagcagaaccaaggcaagtcccaagccattgacaacaatggactccatacatcgcttacacaagtttctcttcgtttgtaacaatgtcaccttctccaaaagccctgtttcggctgtcgccaccgccagcccatacgtgtacagaccaacaaacacgtcccacgccaataccttcctcctcactctccgcaccactcctctgtgccaaaagctcataaaacccatcatccactgcatatacatagaacataaacacacaaaataattataagggaaaatgttaagatatcatcaagtctaatctattttttatttaataactaatatatataatcgctaactacactaacttcactagtattagacactggtgtgtaatagcattataatatcaattctatgtataaaagcagcctatgttgaatttgtgttttaacaacttttttgcattgggctttgaaagcccatataactgcaagtatccattgagcctgcttatgtgacctacaactacaagtaaactaatcaaaattgatgaattattagggtgttgctgaaacgtgaagtatccagtttaatcaaaaaaactattgaaaaagacatcatctcttcactaaattaatatttgaatctaaaagagtaaatagtgtaggaggatgtgacaaaaggataagggaccacaattgcatttttctcgtaaagtatgctttcctaaatagtaatcataatttccacacaaaaccactgattaaaataatgccaccagtttctcgagaaacaaacaactttttagaaattggaattggaaatggaagtggaaaatgaaaatagagaacattaaggtgaagacttcagaacaatgtatagtctattatatatacctgaacaccaaacaaggacatgcaaagcaagcccatccaagaatggagactatagaaattgccaacaatccctctctccccatggaactttgtccaaattccaaagatcccagaagctaaagccactccttgaagacacaaatgcactgatttcttcaaactcgttgagccaggcaaccatctatggaccaatatagctgagaaagacaaaccaaaaatgaggaagaacaaaaaaaaaacacttgtttatttgaatcaatacaaattgggcatctgggtttattataatattattaccttctccactgatgagaatgaagccaattaccataaataaaggatgaagaacctggcaattattaaaaagagaaaaaagagtcactaaagaaaagaatgaggtggagagtaaaacaagagtagagtagtgggaaaatagatacagagtagacgaaatagtcgttggaggcagtagcagaatgtggaagaaagctggtgttgaaagctaaagcccaaaagaggaccaaccctgcaaccaaaaggccactgagtctggccaagaagagaagaggaagtagtgtggttgagcttccacttccacccatcaaaccttaatcttaaactattttgtctttctattctcctatgttcactttctctttcaccgacagtcgcttttttcttcagatctctactctactactatacacactggtactgttactcaagcatttgaatagtactgttgttatgaattaatcagacgatttagactgccacgtatactgacaatattatatattatatacattgtttaagctaaaactaaaagataccatctttttcttgttttttgaaaaataatatatgtagtggtttttggtcaataatgtcaacctcattctttaacttgagaaaataaataaacaaagaaaactgctagtatgctaaaccatggtgatgggtccacgagtaaaataagaaagcattttgtcaagttgtgttggaatatataatggacatccatttatgtgccaaagcgaaaatgaaagtactatttctgaatgaatatatggatattcactagtgaattggctaattatgtaattatatgcttcaataaagcttttcacaacgtcgttggcttgtcaagaacttttactccatattattattattattattnnnnnnnnnattattattattattataactatactaatgtatctattgcccaccggtcatcttaattgtgagtgattaaaactgctcaaattgacaggtaaattttagggttaagatgtaaaataagataaatttgaaaatttaattg

SEQ ID NO: 77536 - DNA, 1415 bp, Cannabis sativa
cgttttgaagtgtaaaattaatttatataagaaagtttcaaacttttatgccaataattcagaaatggaaccctagaaacaaaaaaagaaggcttgagaaacgagcgtggcgatctgatcaagttctccatctagtttctttcttttctctttttaaattcttatgttaatttctatttttagtttaaacatggatcgaatttaattgatcaagttatgaactaatttctaaatttaagaatatgatgactgttgattgattttattctaatttgttaatgtgatttactatttttttattttggatctttgtggtttattcatatttgtgttaatacaagttttagattgtccactttaacatggtttattcatatttatgaccctatgattctaattaaacaaacaaagattttgatgtgaaacgagagtattcacatagattatatgacccttagattatttcataatgcaaactatatgttattctttctcagagatgcaatagatgatatattgtttaggaccttaatgatctgagaagagttagggttatttatataatctgccatcacttaaagaaagaagattagtaaatagtattaacaattaggtaattaaaatgacgacattcatattcctaatctctcatccatatttaaacaacgttaatcgttttttctaattttctatcaatttttctttataagattattttggttaacacaaaaaaatataagtctaatttagtcatattcaatttcaatttcttatggttcgatctcacatgtgtgagcactgcttggcgcgccattgccaaggaattatgtaaattgatattacaataactagattaaattctactttggtttctttttttactccagcctatttttcttaaattcttcttatcttattttaggtacttttggtttatgcgatgctaagaaccaagcgcaagggtgcctattgatcataagattgagaagacctacagacgaaatagaaaaaacaagaggttagaaatagttgttgaaacgattgaacaataatggcaataataaaggtgttgtaaaagaccaggctaatggtcgcaatccacctgaccgttgcctgagggactatgtataagaccaatcttgtataagacattaacgggggtccaatcttgtataagaccacctgcctcccattaactttgatacaattcggccatacttcaaatggttcaatctacagtcaaatttgggggactgtcgtcagaagatcccaacatgcatttaactaacttcttggagctttgtcaaacattcaagatgaatgaagttaatgacgttgctatttacttgaggttgttcccattcttacttagtgaacgagcaaatacttgattattgtctctgccacttaactca

SEQ ID NO: 77537 - DNA, 1100 bp, Cannabis sativa
aatgatttgaaacaactatttctgccacacaacctttctttattatgatgaatcaagttcttagttgagtaattagagcgagaaacaacgtcgtaagagaaggatttagttgttgggttgtatttaattgatgcaaattcagaatgagaggagttatttttaagatgagccggtataatatttagcgataagggggagacgaagagccccattgtatgtatgtatgaatgaacaatgtaatattcatacaaatctatataacaattcaaagaagaatatagacttgacaaaaatacaagtttattatcattatttaaaatttaaaagacatttgtttattccatctcatgataccattattaggccggcaattggtcatgaatatgtttttctcatttttgtttctacctctttttttattattaaattattatttcacacctccaataatttccttattcattttcctgttaacaaaaataataaaagcttcatcacttcaagcttatttttctagaatagttgtctattattgattctcatgaagtccttagaaaaatgatactcattaagtaactaatcccacaaagtattttaactcttaatatgcacccaaaatctagttaacatagagtggacgttcatttcttgtatgtccgcctacgctaaacttcacttttagcttttacttagtacacattcttcaaataattcgaattgtcctcattatttgcattttagaagtaggaatatcaaaaagatccatttagttagatctggttggagctccaattcaacggatcatttctgattcgaaacattcgaatacttattaatttttggattagatctgctctatcctgcctaattttttttttttttgttggatcagatctgatccaattcggtttcaatatataaaaaaaattaattcaaaacccggacccgaacccaaattcggacctaaatccagacctagaacccaaacctggactcagacctaggaccttgatccagacctagaatccgaacccggagccaaacccgggtcccagacccgagactcgaaccaaacctagacctggacttgggacacagac

SEQ ID NO: 77538 - DNA, 999 bp, Cannabis sativa
  modified_base (927)..(960): a, c, t, g, unknown or other
gttaataattaaggaatggccagaagatggaaactggacagcagtagaaatgaagaagacggtgttttgggttcaggccacggggcttccaacgccttacctgaatcgatcgaatattcgaaccatagctgctaaagtaggtttattcaaaaacagtgatacatgggatcaacgaactatcaccaggcgaggatttttcaaattccaagtagaaatcgatacggatcatcaactgatccctggtttttatttggacatcatgagaggaaggaaggaatggattcaattccgttacttcaagttgccaaaattttgttacaattgtggtagagtgggtcatgataagaatggttgttggcgaccgacggtgtatgcgtatccactggaaggtaaagctgtactggtgttcggaccgtggacgaaagctgaaactgctgtaatcagctgttttaataccagaaatcaactggatggatttaaaaatgaagccggagtgagcttcctgcctcctaaaaaaccctccggcaagcggccgaccatgatggacaaaggcaagaggcctatggaaagtgacaacactagtttcgggaaaggtgctcatcctattggaggcttaagaagtaaggtaatcagaatccaggagaaatcgccaggtgctgggaaaggaaaaaatttgaaagtggttggtgctactgataaaaacccgaaggttaataccttctctgaaatggctcacaatacctgccagaaggggttacatagggtaaggcgtgcgagatcagtctctcccagcctctgcaggagtcacgaagaaggaaagaggaagcccttgactgatgaagaaattttgaaaaggtattcttcaagacctattccaacggctagtgacaacagggttttggccactatctgttgggttttatgccnnnnnnnnnnnnnnnnnnnnnnnnnnnnnnnnnncttattaatatagatcagaaatagatcggaagagcgtcg

SEQ ID NO: 77539 - DNA, 589 bp, Cannabis sativa
atgatttggaaaatataatcatggattgtgattggtaatggaagaatatctcaacttcaatcatatcaacctaacctttgccacgtctttataatcataatgtctcaactcaatagcacaaaccagtacttttaagttttatctaatatatactcttgtttaaccaccaaaacgacaactaagattccacaatcaaagacatataattattaagcatattcctcttggggtctatatgtaataatgatacatatatttaattaacataaataaattaagaacgtacgacatatgcttaacctttcttgatatttataaggggaattattatatattgttttttattttattttattttttttaaatttaccgtttgagtttctaaagtggctatagcgctagttacaatatatgtttttatgcgattttttattgcgatttaagttacaacgctagttgcaataggaatttatatacagaattacgtaaaaatgcaaaaaaaaaaaaaatgtttaaaaatgttaaaaaaaaaaaaaacccttttaaaaataaaaaaaaaaaaacttaaaaaaaaaagaacaaatttttt

SEQ ID NO: 77540 - DNA, 4006 bp, Cannabis sativa
ttaatttgtattcaacccatgggttgctctcgtggtaaggaaggggtgttggaaagtgctgataggcattgttccaaggttctaaaccccctagactcaaaaacttggggccactgggaggtctcccagttgaaatgtcctaaaactaaaataaatagatatataaattataatcgtagcttattttaccttaacccaaaccagatactgataatccaatttgcttttctttgttaggaacttgtatctgaaaatgcagaagaagaaaataatccgggtttttcgactttaaattccacaacattcattgtatggtacagggtactggtaagctgtattagtttttcttttcttatattttgtggtacagtttcttctttggcatatttactgaatgtagttctatttgcagcacgaaaggaatatgactgttcttaacagattggtgagttgaggatttttcattgatccaaatatttcataagtgctaatggatgtgtacttattccgtgaacatttaactggtgctatattgtttttccccttaggttaaggaagtcattttccttgctaaatctagagcttctgctcaacatgaaaccatcatagaactattggccaacctacaacattctgtaaatgtggtggtatcgttagtttccctttgcaggacgtctaacaaggttattaaaaagattctcaagttccttgtgcaacatgttttgttttcatttttatatatatttatttatataatcctgtgtgggttattttgtttttaatttttatatatacaactaggctgttttttctttatggtgaaatgcttataaggctagttaatgtttatgtcccatcatgatggaacagatgactgtgcacgctatggctgttaaatatggtgggaaatttgttgattccttcttgaaaggttgccacttgaactttgaccttgtggtatgcaacaagatactattgccaattttctcgcgtcttatagtggatttttttcccatccagtttttgatttcttgcgagctcaatttgaaggtcataaggagtgcataatccaaatggtaagatatgacacatcatgtaaaatttatatgtttttaagctgatatctgtaatgaatcaggtgaaagagcttcagaaggccacaagaactatacagaccctttgttcagaggcaaaagttagtgttttcatccctttgtcttttggcactgatttacgatttcattcttgatgatctaatctatttgtgatagggtttgaaacaaactgtcataacgagcaaaattccagcaacgaaaaggtctatggaacgctatttgttccatgtcaaggctcttctatatacaacacccagtgggtgcaaattttggatgggtaggtcttttttcatttgcatttctgaatgtgcatgtagatgaagctctcccttaatatttctggatgatcttgatttatcgattcggagttttctggttgctggaaattggtcccaacagttcatgtcacctcaatcctaatctttttaagaaattttaaaatggaatccattggttagaaaagatgcttttttgattatataacataatgatttcaaaatgatgtaaacaatatatgttctcgaaataattctttttcctttccatattaaatataagtttaattagtaaaaatttaaacaaattttaaatgtaatccattctaattatggtaaggtaattttagatatgaactatataaattattatttctttttcttttggaattgtttatagatcaataataataataataaaaacattatggtcaaactgcattaactagtttggctgcttcaacctctctaaaagcaatataagtatatcgtaaagtttatgggagcattaggaaatttctatggctgtcacagaaggtcattaaagaactttaatgccatcttgattattgtgttttgctaatttttttattgatgtttgggcttttgtcatttttctaagttgtgttaacattcatgttgctaattttgacaggaaacctaaaacataaagacttaacgggacagatagtgagttcacaagcatatgtggatgatccaggtgacagtgacacattagatccaacagaagctgttaaccaaaatacacctatcagtgctgctagtgaagatgaagccgaaactgaacgataactggtggtccacatcacaacataagagagattgaacgaagaaagctacaatgatctagtgagtcctcaaatttttcaagttcaatgctcatgacgttttgcgctgtcaatgaataaaattgctgatggacagagttgcaacttgcaatgcttcatgggaaaaaggggctattgatcatggaatttctaaaccttaaactcaaaatgatttcttaaataacaataaaaatatatattgattatgaaatgtatacagagataaaactatattacacctttcaaccttccacaaccaccaattttattaaattataatttataacaaatacaatgctcatatatccttttttttttcaacccttatgcaggaacactataaattttctaggatactgattacagaagctaccacacaccccgagctattgaggtgggaaggaagaaatgatagaaacccctaataaatgaaaacaatgacgttgcaaattaaacacatgcaataggaagaaacggccagatccttcccaaccttggaccctacaggggaaaaaaaaataaaatgactggttttcatttggtctcagtacttgttattgaagagcgctttctgaccactacaactttgcttattgttcgtatccttaaccagtttgcggtttttatgttgttatgtatatagagtgactagaaatggacattcaaggcttgatttgatagcccagtatgtttatatatataaaatatatttatatatataaatttatatgtattcaaacacggtacatactcaaatcttggtggaatggttgaagaacttgttaaccttttgggttaaagagcgtacggcagatcatatcatgatgttacctgcaattgaaaaaaattgttgtatcaacgcatcttcataaaagcgttaggatattaattctaaaaaaaataaaatactacaataatgtcttaaaaagtatattaaatttagtagtactaaaaattgtaaaaattttaacatatacaatttttttttatttactataatataaataattcattatttattataaaatttcacattttttatttataatattattataatttttgcaacacttttttttacatatatttcataatttattataaggctattaataaaattattattttttttttacattatttgtatcttgcaccttggtcaaagggcaaactcatgttggtttaatagaaatttaatctgagaggtaattatgtttggtattacctgcgggatgtggctgataattatcacttattacggaaacggagtcctgacgaatagagtcatcgtgaacctaaactcatatgaaattcatctattaattacttgctcgatcgattgagctcatttagaaagcagacatatatatatatatatattacaataataataaattaatatacctgattttgtgttctatccgagatcttaacaacagtgtaggtggctgccccagctaaagcccctagtggtggagccaccaagtatatccacaaccctttaaaattcccagctgcaattgctggacccaggctccgtacaggattcattgacccacctgttgatttcctgccacgccaactcagatttaaatatctagttgtatatatcagtacttataatttataactcttatctgatcgaataagccatgcatgcatatagataattatatggtgattcgaaggtacaaaccctgatatgagaacattgaggataacggtagctccaactgctattcccgccaattctcctgcctgccatata

SEQ ID NO: 77541 - DNA, 569 bp, Cannabis sativa
aaatatctatataattttattttaaatatatataataatattataaaattaataaagaatagtctgttaagtaataagatattctgttaaaattaacataaaaaccaaaaaaatattgtcaaactaaaaattctcttgaataaatatagaataaagtctaattagaatttttgtccctgaactttgacatgtaccaaatcatgcccctgaacttttaaagttgttaaaaatatcccatgaactattgagattgttggatttaaggattttttttcaattttagtaaaaaaatctaacatggatgaaagttcaggcggcatgatttagtacatgtctaagttcgaggggtatggtttactacataaacaattattgaaatagtaaaattgaatgaaattagataaaaaattcttaaatccaacaatttcaatagtttagggagtatttttaacgactttaaaaattcagagacataatttggtacatgtcaaaattcaggataaaaattctaattagactagaataaatattaattaaaaaaactaattctctccaaaaaaaaaaaaaaa

SEQ ID NO: 77542 - DNA, 501 bp, Cannabis sativa
cccccaaaacttattctctatctttatgtaattccttatagttttagtgttgttcttactcgaattcggccatcttcaccttccaaaaaatcatatttggttggaatatcagaataaaaaatcaagcaattttatcttttcaattagatggatgaacataaaacatgtaaaaccaataaattaactttgaaatttatatatggcttattacagcatcaaatgtgcagaaatgatatttgaaactatatatgatccaatctgtaccaatcaaaactcttattactgctgtctcattcagattcctcctactttactatttcaaaacttgactaaataaattattgataaagtacttcaaattattacatttgaatataaacgattcccttaagttagcctcaatttatgtttagttgagtaattgactaatttgtaattcttaacaatgaaattattcattaattcatcaatatggaaaaactgacaataaaaaataaaata

SEQ ID NO: 77543 - DNA, 1563 bp, Cannabis sativa
agaccaacagacccccctttccctctctcttcctcttcaattaccactagactcctccctctccctctctctttccctttgattcaccacctcacctacaatttttgtcaatacagtcaccccctgccaaatgacggacaccagtcgccaccccctccatctccttctcagctcctccttccctaacaacagccatcaatcttcaatcatgttttttttttataaaaaaactcttacagatagagcgagagaggtcgatagataaataaaagaataaaatagataaatagaagaagagaaagagagaagtagagggtttagggttacggttgtaaatggactgggccttttttaatatttattttttagaaaaaaaacttgtgaacccgccctacccgcaacccaaaaactcgcccaacctggtcatttcacgggcgtgtacgagtgttatttttaaagtccaaaactcgtgaactcaaaatatgtacacctgaaactcgatcaagttgctcgatgttcagccctagctagacccattatctaattgtaggtgctcgaccatagggatttgatcataggcgctcgactatggctaagctatggtcgaacaccgtacttcggggtcgtctccaagacgtccttggatggtgtacttctaaagcttccctatggatatcttggataaaaatcccaagtacagctacttattttttagggataacatgtttaaattttttttatacgatgttatgtattatagttattagtaggcatctcactcaccttttttaattctttataatcacgatgcaaaaaatagagttcaaaaattaaaataattgattatacgcgtgtaaaaaacaaaaaagaaacacaagtgtagtcatatatttaaattttatttttgcatctaatttttaaatagatagtgtttatgagattttagaaactaaattaaagaagagcttaagaaattaaatggttgtcaaaataaaatattagggtttatgccatgaaaattctgtaaagacatttctaagtatgaataagaattgaacattctgatatatgcatgattgttaagttattaatatttaatattaaataatttatatataaatatataaaaaaaaatccttattcatacatgagattgcgacttgtattgtacagaggattaagatcgcttagctatatgaataaaattgtaagcaacatactaagtttaggaatctttaatcaatggttactagtgaggttcactgatgcccattattcggtgtaagtaatctcaattcggattactaatgtagcatggcatctaagtgaaggtgttatatataatagatattatatatgacaatgactgatatgtaattaagttgtccttatcaaacatgttatttactataaagacctaatttatattatagtgatgatcaatggtagatcggcataaatcttgggtaattataaaatcttgttcatgttattagtttctttgattgactctttaaatagaaattatatatgacaagaaacgatatgtaattaagttgtctt

SEQ ID NO: 77544 - DNA, 641 bp, Cannabis sativa
aaacttttactcatttaagaacatgtattggtctctgtactatctaaactgttcttagtgtcatctgatcaatatattttgcctatgagtattcttgagtttcacagtctcttgagcaatgagttgatctgtctatccccatatactttatgctacttcacatgatactaagcttgaatcttccccagataaaaaggctacctcttccagatgcaatgggaagagctctcttaaaccttttactaataagtagtatgctccttctctattagttcttggtgatcaaagaggacggctacatctctggaagagagtgacagccatgtctgggtactacagaaagagccagagtgttatatataaaaaaaggctttatattaaaaaaaacaaaaaaaaatcgttcttttctcatatcagtttttgcttagttgagagagtggtccagctgatcttcactcttcttggaccacatgagatcactgctcacacacgtatggagattcaagttttagtgctctcatgcgtatcattgtggttgggtgtggggtaatgatctgttgctcaaggtgtgcaattttttttactcagaagctatattcattaatcagttgataccgttttttttctaaaatttgagtatc

SEQ ID NO: 77545 - DNA, 639 bp, Cannabis sativa
tttgattttagtgatcgactcttttattttctacgtgtttcatctattatatttcttgaattttaattatacacaacccaacaaaactattaaaaggaactaaatcggaattgcatgatctgaagcgagaagaacaagtggtagaagaagaaggaaaatagatcatgcaaacagagaaaatgaaacatgcaattctgattcaactacttccaatagttttgttgatttgtgtataattaaaatccaaggaatataatagacgaaacatggagaaaatgagagagtctatcaaaatgtataatgtaaaaagagagatagtactgagatttctacctactccttcttctccttaatgtcttgttcttttcgcttcatcttcttatctaatctaatttttctataacaaagaaaaacacttctaagttttaatttaaagagcttatatagtgcagcggaaggagcattgtggataattattttttagaagaaaaaaaaagataatatgtaatgggattttgatgtagtttttcttctctttttttgagaaaatacttgatggactactaacctctactaccaggatcttttttcttcttctttctttttgttgttctttttctttctgtaaaacatggcttc

SEQ ID NO: 77546 - DNA, 990 bp, Cannabis sativa
accaaacgccacctaaatatatatttttttgaacaatctttaatttaaagggacctttactcaatatccttagccgcactatatatacctcttacaaccaaacttatgcttctaggagtagagcatgtcatttcaaagatacatctatttctattctttcaaattttgtaaaaagttgctaccataacagcgtttattatcctgatttcgagctcacctttccaatcacagcaccagctagtcatctcggccaaagagccaggccaacaaaaagaccccaaccacttattaatttcatctccaattcttacttagtaaaagtgcagctgcataacaaatggtcatgagtttcaacctcttgatcacaaatcgtgcaaagctccatctgtatttttatgattctgctcaagtagtctctagtgaggagatgtttatttataacctgccaaaaaataaacatgtgtttcggcacaatcaaattgtcccaaacagcacttgcataaattcactttcagctcatccacaagcaagttataatagttttttgcacgatattttcctcctgttacagcaagattcagcttagtttcgtctgttatattattgtatataataaaattaaattaatgacaatttttttcatatatcttttaataaaaattagttaatcattaaattttgtattaagatttataattatgccttaaagtacaatacttatttatttttatttttttttattatgaacacaatactaaaaattaaaataaatatattaaattgtgttttttgtcccaaatataatataatttttatatttctagtaaatgatatcttaagttgattatattctttttaataataataataataataataataataatgttgaaatcaataatgtagaaaaatttgacattttaaatgggtagcaaaatttaagtagtggagacatgaaggaaattgaaaataagtgattattattttttt

SEQ ID NO: 77547 - DNA, 671 bp, Cannabis sativa
gactgaagttgatttattttgctttcctcaaaatcatacctgtgcacatatttagaaatagcattggtgcaagcaaggcctattgtagcaggtttatgtttttcactttctatgtcactttttacttatagccatgtttatcaatccaacatcttaattttcatgctctgaagttttcttacagtatttggtctgctgattaacatttagaccttaattaaaatcatgtatatcttgtatttttgaagctatcaattttcatgtactttgctttgaccgttctccaataaaactggatttaggaggcgtttctaaatatgattctgctatcttatttattttcccccgtcctgactatcattggtacagcttctatttagtataaatactaagcatgtagaaaaaacactttgatgatgtaataatcttcagctacttgagtgttgctaatcttgtgctttaatgcccatctttattggaatggacagatggcagaggacatgcgagaaagatgggaaacaagtgataaccctattgttcataaaattcaagagtaatctgctcaaacttgcattcttttgcctataaatttcatcaacactgcactttacaccaaagcgatattctgtttagttccttatatattttattctcttctacagcatcaatga

SEQ ID NO: 77548 - DNA, 1309 bp, Cannabis sativa
tcaattctcgacaatattaattgtattacaatataacatgctatgtagtacaatatacttttcttatctttaatccagattcatgaatgttgaccaacccaagtggagaaatatccccaataatctcggccttatgccatatcaacgataaaccaataagtgtttatcccaaaatactgcttaacactcgcgtaagacaatctaagattttctaccaaatctcgcggtataaatacactaaaataaaaattatattttggttctaaaacatacactatattatagagctattggtgaaagattgtgtagatttgctagttggagcttgtgtactttggtaaagctctcttttccactttgataatattaaattctgatatttgaaatgttctttgaaatggtgtttgatgttgttcatgatgattttgaggtattgatgtatgttgttgagaatttgatatttatggtgtgtttagtgtatttctcttttttgagatcatgcttagtgcctctagcatggtttagtgagattttagggttggaattagagcttaatttatgggttaatgttctgaaattttgggttcttaattgggggttttgatgcttgagttttcaagctttgatttatagtgtaattttggtatggatgctttagacttgtaatttcttgttcttaacttgataatgagctttgtgtggcctagaaattattgttattttagttatgagttgttctagttttgaattgagagtatgcatgctttgttgtggtttggtatgatttttgggtgcaaattcgagtaggttgaaaatttgtttttctgggttcttaacccaggagccacggcatgggttttgagtgccgcgacccgcctggtgaaatttctgggttttttacctagattcctcgacatggcttgtgagtaccgcggcccgctaggggtttctctgggtagattgtgcttaactcattttgtttataactcttgaatccgaactctatttgggatgtttcgtatatcgttggaaagctcgtttcgagctctttatgcttatttgtaattgaaatgctaattatgtgattacgtgaaagcgatttttggaattaaccctatatgaaaaatctcgagaattgtgactaggattactagcacttgtttaggagcacccagggaattggaatcttcacatacttacgacaccaggtaagacagtagttagcacgtagaattaagcgcggtggtgctcatgtttgatattataattgtgattaaatgagaaactgggaatagggttattaccctaa

SEQ ID NO: 77549 - DNA, 1130 bp, Cannabis sativa
agttgttaggatggctaaaaaaactagaagcagttaaacaaaatttggcagaacaagaagagttttctcgactgatgttggagaaatttgtgatgttggaagagatatttggaggagaaaaccagaatcacgacaaaaatatacctaatgatactaatcctcaggggaacacttctaaaaaaacaaatcctaaagatcctgaccctcataatcctcctaaggatagagggaaggggagaataggataaacctccgaaaaagctgctcccaatgatcgacaaaagtgagtgaatcctgccaaacaacctcctaagaaaaagaaaggaaccaatactttaaggcaaggtcaccagactgattctagaggcagatctgcgcaaaaagaaaactctcatgtataagcatgaaagtcttccactaagaaagataaaaatgatcctgagaattccacgagccgaagtgatgatgttaatgaagttcatccggtatcagatgatagaagtgaagtctctcaataaatgattattgggcacaattgaatgccaaaaaggagaaggctagaaatgagaaagccagacctcgtagaatgacttgagaattcacatcaatgatcaaatctgaggaagagagtctcaatatgcaaccactcaacgtctagaacgtaagattaaggaataaactaggatcacggagcgcatctcccgaaagtaaaatggaactgttttgacttggaagacgaggacacataaccatgtgtgaagagaatcatagatgcacagttgtcggaacactttagaatgccacaaatggagttttatgaaggaagaatggaccccaaggaccatctatcaaaatatattagaatgatgcaagtggcaaaagcaagtaatgatgcaaagtgcctttgtttctctttaactttgtccaagtttgcagaagactaatgggaaagattatctcccgaatctgtttgtaaatggaaggatctacaggtaattcttaagaaacaattcatagcagcaaatgatttcaacttggacgttagttgtttgaaaaatatcaagcaaaaacctagaaaaagccttaagaagtacatgcaacgttagttgtttgtaaatggaaggatctac

SEQ ID NO: 77550 - DNA, 1046 bp, Cannabis sativa
gtgctgagtagatgacttggccttcttgttggtgaactgtactgcgacatggcgctgatatcgtccacgtagacatgccacgtcaggtgaacaaaaatcgagataacaacaacagttaagaggaagtggaagaccacctttgctgtcaagacaaccaaggggacgaagaaggcctcttccattatgaatggagactgcacttgcaatcattctaaggtgcactcgagactgggaaaacatcacccttatcttgggcatattaattcaagagttggtcacatcctcaattgaccaaagaacaaccagcgaatgctacaacacatcgttgacagtcgccaagaagaaattcgtcgctgtgaagccgaggagatgacgaagacctcttccgccgtaaagctgaggagaggataaaggtctcctccgctgcaaagccgaggggatgttgaaggcctcgttcgctggaaagtcgagaggatgttgaaggcctcccactctgtaaagttaaggagttgacggaggcctcctctgctatccaaccgagaaaatgaacaagaccaacttcactgaaacacaaccgagggaatgctaaagaacttcaacactacaacctaaaagaagataaaaactgcatctatattcacataaacatacagtgtgacaagagagtcaatgataagacaacaaccaaagatctattgtaaatgttgacgtttcaatgtcggcatgatttcacagtatctcaactcaaaggaaaccactcaaggagtcataaattttaagttgaaaaggagaagataaatgataagaaaaaatattcatcttttctcttctccttttatacttagaatttcgaattccactattcaacagtgaatgggaattcaaactcctactcttagtggaaatgcttgaagaacagaaacaattgtccaagattttcaaaattgatatccacctgataatttcgagaaaaacgggcttggttcacgtcaccaagtcaactccacacaagtgtaaagttgacttggagggcaaatattaaccca

SEQ ID NO: 77551 - DNA, 786 bp, Cannabis sativa
agaagacatatcaggcctatcaataggcatttgttgcacacacaaaaggccaatgtggatgcaacgcaacgcttcttccatgttttcattcgaatattttagtaagcacttctcaataagcttaaattctttgccttccctcatcaaattccatgcctaacaaaatatttaataaaacataaataaatataccaatttcgctattaatgtgtcattaattaagtacttttcatatgtaaaacttaccaatccaatgagattgagactactatattcatcataaaaggatctacttttctcccacttactatttctaaaatcaacgcgccaaaactaaatacatcagattttattgaaaatagaccatcaaaggcatattctggcgccatataaccactgcatttacataataaattttttttagattatgaatattaaagaaactaggtttgttttttaaagatgacttactaagttcctactactttgcgtgtctttccttctatttggtctccaccaaaagttctagccaagctaaagtctgcaattttgggattcatgtctttatcaagtacacattacttgctttgagatctcgatgtataattctcaatcttgaatcatgatgaagatagagaagccccttagcaattccacatacaatctagaagcacttaggccaatctaatagtattcttcgactttcatctgcaaatgttagtatttttctttaattcgaacaaaattggcaaattttacacaatagaacattacatgtgttaaaag

SEQ ID NO: 77552 - DNA, 817 bp, Cannabis sativa
aagtgcaaccactgtgacagaatcatcggttagagcacagctgttgaagaagatccagagaattataggggcttgctacccatgggttcacgctagtagcgaaggtgtgtaggcataaattttctgagaaattctgtttattttatttcagtcccagaagttattatgtttgcaaacagaaaaaatattacttaatttgtttggtagatctgaagttctttcggggatttgtgtagtaaccttagttaaaacaatcctttatgagctatatttttcttggcaggattgtcattttcatatcaattgttatatttgttggatgcaacgggattctattccttaggattgcatgcacttggtatccatgtgtgccgagctactggacaagagctggtaagatgctttcagtcttctctattcagttttctttgatttgaactaacacggtcatacagcaggggattttttcattcatttttattcttctgcaatttgaataatgctgaaaccaaccttttaatgtcaaggtagatggataccacatcaagaatttcaaagataagaagccgtgaacgtgagagacttcgtggccctccatggttgaaggtatattacttcagttggtaggattatacatatatattgcacagacttcttaaatatgcaaaacataatctgttgatacttggtatgccatgtcgtttaagttgccacttacagttctagtccgattagaaattgattattttttttttttgacatatttcactatacagacattgcaaggagtactgctcaactgtacatacacaatgct

SEQ ID NO: 77553 - DNA, 736 bp, Cannabis sativa
ttctccataataaatgagagcattaatttatttgagttttatgctccttctctatccaatcccgtttgtcttacttcgaaattttattgcttttggattcgttttctgcctttcattagttgagcctgtcatttctctttaagttctccaaatctttgcattaaaaaccatcccctcaccttctatttggctcttggaaatgtaggatggaggcggacgaaggatcttgtgaagcttattaggattttttcatcattggggctgctccggttaaatttagggttatgattaagggtttttcgagagtcttccctaggggttactagttttacctctataaagtaagatccatgtatatcagtcttttctcatctcctacttgttttactctttcatctcttttactgtctcccttgtttccctttatcatggatgaatttatgagtaatgtttcgagttctttggtcttgtcttcttatgaaaatactattttcacttatgatgctaatccctcaaatgattctccagcccctattagtttactgctcaaactacacactgtcaaaccctttaataggtcttctcttatgaaaaccctttcaggtatttggtcatcgcagtgtaggttccctatttgtgtctctaaacatgttgatggcatgttcatggtcacttttaggcgtgaaggggataagggtagaatcctagagggccagccttggcattttgcccaaag

SEQ ID NO: 77554 - DNA, 558 bp, Cannabis sativa
atcatagaagaatttctcatgtcaatatataactaaatattgttgacgctactgtctgataagcagccaacgaatgtatgaacataaataaaaaaaataacactacaattacagtaatccacttcccttatcacgaaagtaatggaactacgtctacttaaaacttctattatcacaaaaaatcaattttcttacaagagaacgcaggaaaaaataactcactctagcttcacttcacaatatatatagagagagaaactctgatattctagaaagtatgtatagtgtgaaaaataagctaggtgagctttctttttatagggaatgagatccaattaaattacaataaaataataaaaaaatcacacaaaattcgttgagatatcctgcactattttgcgagcaaattttgaggtttgaaactttaaaattgtgacaggggttgagacacacttagatgcgtcttgaaaagagcttaatttttcacttgaatagtcttatttggataaaaattaagacaattatgaatattttgcaaagcggtgtgcactattgaaa

SEQ ID NO: 77555 - DNA, 1828 bp, Cannabis sativa
aaaaaaaaaaaaaaaaaaacgttcccaataacactaagacataaattaaatagaatcgattccacgaataaaaataaataacacctaatttagaaaccaattataattttaaatctcatatttgagttgtcgacactcttcagtcgtgtgaccaatatccttgcgaaagtgaaattttttattatgatcccgtttattctttccattcctcataggttctggtttgcaaaatgcgatcatgttcttctcgtgtttcattcagctcgatatacacaatttaaatttggacatacttctcattttttttctgtttctttttgtctttggatgattccttggactcatctttccttttcccatgtggctcatggctcttgcttgtgtttgcaacatccaattctgcatttcttgagctgggtttattccccgagccatcttttaatacttttatttcagaccgagcttcttcttttctaacatatataagtgccttgtcgttaaattcatttattgatttgacttggtgcccttacaaaccaccccacaactcgcctcccatagtagacaagtgagtagttatccaagcctggagtattgttaactgaatactgtcattcaagttttttacctttgatactgtcatgctaaagcagctcagaaatgcctttaaggactccccaagttattgcttgatatttgtcaaggatgatgcctttggtcgtctgtcccttgtagcctggaattacttttttgaattctttagatagttgttccgaggaggtgatggaatgatttgtaaacttatcaaactaactactcgttgtccctgcagggatgtagggaacagtatgcaacataagttattagaaacattacttgctcacattatggtattaaagttattcaaatgtgcatccaagtatgtggttctgccgtattgcgtgacatgagggttcttaaatccttttggaaactgagagttcaaaatatcaagtgaaaggttttgggttgtcaactgaatcataccctggaagctttccttattctccatcctaatattttatgaactgatctccaactgaattatcctttgttgaattgagttatcggtaggttgattagtttgttcatttgcttgatgagtatttttatttaatctctctctaaggtctggtgtatttctatttatttgctcgtgtagattaggacgccttcaatttatatggtctcacaaatcaggttgatcacacatattttgtcgttgatcttgcctatcatcgtaattgctcactgatcaacttgtacttttggattggtaactttgaaaattactcatactttcttgctcactgcaatattcatatcgaggtgttctctccccccacgtgatgggttttcccgattagcctcaaattcttgtggtgaatctcggacaggtctttgcctttcaaataggttagcgaatcttcctctgttcaagtatgtgtagatattgtctctttcttccatcctatgtccttgtggtggacgtggaggacgaccagaccggttagacgattaattgtttgtatttttattatttctttgagatgtttgttgtccccttgctcgcgtttgccgtgagattgtggcaccctgattctggggacctcgtctatcaacatgaatgtcccttatttcccctggttgttgctcctaggggcagtgggattatttggctcgcctctctcaacagtatttaagaatagttggtcgtattctggagacgctagttaagatgtttgttctcgctatagcctttcacgacaactcttgaacttagtctttt

SEQ ID NO: 77556 - DNA, 1320 bp, Cannabis sativa
ttgtgattaaaagtaggattttttgtagtgttatgtaatataataatgtattttagtacataaaaaggataaatcatttatgatttgtttcgtaaaagttattgactcattcttttattttgttaattaatgataattcgagtactttgtatatatgttgcaaatggaatataaagcaagatctaattggtatctttattcttatttttttcacatttaatttttttatatgatgatagttattgtagtcattacagatttttataatttttttttaaaaaaaaaaaaaatgataaaaaaaaaatgatatgcttacgaagaaaataataaacatatattattgctccttatatttatacataaaaaataatttgtatactatatttagaagaagagtgttaatattacaacctcttagttaattatcgtatttgaaaatacatatcagaatattttttaaaaatttatttttataaccgtattcattataattacaatatcatctttgtagattttaaaattgttaatagtttatattactaaaaataaggttgatatttttttaacacacatagtaaactacactactatatataatattaggctttagatttgtggttgtttctgttaatatcataaaattatttggtcaagatctattttgtttttgttaatatcatttcagggtattatttttagatttattctcttcgccaaatatgactctctctctctctctaaccattctcggctatttgactaaaacaaaaaataaaaatataaaaaaatacctataatttcgattattagcaaataagtgaagctataagggtttttttgccttcagtttatgtcaaaccctttcgattcgcctcgaataatttcggttgcgagtttttatcaaaaccaaagctaaatgtccaaataaaaccgaaagtaaaaggtttttttcgtaatagtgttacaatattaagaactctatcatcgatactgtaagttatttagaatttttaaaaatttgaatggaccttattttaacaaatatctccataagacgaataaaatatttagatatgtatttcgaattgacactaaataatttaaatatgaaattaatagtaataacactccttgaaaaaaaaaagataataattaattagattttttgctatctagaataattaatgttatccagaagaagataacactgacaatataataaaaagaggaagtgaagtctaaaaaataaagagaaatgctaaagagtatcagtggtgtttagcatcttcttatgtgttaatattactattggtccaacta

SEQ ID NO: 77557 - DNA, 1547 bp, Cannabis sativa
ttttttgcaattcagcccctgtttttttttttaggaaaaaaaatctttttttttttttttttttttttctgaaaatcctaactcttcatactcagggaccctcgatacttaaggataaggatcttgtgatttcttcgacttgagccacttctcaaccttcgtcgtggaagggtgagagttcaagtaagtcttgagatttctccgtcctctggtgttttttttattgtatctaggtttgaaatttatttcagcaccaaccatgcatacattaaatataggatcttgttagaatttgagatgaggtgaatgagattttatctcaaaactaattggcaatgggaggagtagagtgactctttttgctctactttttggatcttttttactttaaaagattttttttttttcctcttataccacattagaatttgggataaattaaatgagtttctatctcaaaactaattgagaataagaggaatagttaattcatcttatatattttataatcacattaacgatgaatgactagattatctaacagatcttgtacaattaaacttttatttagatgttttgacaagtgatgctattagtaccgacaaaatagtttataagaagaaaatataatgaagtagcatgaaaaatgcaaatttcatgctaactttcataagaaccacaaccattttaacatccattaatgaataacaaagcaatcatttttaaatcttgactccattttcatggcctatttgctcggtcctactttcttgtaccatacaaaatacaaatgcaatggaactaatacttttaatttatttaaatttagattagatcaaagttattacagagagaaagaaagacattagttagtagttacaaagtattaaaattagagctaatactaaatagcaggacttgaagtaactaaacttaagccaagagccaaaaatccttctgccatctggtactgattaggtaaccactcactcctctgctctgctttctcactcctatagtcatgcaatctgcgccgttgatacactgctccacaaactcctcagtcctgctgttcatcccacataagctgcataaaaaaaaacaaaaacaaaattaattatctttaaagacccaaaaaaataaaaggtttttattttttattttttattgttttttgtttattggaacttggggagtaataggacccaccagctgaaaaatggagaggttttcttctgacccaaaactagcacagaaacctctagcttcttcacctggttcattactgtagccagctttggtccttgaatcaccaaagcttccacttcaacctgaatgaagtagccagttaaacgtagcactttctagcctaatcaggactagtaattgattagactagactaactcaactcaattcaagggacaacacacagcatcttctattcctgttcccccattaccatttttcttttacttttatctgaaaataacaaaaatggtgtgcactgaaaagttatatggaccgactgaaaaaggaaaaggaaaag

SEQ ID NO: 77558 - DNA, 835 bp, Cannabis sativa
  modified_base (31)..(33): a, c, t, g, unknown or other
aaaattccgtgaaaccgtatttttattattnnngtgtatttgtgaaattatccctagttagaaagtgtgcaatcttctctataataatactaaatgaatgaatgaaaatttacaaagtacatatttgaaaaaaaattaatttataaattacattaattaattaatgacaaaataataataataataaggcgacatttaattgtgttaaaattttgtactatatttaatatattatttttttattttttttttcaaatttatagtttgagttgtttcggtgatttctatgtgggttgctacttgctatacagattttggttgcgatttaagttgatcaattactcgctatagaaatttctgtctggaattccataaaaatgaaaaaaaaaattattttaaaatgtaaaagtaaaaaatacatttttttaacatatattatatttaacacaccttttatatcaccctcgaaacattattttgtcaaaatatagtaaaaatatgatagcactatatttttatgttactccattaaatatggtctaagttgatcttgaagttttttatttttattttcttttaatagatttaattacacaaaaatatttatctaattattaaaagggaaattatttttatattttattttttaaaatttacggtttagattgttccgatgttttctacatagattgttatatagattttggttacaatttaagttgttccgtgaatttttataaaaatatttgttagaatttggaataaggtgaatgaggtttcatcttaaaactaattggcaataaatgggaggagtagtccgttcctcttatatatt

SEQ ID NO: 77559 - DNA, 1045 bp, Cannabis sativa
  modified_base (1003)..(1013): a, c, t, g, unknown or other
agtatttttgtaaatttctcttttcttttcctataatacaagtgagaccgaccatggtattaagacgggataagctaaaaaatatttattttttgtattaattaattaaaaatattttaatattatattttattaaaaagtatttatttttgtaagtgggttgtctaatatacttttactttccacttaacttagtacataatttatattaacttaaaagtataataagaatattatttataaaagtgactatatcttaaagaatatagaaataaaagtaaaaattaaaataaataaaataaaataagtatacaattgtaatttcctaaactcatcaattggaaattgcaagactcattaatataaaatttgaaactagctaattgattctatttcatcaacacttccgagaattgggtggaatctgttatagtttatatcaattgcttattggaaataattctctttgagcaatttttccttagcacgtaatacactataaatagtgtacaaagaaggggatcctcttctagtataatttcgttagtaaagtttaatcttatatattctttctcgcattttttctttaaaacttgtcagaatgaattttgtattaggcatttattttggtgagtttagagatgagactatatgttgagtgatccaattgtattttgattctccattgaatccaacacttttatatttgagttctatatttttcttctatcatttctttatcttattgcaatttttttatatgtgttaattttatatagatttaatcaagcttttttttttatgcaattgtgcaatataatatattagtttatagggattttttaattttaacccaaaaaaaagtaacaatattataaaaatacttccagctcgccaaataaacaaatatacatcccaactaaaaacaattacacaaataccacttacacacacctttagcctaggatctatgcttcttgggcaactatcacgcaactatcgnnnnnnnnnnnagcaacccaacgcaaccgaaacgaaaattcaa

SEQ ID NO: 77560 - DNA, 564 bp, Cannabis sativa
atgcttattccatacttaaaagtcaaaagtcatcacatatatactaactatacccaaatccgccatgcaacttatgtagacatatacgcataaataaagctgcactgatatgtgtcacgtgctggctatttggacagtaagtaaacgggacatgtgacaactgcttttagtgacaactttttaatcacaacataaattttttgtgattttagtcacaacaaaaaattacttgtgatgactaaagcatagcatttagatacaagttgtcactacttttaagtttagtcataacaagtactgtgactaaaaaacacatttaagcacaacaaattataatttttgtggctgatacttttagccacggacctaaacgcgcttgcatacaaacaaactaattaacgcgcttacatacaaacaaactcaatggacgttaaacatgatacaagtctatacatgttgagtgcaaccacgaagtataagcaagcacaacataagtcattccaatggtcagtctcacacaactaacaagcaaacacataagcaaatggctctcaatggcccaac

SEQ ID NO: 77561 - DNA, 552 bp, Cannabis sativa
acgtcattatctctaaattccatataatgtaaatacccaaacataagaaaggctacaatataatgtctcctttcaatagaatttctgattccatacttacaaaaacgatgtctatacactattatgacatagtaagtaagagacgtgaaaggcctattacgtcgcttttttgtcttattttatttttgaagagaaaaatactaaatttgttcattcaaacgtcataaggtgacaaacgtcataaggtgacgatttgttcatgtagaagtaacattagaagtttctttagaagataaataaataattttgttttattttacatactaaacttgtagaagtaatttgttcatgtagaagtaacgttaaaagtttcatgtggaagtaataattattttacataataaataatttgtttattcaaacacgtcatattttaaaggtaacgttttgttcatgtaaaagtaacgttaaaagattttttagaagataaataaataattttattttacacatactacttacaacattacgatatgtcatcaatcttaatca

SEQ ID NO: 77562 - DNA, 1022 bp, Cannabis sativa
ggtttttactaaaaaaccgcctctaaatgtcaatttcgaatcaggtgggtgttttcacaccctttagcttccctttttataaaataggttaaaaaaaaggaagctaaaggcccgtattgtagtagtgtagtcaaataaagtgcttgtatatagtgttaaaggattgtaatatatatgttcttgttattttgcttaacatattttataatatacttaatattataagttttgaattgaattaattaggaaggaataattttacaaagtgaacggaaaattgcttagtagttcattattagaggcatgtacaattagtgatttctttgttaagtgatataataatgctaattttagaagaattaaaatttttaaaatattcatccataatgaagaaagttttaagattaattttgtgttgtagtgataacagaaggtcaaaatttatgtgttttagtgaagttctgagaaatttgtgtgctgcggagacataaagaagaaacttatcatttattgtttttatgtgttaatataataggtacttattaaattgggaaatgttataaaaacacaagaaactttacacaattttcaattatgtttattgtgtttattatttattgatataagtacttatgaaatcagaaaaatgttataaaaacagaagaataccacatatatatgtcgaaagatccaagagattatcttgagaaaaatgtaagtactattgtatttttataatataatttaaattttgaatcgtaaagaaattagtatagtttttgacattgactttttatattgtagtggtatgatcaaaacagaaaacatacaaaatagatgagtttaacgaagtgcgtgaaaaatgggtctcctacttatataagtatatgtcatgatctagattaaagtttattaactataagactaattatacttattgtcaaacttttaaactaattacaatatgtattgtggtataaaattttgttatagagagatatattacatatctatttaatgta

SEQ ID NO: 77563 - DNA, 943 bp, Cannabis sativa
  modified_base (903)..(904): a, c, t, g, unknown or other
ctaaaaaacaccagtagaacaccaatgaaacttaacacagtatactgcagtatgaaacttataaacaaatacagtaaaaaagtaaaaaaatctacctaacagtaaatttgtaaaaaaaaataaaaaaagttagtataccatataaattccccacatataatgatccttcccaaaaatacttctaattttgttcctaatattctttcataccattataatattcttttatataaattatagttacttacaatattagaaattcatcaattaaacttgacaaaagaatcatcaattaaaaaaatataaagtcattataatttttgttataataatgaaaaaatattttttgaacaaaattaaactcaaaactaaatatttttattcttatctattttacaaaatatatagtctaaattgttatttaataaataaatgtaattaaaaaaaaaaacatacaaaccaaattattgtcccaactttttatattaataatattagctacaattaattggatgtattacttaattacaaaattatgatttttttaatggaaatgacaattttataattaatctcttctactatatatgtaagattaaggcaacaaattagttgaaacagattctaaactgttgtgatgatcataatacaaaatagagattgcagtaaaattatgagctattatattaaatgaccatttaataaataaagcatacatattctagcaatatagtctgataattacaaacaagatgtcctggattcaatttatcgtcacacctaatgtataaatataaaaaataaaaaaactgatttctagttttaattaataagaaacatgtattctcgtatatatataaactagatagatgttacgtgtcaagtcacgtatgttaattttannttagtttttaattttttttaatattataattttaaaatt

SEQ ID NO: 77564 - DNA, 616 bp, Cannabis sativa
aagctcttgcgtttggtttataacctaactcatcatgaccagtactactcctagttaacataacatatctaactaaaccaagctaataaaccctacctcacaaatagctaactcgagttaggtcacagctagctcccaaaaaggttttttttttttcctttttgataatattatatataataaaacaaatagttctctggtggtccctttttgtaggtggagatgtagtatacatattaatacaaaaaagatctaatacaactaacattattatacaaaaaattcaacagcaacaaacactatatattattaggtggggtgattgatttaaatatgctatcatcatgttttgaatacaactaacattctctcaccaccaggcgcggagcccgaactgtaaagagttgggggccaatattagacaatacaatatacaataaatttaaatttcagtaactttaataacttttaaggatgtgtattaattataaaaaatactacatttttaaattttttacaataattttttttaaaaaatgaatcaaatcattaaattaaaaataaaatacgagtgttacgctaaaatttgacggagtttaatttaatattaccaaaa

SEQ ID NO: 77565 - DNA, 790 bp, Cannabis sativa
ttttcttaaacccttatgtgtttgtttcattattttagagaattcatatttaggatgttaatcaacagacttgttagtaaatctagatgctggtataatattcccacctgggagatagaattcgatatgagaactcagtatccagagttgtttaggttagatttcgaggacgaaatccttttaacgggaggataattgtaaagacgcttaacgttaatttggaaattagaagataattaggatttaattatgaaacttgtatattagttatgaatttttagtttacggagatttattctaatttagaatgcattttatatatcatatatgaaaatttatatttttgcatgttttgtgcccgacaacattggaacgcggcgtttggctattataatcacatttttgtatttttagtatagcgggacagtatagttagacatggggaatgtcaggaatagtcgagattttaaagtgaccaaattacccttaataagtggttttatgacttttagtgtaggcaagggcattatggtcattttgcctattgagtttttgtcttttagtaggaatttaatattaagtattaatctgaatttttaaggtttattaagctgatattatagttagttaaaacttttttattcttctattttaaaaaattatgaaaatttcaagaaaagacacactctctctcctagttgcatctctcttttttgagcaccatagaacccagctagggttggtgcttttgctgccttattcagaggttttccagaaagatcttagtgta

SEQ ID NO: 77566 - DNA, 1915 bp, Cannabis sativa
aaaagtaaaaaatactgcttgacagtatttttgtaaaaaaatgacaaaagttaatatatcatgtaaatttccccaattttaattttgaattgactgttaaaggtcggtcgtttgacttcattatacaagcaacgcccatcttattggccgaaacccaacctccaactctttccatgtaccgcaacgcactggataattgccctcctttctcctatttcagttcgcaacactacaatttatagcttcacacttcctactattttctcggcgtttgtactgtttagaaaatattaatttcaatcaaactattattttcttgattcaattcattcatggactccgaatcaggtgagctattgaaaagtacaaacttaacctgaacctatactctcctttcttcgccacctacaaattgactgacaaaatatccactttattttaacgttttcctgtattgtttgggctttttcgcttttggggtttcatatatttttatttttcagtgattgaattcctgggttgtgttcccttgcttcagagtttacctgcctcatcgctcaagaaaattgccgatttggttatcgtcaaaagctatggttgttattcttattcttactttttttttttccattgttctcgttcaatttttctttcattcgaaattaatttatgggtatttttaattttcttttccgagtgaattcatggtcgaattgagggtggtactgatttttgtaacttgtttttttgtgttagattctggagagtatgttgttcgtgagggtgaaaccggacatggagtttactttgtatgggaaggagaggttggttatatggtttgtctatattgttcgcattatgaaatcaaaatttttgtttgttgaaagtgaatatcgtggttttttacaggctgaagttactggtaatgttagttctggtgccgataatcgtttggagtttcaattgaaacgttatgattattttggttatggtgagaagctttccatgttctttcagtttttgtgtttagagcatagattggctttattaagtttcatgtaaaactcgaattgtttgttaatcaaacaaataaaaggggcttcttatgattaaacctgctaccagcaataaaattgaagagtaacgtcacttgcatgtgtaggttcaacattatctgttcatcacactgatgtaatcgctttgtctaaggtacctgcaattattttatttatttatttttcttttaaggtacctgcgattattacaatagtggttttgcctttacgagggctaaaattgttgttggctgttcaaatttgtgcatcagttcttagtttctgatgtgtaatttgttttggcagttgacatgtttggtgctacctcatgagcattgcaatctgctgcaatcaaaatcaatctggagtgctgatacaaatcctgggtcatgctcacttgtagaaagtatattgcatttggagccggtagaagtatgtttctgtatgtttgcagaaggtttttttgttttatttttctccttttctcctttcttagaattttagcaactttattaaataccttttaggaaactttagaacagatttagcttttgttattacaacagtacttataagaattgtgtctacgttgattgatttaatatataaatattgctaagttgtcatttagaatatgttatttcatttacatttgatggaaattattcaaaatcataagatagttataatgtcagcataaaaagagacatatgcttttcatatgctaagatcagctatatctttgttgtgaaggtaaatatattcaagggaatcactttgcctgatgcaccaaaatttgggaaggtttttggaggacagcttgtaggacaggcatgaagaacttatctctctctctctct

SEQ ID NO: 77567 - DNA, 717 bp, Cannabis sativa
attggcttgactatccgagtcaatttagccgacaccacactagtatcccaaaaattttacgacttacttttcttttattgtgagcatgttattggtggtcaccttagtcaattcaattgtaaattcgtgcagctacattatggtatacatatacaatgtagtaaatggaaattatatttttttattagttggttttttactttttgctgataaaatcatatttttataatttaaaccttcaaaattatatttttgtaaataaaatttgaagttgtaaaatcacaaataaaacattaagaaagaattgtatttgtcaaaaaaccctttgtaaatttactcatatgatccaatataacaactttgagcattttattattagatcttagacaaattggttgtgggaataacatgaagaatatctattttttgtgttaattaaccaaaactaataacaaattatattaatttaaattattctattttataaggagacattagcattaaagactgaaaattaatttttactgttttgagttaaagaaagagtattataaaaatattaactataaaaatgggtagaaaaaatgaaatattaaaaaagaaagtaaaaattataatagttaactcaaagtgggtagcccaccttatttcttcttgattgtgcttatatattgctgtagtttttttcttatatatattattgtataaatcattttc

SEQ ID NO: 77568 - DNA, 986 bp, Cannabis sativa
tccacttgcaccagttgttcccccggatgtagctgaagctaaagctattttggttgctatttcctagatccaagctaccaagattctagtttaaattctagcttcttattgtaaaagtgtagtggataaaattaatagttcttcttgtaataattcagttttaagtgatgtaattagttgtattaaggcctaatgttactcagtcatggtctaattgtagtgtatgttccacgagagaaaaacaaattacctcatggtccctagaatcggtctaggattcaacagtgagcgtgtttggaatggttatttgtctttcattttaacctgattgatttgtattctcttttcttataatgaaagttctcaggtttgttaaaaaaaaggacatatatttatctagatttatacacttaacatgttatttttctcctatgtgaaaattggttcacatgtcaattatatacaagactccactccttatttatttagatgaaaaaaattatgtaatatatatctataatatctataataagaatcaatagttagaaaaaataaaaacaaactacttgtttttgtcctttaattttttttaatcttttatttttttttaattttatatactatttttttagtaaatagtttttcctatttattattggtaccttaatgctcaatgtcatatcaatgtggtatcttaaaattagttagtaatttttttgtcttttgttttaattagcaatttttttatttttatcttttctttgtaattttatatactatttctttttgtaaacgttttttcgttgtatttactattagtaccttaaggtactcaatgtcatatcgatgtagtacccagtaattagttagtaattttttattcttttgttttaatcagcaattttttttttttttgtatcttttaggttttttatgtttattttttacgaataatttttgtactattttttgttgggttttatgcc

SEQ ID NO: 77569 - DNA, 638 bp, Cannabis sativa
  modified_base (437)..(437): a, c, t, g, unknown or other
ctattctaacgtgggacctacctgccgtacacggattccattccgtgttttgcacatttgggcacaaaatcggctgcctatatttatatagcattctcaaaaagatgcatggttgtacttcattgtatccttgacttttagatatctataaactcaagtttattttataaatgttttttttttatgtttatggtagttatttaagatattttttaaaattttaaatttttttcaataatatgtcgtgaccaaaataaagtttgaaattttattgcatttggctgtaaataatatggaataaagtaccactacaaaaaacagctaattttagtgataaatgtttagttataaacataaatttttgtgactaaatgtgatttttagtcacaacaaaaagttacttgtgactaaaacatagtatttaactataagttgtnctaatttagttttagtcataacaattattgcgactaaaaatatatttagtcacaatttagctacagactttttagtcacgacataagaatgataatttataattattcacaatttttttacttttagtcatgagttttgttgtgattagtaaaattttttagtgtacttatataaaattttgtaagatatatgatttcaac

SEQ ID NO: 77570 - DNA, 1473 bp, Cannabis sativa
cttctcattgttatgatctagttccaaggataccttcaattattgagaagtggagtgccatcctagtgcgggtccaacattggattttcgacaaagggcaataaactctactgctaggtgtcactctttggtaagacgaaattaggccaaaggcttcttcacacgtcacttttctttaacttcaactcattttgttgatgaaaggaggtcaaattacgttgctcgattgattttttgatcgaggttgacttattgacgggtatacatcctgttgcacgaccatcccacgggcttcctcaaattgctctaactatgttgcactttaacagtaactaacagatgacactatcatctttcacgggaggtcggttatgttaggtactatgattagtatggtgtgctagcatataataaataaaaagagtatttgagtctttgtttgggagagtggctttgtgtgagaaattactatatataggtaagagaatagaaagggtatgcaatgacttgagtaaaactccttgcatcaaaagagcctaagggttcccatagtttgtaaggataaatagtggcatatgtacccaaagtgttgagtttgtaagcggcataaatctaatgatttttcttatcgacataagtacctaatattagtaaaactgtaatttttgtccagttttatcattacatactctattagtgtcttaaatagaatacatataataccctagatgaaaacatatagcatcaattacttcttaaaattcttttaataaattcaaaatgaactccattttaacgaaactgaaagaaaactacagttttactaacattgagtccttatgtcactaaaaacatcattaggtttatatcgcttacaaactcgaaactttgggcatttatgccacaattaaccctagtttgtaattggttctctcttttattcaatataattttcctactgtttggccactattttgctagtgttctactgctactattgctgctggtggtgctatttgctactggtttgtttgggtgtttggctactggtttagtaatctacagcaagttctcctcaatatctcaggaatgtctagatactgaggcatcaactccatatacctcaatagaagaatatccaattttcattgtaaacgtaacaagaaaatattaaattactaccaccaagttctaactggagtttcgaaaccatttaatcttagcgacctgtaaatatctatgttaaagctagtaaaaatatgtttttcagaggacagtcatccgtgtaaatatttatttttattacagatgtatgatattagcaaaaatatcacagcactatacacaaatccccttatttatggtcagtctgcctttcccaccataactcacaattttcactcttcttagccaaggaaataaactttttactagatagaaaggcttttgaagttcaactatttctcggaaaaa

SEQ ID NO: 77571 - DNA, 1085 bp, Cannabis sativa
caaggtttaacatggtatcagagcgctggcctccgctcagtgcaaacatggctacggttggatcagcagggatccccaacaatggtgcagcagtcaataatcatcaagctacacagaacagagtctctcaagaaccggtgtacttcaatcataacatttcgattcgcctcaatgactacaacttcttgctgtggaaacagcaagttcttgcagccattagaggaaatcgactcttgaagttcatcaaggaaccaccaccaccggagttcgcgacggatgaagatcgtaatcaaaacagagtgagccaaacctacatcgactgggaagtacaggaccagctcttagtctcatggctgctgtcatcgatgactgaagggcttctcacgaggatggtaggatgcaattcagtacatcagatctggaactctttggagaaacatttcactcttcaagtttcttcaaagatactggaatttcgcacaaagcttcagaacttgaagaaaggaacattaagcctcaatgattacctactgaaagtaaaacagcatgtggatcttcttgcttctgtgggagaaactttgagtgaccgggatcatattgcagcaatcttcaagggtctcccgagcgagtacgacacctttgtgatctccaccaatactcgtgttgagcaatacacagtaggtgagatcgaggctttacttttagcttctgaatcgaggatagaaaagtctggaaaagatgtggatctgagtgcaaatcttgtgaccgatgatcaagattcatggatggaagctaatgttgcatggagaaggttcaaacagcaacaatttggtcgtggtaactctcaatctactggaactggccagtatggaaatttctctaacaacagaaattttaatcgagggattgaatttggctcattctctggtcagaatactggtggtcgaggagctaacttctatcatcgaggaggaagatctggaaacaatgttaataacaaagtgcaatgtcagctgtgcttgaggtttgggcatacggcacacgattgtttttatcggtttgataagtcattctcaggtgttcaa

SEQ ID NO: 77572 - DNA, 2202 bp, Cannabis sativa
atattatcgattgtattttgcattacatatcgtttatatatactatatttcatatactatattatatattatagtctaacacaaaaatcatcaaattgctaagcaaaataaaagtttggtcaaaactcttcctgaattctcccgtatgaaaaaactctcaaactatatccacatctctactcacaatatcccacgatgaaccttggaaaaagctccctagcataccatcacaccctcgagctacatcatagaccatacaattaccactatatccttcatttagaaacaccaattaaagcttcattctcccctaatatgacacttaaacttatcagatcaaataaatcctcatcctttggactctggaggagggtttgacaaagtgagtgaagacctccttaaatttagaacagaaataatcactgatgttttgtttagttaatttaacaattttattttctacatgtcatctgaccaaattaaacatatagataaaatttgaatatatctatcaatcagatggcgtatcctcattatttatgaaaaatttataaattaaacaaactttatgatcatgtctagctttttttcttttttctattttgcttttctcaaaccaatcaatatgtgtatttggtcccagaaaaagccccacaacttttctatgtccaacaaggtttagaaatttataatggtcactacaaaaaacaaagaacatgctcccatgtgtctcctcaattattttaaaaggcaaattgcgttggtgtgtgacaacgaatcaggcacccaaacatataaatatgtatacataggcaatggatttaactaatttctttatgcattttgcaatgctggaaagtacattattatcaggctgtgtagtgtatcttaggccaaaaattatatattgtttagatgataaagtagtttggtccctattatttgaagaaataggtcccatattttctatctattaataaatctttaatctataactcgtaaagttttatatatttttatttttttctgttgtaattatccttttacagttacattttgctcattttttaaaaaataatttaattacgtggcttacttgtatagttgcaatgtagatatttatttaaccattttaagctacttaaaatttaacttattgacgttaaatttacaaatattaactcttagaatacatatacatattcttataattcatcaattagattgttacttatacatttatttttttattagaacttttaaacagagattaacatcaagttagtactatattaataattatctaaagaaataagcaatatataactgtagggaaatatttagttcagagagaatttttagaattgaaattttttttagaaaagagaacaaaactctcaaggatcatagtttggagaataaattttatttattttttgaatattgctataaggcaccacctagatagcgttttggagatggtctcagagaatagataatacttctctccatgtagagatagagaagcagtcactattacattttttatttacagtagagcaattgatgtagtacttttttggttcattttttctttttctctaatctaaaataataaaaagacacttatacattatctaacgtgagtgtttattaggcacaatcgttacttttagcatttctcttattttctttatataattgtgactgaaaccctttgtttaagtgacttaagtcttcattttttgcccaatcaaatcgtggtttcatttatttatttatttttccactcaaatcatattttcattattatgattgtgatcatccaactaaacaaaagttcccataataataataataatagtaataaaagaaggcccatcttaaatctgaaccagacatcattaaatgctctagccctcttgaataaaaaaactgaagttaatctttataaaatgtgatgatgatcgatatggtagatctatcattgaaagtccagggttgtttatggaatttaatattccgtctctagtgccttgatgaaaggaaaaaaaaataaaagtaaagagttaatgtctttttttaattttccttttattaaaaaacagtaatcttactcactgatacttgttgacattaatacacgtctggtttgattaaactactaaagctgaacttccgtagttgtctttttttattttt

SEQ ID NO: 77573 - DNA, 2201 bp, Cannabis sativa
gtctcttgcttctttagctagactatcaataaaactaagaacatttcgattgacataagaaaacagaatctcaggacactttcttcttcgggcctgaatttcagagaaaaggggccaaagtttccagtgaggaggcttctcagtagcaaaagcattcaggcaaattcgagagtcagaaaaaacaacaaagttgttccagtttctatcttcagcccagcccagcgccatgtttatagcttccatctccgcaccagtagcgtctgattgagtgcctctgaaagaattcccttcccaagtattactaccatagtctatggcaacgaaagcaccacctgacttcccatttttgaaggctccatctactacaataactttaggagtaaacggaatcttactcgcctcagtcgggttcttcctggagcctgccttgtgatcattcttagtcttagaaagactttccaccatctcagcatacctacttttgatctcagcaagaatcacttccggattaatggtcacatctaaccctctattcagcttgtttctccaaagccaaataatctccataacagacgccaaccaaattaaaggcccatccatctttgatgctttcaggatagagataataccagaggcaaattcagctagatcacacccaacaatttgctcagagtggatgggaacagggcccccaaaccatatagctctggctaacgtgcatctaccaaataagtgcaaaggagactcgtcacaatcgttgcaaaagaaacatccagttccattgtcacccccatatctatttcgagttggcagagcatccgatatagccctccacagaatcatactctgtctcgggtgaataccggaatgccatacatccttccatagcaaatcttgtttaccaaatcgcactccttggcttgaaacataggcacttttaaccgaaaaattaccagagtttgaccccttccaaataaccatatccgaactgccttgataattaatctggatcgaactgatcttgattcctaactcctccccaaatagaaatttaagaaatcccacgttccaagttcgggttcgacgatagagtaagtcagcaactgaacgaagagcaggagctttggatcttatcccttccatagtgtccctgaattctgtgtagtttaaccatgggatccatggttgaaaccatatgtcgatatcttcgccattgtgaataatagtagtagcactttccacaataattcttctcgcctcaagaattcccttccaccccggactgtccgaagctttaggagagacttgccagaaggattcaagagcaaagtatttagctttaatagatctaatccatggtctctcagtaccagtagccaacatccaagccaatttagacaaaagagccaaattgaaatcttcaaatcttctaaaacccaacccaccgcagcacttaggttgacagagagaatcccaagttttagtagcaaggaatcgagagcctttgagattacctttccaccagaatcttctcacaatggcatccatctctttacaagaagaactcgggagtttattcgttgacatggagtacgctgggattgccatagcaacagaattaatagagaccattctccctgctatagagagagatttcatcctccatccctcaagtcgagaaaggagttttgatttgagaaagtcaaaatcctttcggcgacttctagagaaaagaaagggattacccagatgtttctcatctcccctcattgtatcaatacccaatttctgtgatatctcacttcggatagtagcaggacaattactagaaaataggatacctgattttggtttgctacatctttgacccgaccagtcttcaaaaatctttaaacatttgccaaggttctcagcctctctgctatttgctctgcagaaaagaatcgtatcgtctgcgaacattaggtgggaaattgccggagctcctctcgccaattgaattccatgaatcctccccagttcttggtctttagaaatgattctagataaaacatcattgcacaggaggaacaggaatggggatatcggatctccttgccgaattcctctcctgggactgaatttagggagaggtttgccattgagaaggatggagtatgtcacagaagaaacacactccataactaacttgatgaaatgag

SEQ ID NO: 77574 - DNA, 750 bp, Cannabis sativa
atattttagattttggccccttctaatcaaaacctttctccgtccgtcccctgcatccgattttaatattatactattattgaaagctttatattttcatttctggcaaagaaaacgaaaaacgaaagcagtagatttaaccagtgaatcagaaagaacgtagcgagtatatttatgatcacatcaaaaacaataagtaatcatcactctttataaatctctttcatcattttgacaccaaattctatacatatgaaaccagaagagaaaaaacaagaaattagaagcatagaagaaccttcagaaagatagggagagcatcacgaggtcccaaagggaaagagatgaacagtgaatctgagaaagaaagaagatgagggagtagaggagaatacgagcagcgagatttatatatataatgatattgtttcagattgaaaactataatgaattaaagagggacatcatgatcccctctcagatgattttcttgtccacatgaatcatatatatatatatatatatcgctgcttctagtatctctctctttctctctatcctttctctcctgacctaaacgcctccattctttcccttcaatttcatccctcccactaaccctaaagcctcttcctcttgtatttatataacctctgtatttagggtttcttattgttctcttttgttcaaaaaataaataaaaattagtatttttacgtgtcctgtgtgaaataattaccatttcaattc

SEQ ID NO: 77575 - DNA, 959 bp, Cannabis sativa
aattatgtaactgataatggaaataaacaaaattaaatgtcaaccataaaaaataatgaggattgaacataatgaaaaagaaattgcagatagagaattcgaaaaccaaagatattcgttagacatccttaagaagttaatagaatttctagatctccacccctaccaaaaatcaaagacttaaatttaacattagtatatacaaattaaaataaacatgtaaaaattataaaatggcaaaaccaaaagcaaaaatttgctctaaaaaaacccaaagccactatcgcacaataagcaccaatgatgacaaagcaacggagaataagcgatggatgatagtcaggcaatatgtccatacctcaattgtaactaataaccctacaattttaagaaataaaaaagaactaattttgaacaacaagagtcatatttaactcattgcaaaactaatttgatacatgctaagatgaaatgaggtaggaaagtgaactgtatattgagaaaccacaaaccaggccatttcaaacttaaaatgagtgaggtccttttgtgtgtgtggtagttttgcaaaacccatatattatatacatacataaaaataaatacatgtggccatgactgtgagtggaggagacttacgctggtggagcaaaaatttgagagagggttgaagagcttcagagctgatggaggcacagtagagcaaaattttaagagaggggcggagatgattaaaattgcgcacctagggttcacactaccagagagtatgaacgaatgatttgcttggtctaagaaattttgggtaagtgagccataagagagtttgtgtctgttggtcacagtcgcaacttttttttatcgtcgattggaaaatgacagagataatgtttgtgagacttttaaaaggacgtgaatcttatatatattttttcaaattttctcttttgccgtcggtt

SEQ ID NO: 77576 - DNA, 1682 bp, Cannabis sativa
tacatttagtaaaatagattcaaaatattcttcatatattttatttacgtttattctaatttaatgttaatattaaatgtaaaacggttctataattaattaagtttcgtgtaaccaaatggatgcttgctttgtatataaaagagtgatccaacatgaataagacacgacagaattccttgcaacaatagactaagcagaccgtgatctgactgaaccactgtacttccttgtgttcattgtttttattactttttctatttgtctaggaaattttgtttgagtatttgtcgttctaggttgaatatactagttgttttttagttaaatatctaattcttattttacttggtgttgtctaaattccttcgacaacatttggtgcgatctgtgggaattaactattgattttagaggaaaatcaatatggctgcaaaccagacaaacggaaacattggatcttttaagttggaacagtgcatattccactcccaggtgatggagctaatctgactcatacaattaatgggggtgtgggacgaaccaatgtcagtcctctcaatttgttcctagaaactgctagccatgtaggagaaacatcgacaccaacagccactgtaggccacttcccgcctatcacaccggtcgtagcatctgaaggaagtatccagctgacaacggcccagtatacgaccatgcaggaataaatgcgagcattgcagactaaagatgatgggagagttaggactcgacgtccaccccgagtctcgaacacgcgtttaggaaaccctcaggtaactaccacaaatagacgacgaaacaaacgtcttaaaaataaccctattcgcagtgaatgagggaatgaacaagaaggtcttgattagaaccagcgcacacaattccatgtggaataggaagccagttgcgcctaacactggttgcgatagagaagagataccgcaagaagaagaccctgaatgacgaaaccctcaaagtcggacccaactacaagttgaggtaaatgaagttgaatccccttcttcctctactaatagtcgctcccctagtgtttataccaggtcaagttctattgaacatgacgaggagggagataccatgttcatagagatgatctttgtgataatctaaatgaaattttcagggcgcgatctcgaacacaaaggaatcgcgatgatgatgagccacgtgatccccaagtgggagatcaaggcacgcagaatgtaacatatggcaagcatcagtaataaatatgactccgctattggttggccaatctgaggttaacaccatccatataattagatttccaaaacagaagttgtaagaatcatcttctttgagaaactttaacgagtaaatcaaagaaactaataacatgaacatgatttcatgattactcaggattcatgccaatctagtattaataatctttatgatatgaaataggtctttatagtaaagagcatgttcaataatgacaacttaatttcatatcggtgcttgtcatatataatctctaatatatatataacaccttcacttagatgtcatactatattagaaatctgaatcgatattacttgcatcgaataacaagcatcagtgaactgctctttaaaaattaaatatatatacatggtacaaaaaattataataataaa

SEQ ID NO: 77577 - DNA, 584 bp, Cannabis sativa
tatcttattacatattcagtgtgcatatttatcaatgtctgctagttaacatactgctaccgacaaatatatgtttggcgtagtactgattgacgctgtcacatcgatacgagtagaggatcgagtgtaggtagacattatggtcaatagtactgtggtacaaacgttctagacttagtatgcagagacgcagaatagggttataattaggtgtatggctgcctagtaataatctagcttttattatgttatgattatgcttttcttactaagtttgttaaatcacagatattgtttacatgcgtagttaagggcaaggcaaaggttgaatatcagtgagttagacctattaaatattgtaaatatggagacagttagacataaagtgttcgatcttcaggacagctcgctttattttgatagtcgctaggcgacaacttttgtagtgaaatattttgtaatccagttgtaaatttaaagatgggattccatattgagagtatttattaaattaagtttacaagttaatttagaatttttttaattaatgaaggagtatcagacttagccaactggtttgttgg

SEQ ID NO: 77578 - DNA, 745 bp, Cannabis sativa
aaagagaacaatataaaaaaggtatagagtgtaatttcctcattatacaaagagcatgtacttaacataatgataaaaaaatttatgcacagaatcttttaaattggttactaacattcgccccaaataaagtttatttaagaagatttttaactgatataagaattttaataacaaactaaatattatacttaaatatataattattattgaaaataatataattattatgcctcaaagaaattatataatagaaagaaaaataaaaaactattactccaatcttataaaagtcacagaagttactaaatttgcattcaagataattaccaaatagttgttagactatttatttgagtttaaatttttggggtttttataccaaatttctaattttttttctttttacagtggaacggaatttcttaaaaaaatattgtgtaagttttatactgtgtactatgttaaattttcacggttgttccacgattgttttttagttcttccactgttgttttagttgttatgtttagttgttttacggttgttttataaaagacaatatttttgtaaaaaattctgtgtaatagtaaaattatgaatttttgtacaaattttagtatttatgtaacccctaatttttattagatttattaaaacttggatagatttgataattttttgctatgtcagcccatattattagtgttcaatagttgatgggcttaacatttgtgtgtaagtc

SEQ ID NO: 77579 - DNA, 642 bp, Cannabis sativa
tatttagaaaatcactaaagaataaaaatattaaaatatacataaaataaaattattttatcgcctaactctatagttcttttggctgtgtttcttggggccggttgttgtgtcctaatgcttatgtattggttttgtctttaattaatgatttctcctctttagtcaaaaaaaaaaattgtttaaaaaaataatagtggaacacacatatataatatacactcatacccgatcaagtaatatatacatcttgagttgtatataagttttccacttaaatgcttttgaaaaagatatgatagtgttatacctaaaattcgactggaggacacatgtcacggtaaaagggaatgtgaatcggtgtcgtatctttttatggaacaactcattaattgcgtaagtacaagagtatatttgcaacccgctgactgaaaggtcttaagagaggaatcaatgtacgagctatcatttattgtattaacgagaagccatatgtcgctaaaggaaaatagcgaggcaccggagaaaagtaacacataccttagctacaaaaagcaaaattaagtgtcaaaatcggaccggctcgaagtacaagaatgcgagatgaccatcttgctacgaggaaacttcctatagtttcat

SEQ ID NO: 77580 - DNA, 1163 bp, Cannabis sativa
tggccctttttgtggttgtggtggctttccaggtgccatttatgtgattgaaatctataatattatttgcgataagagttaacaatacaacttatataaaaccaagtctagaataacttttttttgcacaaaaacaaaaagtactctagaatgactatatttgcaatatgtaatattataggtacatattattattaatatccagcttgattaataataactaaattattattattaacttggtctgataggagatgcaagatccaattgacaagacaagggataaagagtttgatgattttttctctttgatacattaaaatgttgactactttgtagtgatgatgatcttctctttgaaatttggtggaacactttgttgagatatatgttggtgtgtagtgaaatggtgtctttatattttagaaccaaaactaatattaatctgtgtgaaattaacaaacacacaagagctgccaaatcccaccatttggaatgatccaaaggcattccaaacattgtttggagaattatttcacctttcagctttggatttccacctactaatggatcgaattctataccaatcatatcattcttatacacaccctgaaattatatattaaaattaatgacaagtgtacatatttaccattcaataataaaacatgtttgatattataattataattgtacctgtaatgcccaagatgcaaagctgatataagacattggataacgccagaagaacttgggaagatcacatattggtctaaagatttcagatgccatcatcataaacacctaaatatatttatataataatcacaacattaatttaggtataataatttgtaagtaaaaaataaactatattgtcaaaaattgagatacacaatgtttgatatcccaaagaaaaatcttaattaaagtaactattttaaagtacttaacgatatttttgaaaaaaaaattaattttttttttgtgttcctgaattgagtgggctctagacgcaagcctaacctatcttagtccaagtttagccgtgataatgtacttcttttaatactagaagccttaaaatgtcttaatagcaatagtaatgaatattatacaaatgttgtgttataaatatcattaatttcagtaatatatatata

SEQ ID NO: 77581 - DNA, 1289 bp, Cannabis sativa
aaaaaaaaatcatttttaatttacagaagaaaaaaattactaataaatacaagtaatatattttacaaataactagcaattttctatgataatttttaaattcaaatgtataagatcccataataacacatagaaaaatagtttcaaaattgttggtgctttagcatttctcatagaaaaatagtttcaaaatatcactcccaaattttagctaaaatgttcattattattcttaattttacaaattcattgtttgtgttatatccataatttattttggataaaaaatggttctcaaaataattttttttaatgtataacaaattagtaagaatagtaatttattcactatcacaaaggctatattgcaattattaactacaaggaaaaatttgataacccactataaatgaaacttgattttaaagattcttttagaatttagagtatactattagttaatcatcacataacatagtttcatttaattttagaattatcattaaatgcatgtaaatttatagattaagcttgatttgagtatggtttatgacacacctttaaacttaatcatgcatatacatttttaaaaaaaaaaatataaatagaattttttttttaacaacagaaaatgtggaagacatttcattcaacaaaataagattacaaatgattttgataattagaggtatttaactaatctaatgaacaattttttttttttaccataacaaataaaatttgtactcctaaatttgatccaatttatatgtaaatttcatggccaaatccattctaattcataatatataacaaaaaaagccaatctaattaaatttgcactgtttctgaatgagttgattagtactttttatttattaaggccaaaattgttagtcttaataatttatcagtaatattcatattgttttaacaaaagaattaattaaagcacttaaataatgaaataaaatataatatttaaaactattatttttatatatatatttatactttgtataaaataattaagagtaggccaattactttcaacataaaaatacatcagaaaaaaatcaacataaacatgatataaaatgtgcacaagtcatattttgttttttttttgaaaaaataatgtaatagtcaaaatctcacgatccaaaaaagaaagatgggataaattatatgattctctattattttggaaaggtcaagcctgataattggacacatttaatgaatgttttaaaaaattaataaatattacaatgataacaatatgtatt

SEQ ID NO: 77582 - DNA, 1430 bp, Cannabis sativa
tttaaaattctgtaaaaccatatttttacaattttttttattatttttgtgtatttgtgaaataatccctaaatattatctgtattttttataattaattgtatttttcttagattgttaaagaaaaaaaatatctgaaaaatcattataataatttagttttttcatcgtacattactcacgtgtactccagaatcacgaaagcataagcatcaggacattctttgtctatatttttccagattgtgatattattattatctcttctaataataataatatttttttaatcgaaaaaaaatctctattttggggtagaaggagcttctaaattccatcaaataatatggtagaatataattgcctgaactgaacacccctataaccaaaagaggcaataacaatggttggtatagtactgttctgttatatatggcatgatgatgagttggttgccacaaaataaaattaacgaataatgggcaccaataatggatggatatatatatagtcctatatagttgattttgattggtggttatgagtttggttcaatgaaaaagggtgaagaaaagccgagttgagttgccaaatcttaagggtggccttgagtgtgactccggtggcgttgttgaacaaaaacagcctggctgcgccgtagatggcttcggtcggataaatccttgatgttataactctccttcctccttgtccaaagctctccacaattgaatgatcaacctatatataattttaaacaaaattacgcatcacgttattaattaattatgcttcttcattttgaattcaaagtgatgatcatcatcaatattaattaattatttgtatttaccaagactctcatagataatttttcaccgtcgagaacaggaacttcgcttccgtaaacttgtttaaaaacaccatttgccttggatgacctatacataccatataatattaaatgaaatgcatgagttaccataaatattttatcacaagctatagatatacattatgtatatatatatatataataataataaaaatagaattgaaaccttgtttcatcagcgcagaaataagtgttggtcttggtactagggtgaaagtagatgggagttagttctgaaagtgcgtcgttggcaagaactagaagaccaaatggtccaaatgtgctcctatccaccgaaccaccaccgcacccattattggcgtgacccgcggcctcttctaaaccacataaatctacttcgaactccgccaatatgtccaactacatatagtacatattataatctctgtttagttttagaaagaaatccacataactctccactaaatgcactcttgcattctctctaatatatagaacatcgaaagttagaatcatttcgatgtaaatccactactagtttcagattacacta

SEQ ID NO: 77583 - DNA, 1311 bp, Cannabis sativa
aaattgatgtctcaaatttcacaatggtgttttatggtgaaatgcaccaaattttaggttgaattgtgaatctttttcggagttaagattgttgcaactttagtaaaaaatttgcaaatatatgagatgtattttatcattcaaagtttggaataatttaattgagcattatttaaaattttgctagagtacgaaataacatgacgtattttatcaattcttttctttaagatagcttctatagcataattagaagctccacacattcacattatttcaaaatgaatgtttcaattaggatgttaaataatgggtgcaatagttaacgtagttttttatttctcaaaagcaatataaaaatcgtggttgaaaacaagtgcattatctttctcaagtaaatggcatagaggtcgtgaaattttactaaaatcttttatgtgataattttgacttagggttttgaaccctattcactagtagagagttagccatctccaagaggtaggttaggtgtatgtcgatcatagtgcataataggaagttgagcactgatattgtacaactagacttagtagactttgatatcattctagagatgaattttttgtctaagtatgcggttagtattgattgcaagagaaaaatggtgacgattcagcctaagggtgaggagtcatttgtttttgtgggattgattcagggttttctaattccagcctgagggtgacgattcaaactttgatatcatttattaaattgttcttcatcttctgatttttctttcaaagttaatagtatattttataaaagttcagtcatgcttttcttatgtaagttaggctgttaatattttggtatatctattataatgtatgtcgttaactgcattctgccaataatagtattttatcgatttatgatatataatatgatatgttgtcaagttagaggtgagattcaatttatgcaagatcaattaatttgcgcttttattatatataactctcagttgtaattaatggtatagaattgcaactattttttgaattaatatcagtattaaaatagaaattgcatagctacatatctaccttaccaaactctttatctgattaccccctttcactcatcattttattatttttaatttatttataattctacatttttctatttactaaactaacctttagtggtaatttgtctccctatagatacgacaaagtccgtttactaacgcgactgctgtgtaacaaattgggtgatatcatcgtcatttagtatatttccatattgggaagatacgatcct

SEQ ID NO: 77584 - DNA, 655 bp, Cannabis sativa
gtccatgggagatggaccaacatgtgagcatgtttaggaattacaataacctaaggaaatatgagaccctacgagggcttgaaagttttccaggactattttggaataggcttttcgttctcggggagaggcccagcaagtgcgctgaaggaggcttagtgtcgagagttgggctcctatcgagatgggtgcacacctgcctctgaggtgctattgtgcaaacttctacgtcgtggcgaaaataacacctttctaacttattccctaggcataccgcttacttttaaggtggtacgtcttttgtgttcaacatgaaaaatctgtgccgacgtcgaaggaaatcttatacttctacaagatcaagtctcagcccatgaggggacacaaagagaaggtgggcttctataggctggagcgctacactagcagtattacttgccccaccaattctacgaagtatacgtacgacttgagagaatactcttttacacctccggcttcccactgaagagggttcctaccctcagtttggatttcaatactgcaagtaagtgtcattcccttctttaaactttgggattctacttttcctcctgtttatggtatactgatatcttatttttcacatttgctagactgccttccccaaacacct

SEQ ID NO: 77585 - DNA, 992 bp, Cannabis sativa
tgtgatgaagctggaaactgggtcgattggcagagtggtcttcctacggtgataacagaatatttttctcaacttttttctgcttcagcagttgatatttctggtgttatgcattgtattccagcgactgtttcgaatgtgcacaaccaacaactgctggaaccggttatggaggaagaagtaaggcgtgcactctttcaaatgcacccggataaatctccgggtcctgatggaatgactcccggcttttatcaaaaaagttggaatattgttggaagagatattgttcagttggttcagaatttttttgtttcgggtgcttttcctcgtgatctaaataagaccaacattgtgcttattcccaagaaaaagcaaccccaggtgatgaatgatattcgaccgatttctttgtgtaatgtggtatataagattatttctaaggtgttggcgaatagagttaaacaagtgctgcctagtgtcatttcgttcggataaccaaacaaagcgcttgcttttttttatcccgggtcgtttaattaatttcagataatatcatgattgcttttgagattatgcattatctgaaaaggaaaaggagtggcaaggaaggctatatggctcttaaaatggatatgagtaaggcctatgatcgggttgaatgggcgttcattgaaaacacgatgctgcgtatgggatttactactcattgggttcaactcattatgttttgtgttactacagtatcatacaatgtcactcatggaggttttactatgggtcctattgttccgagtagaggtttgcgtcaaggtgatccgctttctccatttctctttttgatttgtgcggagggtctttcttgtttgctgaaacattacgagagacatcatcttttgactggttgccgtgtggctagaggtgctccaatggtgtcacatatgctctttgcggacgatagttatgtgtactgtaaagctaatgaaagggaagct

SEQ ID NO: 77586 - DNA, 942 bp, Cannabis sativa
taatttttgacagtaaaagtaataaaacctaacagaagaggcataattatgtaactgttatattttagggaaaatttttaacaagctgtatattttagaggagaaaatccgatagtatcgaaaattcaagggacaaaaatactaattgttctaaagataaagttgtatagactttacaagattgctacacaagagtattgtttagatccctgaccaatattgttgattttttttacaagagcaaaatagtgttacataccatcaacgtcaatatcatgatcactactacaaaagtgagttttcccaacgatttatatatactatttcccaacggttcctaaaaccgttggctatgtagctgtcataaaaatgcagaactttaaaagactgtttataactgttggaaaaagttacattaaatgatcgtttacaactgttggaaaaaatctttttaaatgattgtttataactgttggcaaaagtattatataaattaaattaaatataaatgaaattattttttaaatattaaatatatataataataataataatattagttttcataaataaaatattaattaaaataaataaaattaatgtatattcatatttttttagaataatatgtattcatatttaataataaattcagaaaaaaaatacaaaaatatatattaaatataaatattacaacaatattttttacagtgaccaaacagaatagaatcctcaacaacacaatcaataaattgtctaaatcagaacactaattggtatgtaaatccataaaattttccccaatttcatgaatacataacatataatccaaccacaattcaaataatctctcttcaaattaggtatgtcaataccaaagccaccaacatcaacaggcatgcaatcccttgatttatcgttgcccctgaaaaatcaccaaaa

SEQ ID NO: 77587 - DNA, 951 bp, Cannabis sativa
gtaatccagttcttatcgaacctgtagtggcaagttggagctgtgtggccataacgcatgcagacttgacacaaagggcgatttgggttttgagatctggtgtactgagatgggtgatgattcttgggaggaaatctggaagatgagtctgtagaagagcctcgaccataagtgttattggtgtgagatctgtatccaccagttcttgacccaaaagtaagattagcagccatctttgttgagagatccatcatagtcgtgtggcgctcaagccttgtttcatgggacatgagaagggcttgtacctcctcaagagagaaagtatcactccgagaggtgatgccagagaccaccgagtcatactcaggccaagaccatttagaagatgaagaaccaagtcaatatcagatataggatgacccgcaacagcaagagaatcacacagaattttaattttgtcaacataatctgaaattgattggttacctttgtgaatattggataattgactctttagttgtagtaatcgagccttggattggctagaaaatttttgttccagggctttccacacaccattggagctagtaaaacttgccacagtgccaagaatcccttcggtcattgaagatctaagccaagaaagaagaagttgatctttcttgcgccattgttgataagcaggatttggagcattattgagaagaaaccgtgggggagagtgatcagtgagaaggatctcatcaagctcatggccaatcacagtgggaagaacctgtgatttccatgctaagaagtttgtgcgatcgagtttgatggttaaagaggaagtgagtgagtgagagaacggattccaggactgagttgccgtggcagaggggtttgcaccaggatcggagacaccagctggggacgagttgtcaccagaagacgccattgacagaggtcaat

SEQ ID NO: 77588 - DNA, 1165 bp, Cannabis sativa
tctaagcattgattcaagccatatttttttattaaaaaatatgcatcattattttacaaggtacttttaaaaattgtaaaaattcttaagaatcctattcaatttacaggttgaattgcaagtgaatagtgatggattggcttcttttaaaatttgtgcagagagtgtggtcttatacagactcacacaactttacatccttcttatgtactctagaataactctattgaagatagtgtcctttacatttacacagtacactcttgatttaatactagccttgagggtcatattaacacattccggagtaagacatttcttcccgtaaaaggcatatagatttctgttgtgccaaataccatacactacaccagccattgcttcatgaaagaccactactatgagaaagttgtttatttatttatttagagaaaatactaagctatgataaataaaaaatgtaaatcatttacaatagcaagtattttattagtggaggaaaattttctaattaagtgttcattcaactgatctaaagtatcttgagggccaatcatattagctgaacgtttaatatgagtaacattaattctaaaaagaaaggataaaagagtataaatatctataattagataattgaaagaagaaattgcaaagaaacgtacatttaaagcattcaaaactattagggcatctgttttaagaagagtgatctgctgttgcaattggagaacccaatttaaactatgaaaagtagccttagacatttatatgaggagagtttcccatcaatggttttaagagtgcagtgacaactggttttaagaatgaagtgatgacaacttcaccatgagcatctcgaatgttattattattattattattattatttaaaagggttgttaaaatgaattaatgtcatattttttctctttttgaatacgtgataatttgtttgttttgcaaataaatttatgggctgagatgcaaaatgactaaatttaaaaattaaaatagtaaatgtttctttttataaacatttagcaaaatagctatttggataaaaatttaatgatgaaattataattataaccttggataattaaccctagctttctactctcttttcattctctcgtctccagactatctcgcctcctactta

SEQ ID NO: 77589 - DNA, 677 bp, Cannabis sativa
cttgtttgtttaatatcaatatcaaatttcccttcaaggtcacatcaatttattccaatacttacaataacactactataactgaggcttttagtgacattatttagtgactcgcccttctgtgcgcgtcacgaaagtgttaggattgatttttagtgacctgcataattagactctatatttttgatgttagtctcttgtaatgtaggtcactaaaaatatgaaaggtcaccaaatagtagtacctataattttctaattttttttcatttaaaaatgccaacctatagagtcaaccggaactgactaggaattaagcgtgtcccaaccttcctagcacctcattataggtatttttaaagaggatatagtgacgtgatacgcatgttgggatacatatactcagtcatagttaacacgtcactgtaggttaataaaaaaacactatatatacactttgaaaaaataatgcttgctggttctacagaaaaaaagtaaaaaaataatacataaagaagaaaaaagagaatatctaaattaatgttgtatatcgtaattgttccaacctatacttccttttaaataaacaaatttataaatactagtccttatctcttcctcgtctctcttaaatacaaaaaaaaaaaaaacagtaaagtttctaaacacccaacact

SEQ ID NO: 77590 - DNA, 835 bp, Cannabis sativa
tagcttcacattcaaattaatagtacttttaattttctttttctcttattttaagctaggatagtgataggtaacactctttgatttttcttcattgaaggtttgccttatattattctgattattcattctttcgccatgatttttaacttgatctccacaatctactagttattcattgcaaattagtagtgttggatttatccttgcattttggtgccctagaatcgtagatataacttattggaggtctatcattactcgttgcgcacacttttaccctgtcttcaaggtgaaatcagggaaacttccgcaacaaggtagtgtagtttccccagtagcctcaaatagcggtaagtccttccacttgatcaatacctccatgtaggagtgaaaatcggtcggttatggtcaacttttataattttataaccgaccgtttagaaattataaccgtataaaaccgatcgtacggtttttggcggtttttcgatttggcagttttgtacggtttttggcggtttattgcggtttttggcagttttttggtttaaccatttttatatttcaaaaatcgaaactgaccgccatgtcaaaaaaattgaaactgaaaccgaccgccgaatttggtgatgacgtggaaccgaaaattcggttacggtctggtcggtttgatggtcagtttcagtttatcgatttttttgaacacccctacctccatgtcacccctcccatcaggttgactattgcaaacccttagtacctcagcgggctcaactatgagctctaagtcaagactcaactgtggaggaagcaatggtgaagatgtggctgg

SEQ ID NO: 77591 - DNA, 1559 bp, Cannabis sativa
aaaacagaatactgaacagaagtaacacatttcataataaggctgacccatttaccagcaaaccccatacgatgcatgacagcagacagataatcccattcatatatagtacataatttttgtatttttttataagagctaaaagtgaaaattaataaatgtgattcaactcaacaaattttctctattcaacacacatatatatatatattttcttcacttaaaactgacaacattttcttagggtctttgaaatttttgtagaaaagaatttggaattactttcctttgatcttcgaatttttgctctatataccatgttttcatgtagtactcctcatttttttcaagataatttttcataagattcttcaaacaaagttgtaagtaatacaattttagttataaagtgtaatttttacataaaacatcataagtcattcaaattttttagtaacaaagccattagaacattttctcttttaatttcccttctttatacttttgtggtaatcacggtagtgattttatatagtatttagtttaagacacttataaaaataatgtatttgttttttaattatatatttaatctaatattagttaatttttaatttattaattagttatatactatattgtaatttattattattttaaaatgatttttattttttaagtttttttaattactaccagtgaatcctgctgctaataatatttgtatttcaagactgacataaatattagaagtgggtgcactcctgctgctattaattattagagtaatttgcggcatacatatttaaatttaactctgagttgtaaataaatacttaagtttaatttttggcagtaataatacttaagttatattttaggaactctgtaggtacctaaccgttaaacgttaattattatatccacgtgtcattttcttattggtatattttaactaatttttttttaaataataaaaatttaatgacttggaccaatcaaggattaccacgtgacaatttatataaccaggtacctacaaaaattctaaaagtataacttaagtattattacagccaaaaattaaatttaggtatttatttgcaacttaggagttaaatttaagtatttataccgtaaattactctaattattattagcaacaaagaagaaatttaccactaataattattaaaagcggctagttattaacggcgggctattagatagtatgtcgagaatttcaaagatatttcatagtttcattcttccatgccatatatgaactgtgttgttgtgtttgtgattatggaagtttctcttttaatatgtttgatttgatttattaaaaaaaaaatagatatatatgtgattgatatgtttaaatatcttttactcttagcatatattatatgttaaatgttacatataatttttatttggctaagagcaaaaaaacaaaaaagaaaatagtaaaatcatagacaacgccgttgccggggatcgaacccgggtcacccgcgtgacaggcgggaatacttaccactatactacaacga

SEQ ID NO: 77592 - DNA, 867 bp, Cannabis sativa
  modified_base (765)..(771): a, c, t, g, unknown or other
  modified_base (835)..(835): a, c, t, g, unknown or other
acacaatattgatccaacagttaaggagtcggagggattgcattcattacacttcattagaactgaggctttttcattgtagaaatttaccttgatatgcgcgctgacatcaatcagtcgtcaccacgataccccaagtacacacattctcctaagatgcgtagaactcacaaaccaagaggacgaggacacacctacaatgctagctgtaatctaaaagtccccaactttccacattctaaagcatacaagatgaaatgatcttttcctttccaaagttttccacgtgtttaaggcaattcgaaagaaagactgcaagcttctaccactctcaagtcccgaaagcttagactgtaaatgttatcagtatttctggaagggtgacacgtgggatctctacagagtatgattaagcgagaatggcctaggtcaaagcctttccacgtaggaaggcccaatctagagggaggatgggcccgagcccatttgaagcccaaaagcctcacctcagaagacgaggctcctccagatctggaaggcttctagccttccaaaagatgtaataagtgaagacttctggatgagccttgggatgcacccacaggagaattccaagaggtgcctccgaaagccttttgaggggtgacgtggctgacctctgacgcctggtcccaccaatcagattttgtctcctatgttagaacatggtagtacgtgcacaccaaaaggaatacatccttttttgtgttggaatttattttaccnnnnnnntagatctactcacaagtatatttattaacatcctaaataagaactttctaaaacgataaattanacacatataaagtttaagaaacctaacattgg

SEQ ID NO: 77593 - DNA, 1543 bp, Cannabis sativa
gaaaattggtaaagtggtcatatatgaccaattttattaactttacatttaggggaaaaattattagataatttaagcatattaattcaaatttccctcttcaaattgataatagacaattgtacgatgactttaaggtttttttaaagcaaagaaaaggaattttattcacaaccaatcaccaaaccatacaagaactagctgacagcagcaaaagctcaaaaaaagctgattaaagaaacaacatcaccctccctttttctaaatctgccaaaattcacacccttaactttaactcttaacacattttaattaggaataatcatctaatccattataacatttttcttttcattcgtctaatttaattagtaatcagattcaaaaaattattatccaattcaattcaattacctcaaaatctaatccaatttaattcaattattaattagatttgatcaattttttaattagatatctaaatacctaaattttaatattaactaaaaatataaaaaaaaaatataaattaaatattactctttatataaatttaatactctataaatatatagtcgttataagtagaatgcaactaaaagtttgaaataattaaaacaataacattgctaagtaataaaatagaacaaaatatcatgaaaataaatatacaaaacaattaagcgttacaaatttaacacagaaaaaatctaataaaaatagaattaatatatattatttttttttattatataagttatcttttaatatataaatataattagattggatcgatctttaattaaattttgagattgacattcagtaaccaatctaattggttgaagttcaagtcgaaagttcacaatctctttctatgggcgaggaggcggcccttatcaagcccccacccgatcaatgaggatgctatcttggaactgtcggggccttgcaaaggactcgatagttcaagccctccggggctgggtgagaagatataggtcagagtgtatctttctcatggagaccaaagttcaaaaggatcgaatggtggaggtggctagaagtcttggttttacagggtatgcgtgtatccctgctattggtattgcaggtggcttttgttttttatggaatagggacattaatcttcaagttaagtgggttggagatgatattttccaagctatagttcatgatcaccaatccttgagtccctggaatatttttgcagcttatggaaccccatatagtcatctaaaagaggaattctggggtaatcttgatgttatcattaaaagttgtgatgaaccctgggttctcattggtgatctaaattgcatcagtgatccgatggagaaattggggggccgcaggacaagaggcacagactatagatggcttaatgaatttttattttctaatggaggcattgacttgagatataaaggaggcaattttacttggcacaacaacagattctctggaggtctagtcagagaaaggctcgattgggctattggttcgcctgaatgggtggtga

SEQ ID NO: 77594 - DNA, 1011 bp, Cannabis sativa
gtagaatcacccaataatttatatattaaaaaaaataaataattaaaaatctaaaaaaaaaatgaaaaataattaatatttttttcttttttcttcttcacctttcttcttcttcgttcccataaatcaaacccccaccccacgaacctcaacccaaaaattgaacccaaactccaacccagattttgaaccccaacaccaccactaccgcgaccacaaacaccaccaccaccacacccacccccaccgcccctcctcacctatcttttgaagcctcttctgtcgatgcccacttccatcaaatcaaagtccctaagttgtgaataatttaaatacaaaaatgttggtaatttttgttacctttgtagtcgattaggtcatctgagaagtgtgtgttcattgtcatcctctccggccatggcgaacagttctcaagcagtgatgggtgaggctacaattggaaatcgtgcacaatttttgagcttcaagtctggatcaaaagtgacgggttagtctcgattcagtcatggcagagtgtgggtgccaaggaattcgacgtttgagccgagttgtacagctgagggtatgaccatttttagcatgtatgggtcgagactagctctgaagatgggctaggattttgatggaagttggctgatgggaaaggattatgtttggttgctgagaaaattttggaaaatatgaggttttttcctagggcatcgaagaagaaggagaagcagaacgaagaagcagaaaaagaaattttttttctgattttttaaaatttttaaatatttttttttaattattaactaggggtgttcatcaaaccgcttaaaccgcccgcaccacaaaaaaaatgcggtttaaaattctttgtggtgcggtcgcggtttaaatttttcctaaaatgcgcggtacggtttgcagttttgaatttttaatatgcggttcaaaccgcaccacaccgcatattatgaagataccattttttatatttatttaggt

SEQ ID NO: 77595 - DNA, 545 bp, Cannabis sativa
actaagtctcagccaaatctctctattgatctcatctcatgtcttctacaactcagtctcactctaatctcttagtctcagtctcaggcccctaatcgtaagttaattcaatctcctccctctattttgctcttctcactctcttcttaacttgctctatgctcctctctcattttttttttatctcaggtgaggcattactgtttcgggctccttcattgtaggtggtgaacatggcccgttgaaaaaaatctattagtcagtctaacaaagcccgtttaaagcacgatttgggcccgggcccagtactattttttcgtgcccatgggccgggttgggcttgacctatggaaatatgggccagcacggcacgacacgacccataattctatacgggccagcacggcacgacctatatttttcgggctttttgaaaacgcgctgggctgggccgtgccagcacgaatttacagctctaggcgggctaggcccgtgcctagggaccacacctttcgggggctcaaaataaaaaaaaaattattagg

SEQ ID NO: 77596 - DNA, 3540 bp, Cannabis sativa
ttaactaataaattgttattaaaggtagttgtttttttttggtagtgtataagaattaggaacaatgatccgcctcaacatatatatgaataagaaatatagtacttcttttcaaaatcaaaaaaaaaaaaaaaaaaaaaagaaagaaatatagtactaaaattgtgatggataataattaaaattggccccatggtaatacatatgttatatgattgttgaaaaataaatttgtctgctaagtttaataattgagtaacatgatattatacaaacaatacaaaaacaaaaatgaaaaacctatgttgcaaataatatatataaaaatatatttagtaaaactttctaattgcagtactcttaaattggtaggtggagtttagttagaggtaatgaaatgaaatggaaagaaaataatatttaatttattttttgtttggttatattttaaaatattagaatgatttttctattattttatggaatgactattacattttgaaatgacatgaatgattatttcaatgtaatatgagaaattttttaataattttttatcaatttttttaatgcattttaaatttaattttattcctttcaatcaaacgagatcttaattaattactacatcagactatataaattaacaaggtgggatgtacgaccatacaagaatacatttttatgttattaatctagtgttattttttactgtttcttctaagtgcggactaatcaaaattaaagtataatttaatcaaagttattgatttatagaatattaattatcgagattattatactatatatacatgtaaagaagtttatcaatacaagactatcagctaaaaaacttgcaaaacttggccatacctttgagctctaggcctttatttatagagaaatgttttacagagatagtagtagaaaggaaaagagatagagagggttgttagttgttacaacaaactgactataactaactctcaacagtaaaaatggaaactgaaaaataacaaaattagttattcattatcgatcatgccctcaagtgaaagggtctagaatacacctttagtttagacttgagataagtaaatctctcatcagctacttggtcaatagaaggaacatatttaacttcaatttgtttagccaaaatttgatcacgaactttaaagtgaaaattgatttcaatttgcttagactatgcgtggaactctggattagctgctagatcacccaagttattggagcagtaggtagcttgacatgaagttcagaaagaactgaagtgatctatttgatttctgtagcagaattagttagaacacgaaactcactttcagtactcaattaagctacaacttgttgtttacaagctgaccaaaatattatatttcctccaaaaaaaaatattcctatctatcaaggcaactgtcacaatttgttctatgattattatgatcatttagtggttttttgtcattaccatcaatttttttttttttgaatgttataagatttatgtaatgttaccccataaaaaataaagatttatgtataaatgtacctcagttaactttccgaccccgtcgtagcaaattttttaagctcgaaagacataattaggcttggaaaaccttatttattaagttgtttaattaaatacacattcaagacagatcatgacaagtagtgggatgaatacaaaatacaaataatcaattgcgaccaaaacacaattatatatattctaattagtgcagagatcgatcagtacttgccgacctgtattattttaattaattaatcagttcttttaattaaggatatcttaattaatcctccacctcaagaaagacaatgtgaataatgatatattattattgaactagaccgtttatcatttgtcaaatgtacctaacaagaaagaatatagattaacttaaatgtaaataaatttgcacaatgaaggaaaccggcctatgtataattttactattacttctgtaagaaaaaataaatatccacccttttgaattactcgacaaaaggaagaggaaataataacaagaggaaacttttaaaatgtaaaagaaagtaacatgtgtgtgttaggttcattactgaataattccaaattaaattaaaacatcaaacatggcccctctgttttttatttcttaggattcttgtacatcgatcgttatcaatagtaaccggccaaattgcatgatttgataattaaaaccacttaaataagatgaacacatcaccaaacacaagccaccccccttattattcttttgtgtatacttacataaacatagtatatggctaaaataagcctcaaccactcattttggttttaatttatgaattttcaacttcgccatgtttggtcggttaccttttgtggggccaaaaccaaaagttgaaatcatgcggaatcacttttcttactttctttctttctttattggctaagaatggcccaccaaacacaccatcaacaccactctaatctgtctctttggttactatgtagattggtcacatggtggaaatggatcagtgaatataattgatgagcttctggacatttctattatattaaagcatcctaatattgcaattgacagctagctatcaatgactatactgccaaaattaacttaactccatctccgtggatacatcccaactttcctaattcagatattcccttttcatatctcttttaaaataataaactagtgtatattacttctccactcctctgctatatagtatataccccttattatattataaattaatacactcttctactaatttaactcatccatcaatataactattttaatatttttgtagtcttagtcatacatgataatttaacgtgcattagataatgtctaagctgtttgttatatcctatttttatgtagagtttttctctaatttgttattagggactgtattatataatctgatttattcctacaaacaccactttatacatacctgtttatccaaataagaatatacaataaaatttaaaacctaccccactcccactcccactccatatgattaaataatatacattatataatattgtagttgctcgctactactataaatacgtgagacagaaataagcatttcagtgctatctgaaaagctttaattctttctcaatttccatctttattattgttcattaataattaagaattaattaatatggccagaattgccttcggacgttgtgatgattctttcagcttggcctccatcaaggcctatattgctgagttcatctccaccttgctttttgttttcgctggcgttggttcagccattgctttcagttagtacttcttcaatatacatatcttctcattaattacttgtatcacaccaaaacccatatgaaaatattttctttttctttatatagctagatcaatcatataaatactacttattttggaaaagttaaaactcatcaacttaataaaataatcaact

SEQ ID NO: 77597 - DNA, 1703 bp, Cannabis sativa
ttttctcatttatctctagatgataatcttgatgcttttaatcaaattattataggcctggccaacatgaattatgcagttgatgaggaaagccaagatgtcattctccttcaatctttgccagctgcataccaggaacttaatgctgtgatcaagtatggaagggatattcttacccttgatgatgttctgggagcactgaaatccaaagaacagcagatggccaaggagaaacataaggtcaaagatgaagcttacctggcttgaggaagagacaatacgaagggaagggatcaccacaagagagatcaatccaaggaccatcatagattttagtcaagatcaaaatcgagagggaaatatcacaaagaaagaaagtgctacttttgtgggaaagttggacactttagcaaattctatgttgagtttaagaataaactcaaagaagataaggaaaagaagcatgattctgcttcaaatgtagaagacacatatcattgttcatctggtggaaacttatatatggtttcagatcaaagaatcactgaagaatggattcttaattctcgatgcacacaccatatgtgtcctacccttgaaaactttattcattacaaaaaagttaattctggtcaagtactaatgggaaatgataattcatgtagagtaattggcatttgaaaggtgaccttcaagcactatgatggtactattcgaatgctgcatgatatgagacatatactagaaccgagaagaaacctggtttcattaggaacccttgaagattaaggatatagctacaaatcaagcaatggctagatgaggatagctaaaggatctctcaccatcatgaaaggttaaaataagaatagcttatacatgttacaagaagaaacagtagtggcttcagaagccagtattactcaacatcaagaatctgaaatggaaatatggcacaaaaggatgtgtcatatgagtgggcaaggaatcaaagaattgacaaagcaagggctcctaggaaatttcaaaccaaatacactaccattctatggagcatgtgtgttggggaagcatcacagattgaagttcatggctacacacacagttcaaagagaccattggagtatgttcatgttgttctgtggggctctcacaaagttggaacacactcaagtaaacactatctattgtagatgattttagtaggcatgtatgggtttaaaccatgaatgaatgcttagaaagatccgaagaatggaaatctaaggtggaaaactagtatgataagaaactaaaagtacttagagcagataatggcttagagtttattaacattgaatttggtttgctctattctgagtatggaattgttagacatagaattgtaaagcacacacctcagtaaaatggtattgcttagaaaatatgttggattttattaaataaagtgagacgcttgctgattagttctagttaagggaaaatctattggaaggaagctcttgttactgcatgttacttgattaataggagccctagtagagtcattggcctgaaaactctctatgaaatgttgcatggcaccactccaaaattgaatcaattaagaatatttggttgcattgcctatgctcatcataagtttaataaattagaacctaaggccactaaatgtttcattcttggatatcctaaaggtgtta

SEQ ID NO: 77598 - DNA, 862 bp, Cannabis sativa
ccttacaagttaatttcagaacgcatgaaaaattgattgggagactttgtaattgaaattgttttgtgagaataatgataatcataaagaatatacaacagaaaaatgaaaaataaaattaataatctgttctcggataaaatggttcaaattcactgggtgtgaagcttgataaaatgtctgttggtactgtattttttttcctacccttttgtttaaataaaatgcaaaaatctatgtgggtgcgaagcttgattatttagtttagaaattgagatttaagaaaatattattaattaagttaagaatcttttagtggagcaagtcctataaattatattttttttgtgtaaattatttatgaaatttgaaattttgcatagcttgagttatagctcaaaagaatttctaataagtttgatatatttatcttctaactttgtaatcttgatcagtccaaaatattcattataagaccatatttctttataattaattataatttggtctcacttttttgtgctatttttatcataaatatttagattagaatgtgtatgatgtattgttttgtagatcattacttgtggagaatgaagaggaaaatgtggatgataaagtgcaaaaatagattaagtctgtagagactaaagaaaaaaagaaggctaaaattaagaaaccgcagaaaaagaagaggcaagggacaagaatgtcaggcatttgggatcattttactatagttaaaaaaaatggtaaaagaagcaaatggtaaggaagaagagagggagatagcacaatgtaagtattgtgaagctgattgtgcagctgattccaagaattgtgggactagtactctgtggag

SEQ ID NO: 77599 - DNA, 1208 bp, Cannabis sativa
acacaattgaagaggacttaaatgaattaattggtacctaaaagtatatatatatatatatatattataattatacacaagatactaactccatacttatccttattttattagaagtacaaataaaatgtgttatatgatacatgctagttttttagtagaacatctaaaaaagatttataggtggaacacttagtctattatgacattattaatgatatgtcaattatcataataaaatattttttatcgttagacattgttaatgtgtgaaaataaattatcatatgtaagatgaatagacaactactttcattgtcaattaattttaagatgaaacttcatacatcttatctcaaattctaaaagtaatctttttatcctttgaatgaacgaatttatatcatgtttattttggaaaataattaaaatttgtaactttttttttaaaaaaaaatataaatttgtattagcatagagtaaatgatgtgtacacttaaatgctatgtattaatattttcaatcacattagtaatttttttcaaaccaattatatttattttaaatatgaattgtgaaatgttttgttggatatgaatattaagccagtttgtatggtatgagaaaaattataaattaaaaaaaccccacaaatattaataaattaaaataaacttggaaagttgcaacaaaataatagaaattacaaaaacaaactttgcgattaaagaccaaaaagaaaagcctaaatttcctagtacaaatacaaactatgtaagagaaagcctcacctacaggcttagttgttcacttgttctttattagacaaaccaaattacaccatttactgcataacccttattaacaaaagagaataatccaaaaagattaagagcactaatcttcttctttttttttttttgaaaaaaaaaaatccaacaaatccagctcatgcatgccaattcaacctgctcattaacctaaaatagaaggaagaatattgttaattacacaatattaaaagtcaagtaatgcaaatctcatttatgaaaatatacaaaaaataaataaataaataaataaataaaaaataaagatacactatacattataatagtttttgcactttatataaaatgacaaaaatgtcttgggcctttgctgtaagtaagggcccgcactaaatatggataagttgataaatatca

SEQ ID NO: 77600 - DNA, 865 bp, Cannabis sativa
  modified_base (65)..(65): a, c, t, g, unknown or other
tatatcatcattcaataactataataatgagtgataataaatcaaataatcaaatacttaccatntatatattgtataataaattgaaaataattttcttcataattgataaaatctatgattatatgaaaataaattattatgcacatatattgtaataaaattatataatgtatacattagtgtaaattgtccttatttgtttaacaatgtaattagaatgtaattacaccctccaagtcttatgggccacgtgaaaattaagtgtctttaatttaaaatagaatataattataattaacttaactgaataattacacaattcagttaactgaataattaacttaactgaataattacaccctccaaatatacgttaacttttaaaacactctatcaatacaattaagtatttttatatatgttgaccccaccttttaaattttcaaaagcataaaattgttttgaaatgcaaaatcaagtcctataaaactatatggttgtattgtgttgtgtgcacttaatttaaaaaataaaataaaaagaatggagcactactcctcctcctcctcgtttggccgaatcattacatttgtagttgtgttggtggttttacaaggcggcagggcgaaaggtgggacaaagctaaggaagaacgagagcatcttagcaattcaggcgtttggagactcatttcttgatacaggcaataacaaccatcttatctccataaccaaatgtgattttcctccttacggaagagatttccttggtggaaaacccactggaagattcaccgatggaaaagttttctccgacctctttggtatattaatctcaacatgcatttgtttttaattctaat

SEQ ID NO: 77601 - DNA, 541 bp, Cannabis sativa
  modified_base (514)..(516): a, c, t, g, unknown or other
aaatgagaattatttgagaaaatattgtaaattatgttgttatttgagcctaaattaacatttcaccctagccttagtttataagcttgtaaagtcatattgatctttagattgtgtgtaattacattagtagagaatggtttgttagttaagcttatggagtgaatttttattgaaatacacagttcttttgagatgagcattagttgttggcatgcatgtgtatcaatttgaaatgttagtaatatgatgagttgattgaatacacacacaaaataaaattgagtttgaaaagtaattatcttgagttgaaatcctaatgattgaagagtttaaattttcttggaattataaagggatgtacaatttttgaaactaaaattatttttcataaagaccaatttgcttatataagtatcattaattataattaacttactcgaggacgagcaaaagtcaagtgtggaggaatttaataagtcaatattttatcttattgttgaccgaggttttnnncaactattaaaatataattataata

SEQ ID NO: 77602 - DNA, 522 bp, Cannabis sativa
gggttaagctcaatatgtggagagtcgtggtgtgtggggggagactttaatgtgaccagaagagtaggagagaaattaaacagcagctcgtgtactaggagtatgaagctttttgatggcttgatacgggaattacagttgatccgatcctaagcttgagaacggaagttttacttggtcgaatttcagagcatcccctgtatgcagcaggttggacagatttctcttctcaaacaattggaatgtcatttatccgtttgtgagacaagaaatgttggtaaggttagtttcggaccatagccctgttgtgatcgattcaaatcctccaaagtggggacccggacctttcaggtttgataaccattggctagaacataagtcgttctcaaagtgttttgaaagttggtggaaggaggaaatcaatgatgggtggccaggcacaaagtttatgaagaaactaaaactactccaagggaaggtgaaggagtggagcaaatccacttttggacaaaataaggccac

SEQ ID NO: 77603 - DNA, 810 bp, Cannabis sativa
ttatatgaaaaatatagggtatactactgaactcaaccaataaaaatttcttatttttttattataatttagagattttttttattagaaaatttgataaatatctttaaaaaaaatgataaataggttagactaatgatcagaaataaatacataataaaattagaaaattcaatattgttaatgctaataacaaaaataaaaaaaaaaacatgttcattggttaactttttgattatggatttataaaacatgcttttgatgagcgtgagtacatttttttttttttctgtactccctaatctcaagaccatgtgaagtaatgcaatatatatatggaatactttttaatgggtattatccattaacgtaataaacaagtttaactataaatattaattttaaaaatattaagaaataattacataatgcactattttttgtaaaatatttacatttttacgttcaaagaatatttttttatatttttacagttttccaagaaataacacgaaaacaatataaaatcaacaagaaactacataaaactaacatcaaaataacaacaaaaaataacatacatattaggggtgttcacggtgcaggtggtgcggtttttaaccattttttcaaaccagcccgcatatgcggttttttcaattttctaaactgcacctgcaccgcgatactaaaaaactgcaaaaactgcaccgcaaaaaatgatgcagtgcggtgttgtttttggggtttgaactatcacaattttttttttgaaatcatcataaaataattaaactatcattaatataa

SEQ ID NO: 77604 - DNA, 519 bp, Cannabis sativa
tataaaatgcggtcattacaattaaagaccggttctaaagaatactacactagataaaagagcattacccgcttgatttagcctctaaaaggagcagttagtaaaatagcattctttgagaacccatccatcattgattgagggttgttgatgattttccacccttacttcgctagtaaggcttggttaaacttatagagatccttaaagcacataccccccgtagccttggatttacaaagacgattccactttccctcaataaattttttactttttttcaacgactcctaccaaaatctcgcaatcatggactgaatatcttgaattagctctttggatagccaaaaacaactcattacatatcacaagatagcttgaatgtcagccttaagaagaattttgcgacctacttgagaaaataactgagcattcccccttgaagcttatttctaaccttggcttgaatagattcaaagacctcttttttgtgccttcccacataagagggtaagccaa

SEQ ID NO: 77605 - DNA, 1768 bp, Cannabis sativa
tgacttgtttttaaaaacttcaaaaactattttttgttttcatttctaaaaacaattttttgaaaacaaaaaacaaaaaataataccaaacatgctctaaagttgagttatttgaattaattatggcatcttgtaggatactacaatacaatgttgttctaagtggaaattaaaaaaaaattaaagcttcttacttaggagagtgttcgttcatgagcccatgctaaagtttcaatcaattcctgccaatatccacgccaggagattaagaacataaattcaataccccaaacaagatgtccaaataagaatattcacgcccagatcgataaactattcatctccaagcgattatatccgttgataagttgtgaccttgtctaagttccaaaccgcaacacctttacatgccacaacaagtttggacttaatcccaccttttagtcattaattgtgttaacaacgacatccagtggaaaatcaaaagaaaattacagcttcttaggactttgacaatcaaagattagattatttagtctaattattagccctgctacttccatctatgattgattccttttgttgttggttatgtactagccatgtctaaaatctgtaaatatacaaaaatgtgcttgttgcttttggacatcggtagttagaacttgagcattagactccctctatgtctctctcttatatgcctacatgagtttaaattgcaacaaattgttagcgaaacttaatctgttttatccataataagcacgaacactgcgtgatatggagttaatattcttgtgctgtaatatgctgtgatttcattctgaaatttacaagttccatgcagaagattgtaatgattcacaatagtattgaaagaaatcaactgtgtattgattgaatgaaagagtttacaattttagcttatatacagatattttggtgacaagaagtaacttgtaaccaactctaacaaataactaaaaagtagtaatctgttattaacggattcctttattatttctaataaacaaagagatgattttttttttccaattttttttgtagggaaatgaagatggaagaggaaagaatcgaagctgagaaaaagcgggtaataaatcaagcatgtcactcaaatttctctcatttgcgttatcttttgaatcaatcattggctagtctccaactgttatcttatgctaaagtcattatcattctcattttgaatgaatggtatcttctggatcattctgtttatgttgtttttcatccgtgtaggtaaaagaagaggcagagcagttggcgcttattttcgaaactgttggagctttcaaggtgaagcgcaaaggtggaaaaggaaagcaaatattcggaacgtaagttgaatccatggaataattttacatttttcttcataatatcttgtttttgttgatgacattgacctgttttcacagtgttactgctcaagatcttgtggatatcatcaaagctcaacttcaaaggtattattaattattattattatcttaattgtttctagaattatgatctaaatttattataatgtatgcattacaagctaatcaagcttgtcttcactgcaatctttgttgttgccggttatagggacgtggacaagcgactcgttgctcttccagagattcgggaaacaggagagtacgttgcagaattgaagcttcatcccgaagtcactgctcgagtgagggtgactgttttcgcaaactaaaaggatttgtag

SEQ ID NO: 77606 - DNA, 555 bp, Cannabis sativa
ctcattgttcgggtattggtcactcagctgctgaatgtaagagatctgcacaggccaaacaacaatggattgttaaaaaggataataggaagaccacagatattgatgaagatggatttattagagtatcaaatgggaagaaagttgatattcctgaaaaaacaaaggaggtcccagcagtaaaaacaaccaatccttttcaagctctcagtctggaacatcagatgggaaataggggggattttgaaataagtctacctcaagccgaatgggggattatggatgacacaagagggggggggagagccctctctttccaatggataaaatactctgttggaatgtccgaggagctaacaatcaatctaaacaacaatcaataaagcaatttattaattctcaaaaggttgattttgttggtctcctcgagacaagggtaaaggccccaaaacttggagccttgtactcgaatgtgttcgatggatggtgtttctcttccaacattgcatggcatccaggaggtaagattactattgcttggaaccctcatagatt

SEQ ID NO: 77607 - DNA, 696 bp, Cannabis sativa
gatgaatttataaatcaaataaagaaataaatgatcacatgaaccaaataacacattaaataagtaatgaaaataaatctatttttttattgataaatgatagaaaattgcaagcttaaagcgtggtctgcattttttttatgcaagagttgtctgtgtgcgtctgtgctccacgaagaaggagggtctatgctccacgaagaagaagaaaaatgggtggtggtggaaggtgaagaaggaacaaagagcttctgaaaaaaataaagaaccaaatcgtaagtctttgctcccatgaagaagagaaaggagaaaaaacaaataaaaatgaaaaatgttaaagttttgatatattttttaataaattatttattattttaatcattgtaatttattttaattaaaattatgatttagactaataaatttttaatatgtggcactattttaagcacttaagagtacatgtttcctgttattctaatggagtggggtatcaacgtgctcacaaatttgtcgatcttatgtatttttactgctaatttgtgaggttgatgacgaattttgcatcaattttaagttttttgagacttggttgaatgaattttatatactgtcataaaatgtctaaattcaccaactttttcaaaaaatataaattgaaaaggagaatggttaatttgtttctttttttttttt

SEQ ID NO: 77608 - DNA, 2648 bp, Cannabis sativa
caaaacagaaggtccaatcaataacttttataaaacacaaagtacaaaataatatttacccatataattaataaatatagatgtgatttttaataattttattaaatcaatgaccaaaactcaagattttcttactaataaaaaactaaaagaaaatcaaatatattcaattgtgactcaaagttaagctactcaagttatgattcatgtcaacatctttttttcccctctcaaaatttgattaattaatggtgtaatttattaattaacacatagaaacaaaagtcaagtaattaagataaaaacaacttttatttataatgtgtacttactactatgcatgcacgtgatattgaatatgaggtgtcatcatttttttagtttattaggtatacttctttgtcttatgttattaacactcattacttttaacattaattaatggataatactccactcaaattcacctaacaccaattaatatttaatagtagtgttatgagagtgaaataatattaataattaagattgtatttaaaagtgtgttgggatcgaatccttttgtgtacctcttcttttttgcaatttctccttttgaagatgcacaccttaatgattaattaagattgaaatgatatcatcactctctcacaatttttaatttaaagctagaaatgaaattattatatatggtctaaaatttaaaaagggccactcaagtttttatggagtttggagcaaaaattttaaaatagtttttttattgtgagttccaatcaattgatttttcttaagaaacaaatatattttgttgtcaaaccattgtggacttaactactaatcatagtggaccttatagactaatgtaaaacaataaggggaatttttatttttttagtttttaagttataagagtatttctaaccgtattgttgtggttgctccaactatactgtttactatagttagtatttgattaatttaataatattttataatttaaatatatcaaatataaattaattttataaaataataaaaaaataattttacttttaattaaaatattattaaaaaatttagcaaaagagtatagagctccctatatttagagagttttctattcattctctattataaagagtcttttttgtatggttgaaccttatctttttaaatctcattctctattttagttaaaatgtgtgtttaaagagtatagttggagaatagatattctaaatttttaaaaatttaatattttgagaaaattttaaaaaaaagttaaaaaatataagaaaaacagtagaagacaattaattatccttctcgttattctaagggtacctggttacctttatttgatttcccatattttacactttttttcttgaatttttctcataatatctttgaaaaagaaaaacatattgatgcataaatagtacaaaaacttataaaatttgtatttttttttaaagaaaaaaaataataagaatttagaaggtctcttgaattgaggagccttagagaatatgggattgtagctctctttaaatgtttagtttttatagattttcatatatattaattatgtaaagaaaattatatacaattatcttcaatttgcccatatttgattacttaaaacatataaattttattgtaatgacaatctatctttccacaaatacaatgcgtgtacgaaaactcagctttggtggttggaaagttacgaatggcatgttgtacaaaaaatagattaagttaatttagaaagattataaaaagctggtagagttgtaattaagatgtaaaaattaataataatagaaaaaaaaaaagactttttgaatagagttgtaaaaacgtaaaaaataaataaataaaataagcattcctgaaaacatacattataaaaatgaaaacttccatataattgggccatatttaatgggctagggcccatagtagagggccgaagaatgagaccagaagcaaaacagtgtgtgatggagaagcaaaaaacaaaagggaaattatagggattattgaaaataaatatgaaaaaaaataaagttttaataatacaataattagtaggctttaggttggacattcatatattgaatctaactaaatataaaaattgatatttttataatgtgcggtggagtgtggtttgaaccgcatattaataattcaaaatcgtaaaccgcactacaccgcgcggtttaagaaaaattcaaatcgcgaccgcactgcaaagaatttcaaactacatttttttttgcggtgcggtgtagtacgggtggtttgaatggtttgaacaatttgatgaacacccctagaagaagtacatgtaaatatgaaataaaatattgttatatgaattttatatttacaattttctttttagattcatccctatggtctcaagtttcatttgaaaaattctttaagaattagagcaaaagttagataggattatcataagcacttttattaaatctcaattttttttcttttttaacaataatgaaatctatttgaataatttaaaagtattaatgagttagtatcaaggttgttaggattaatttagagctaattaagttgttaggtgtgtgtgagccgcctttgagttt

SEQ ID NO: 77609 - DNA, 616 bp, Cannabis sativa
agttgtcatatgaactgagttattatttgctatgtcagagtgttgatggttattaaagtacagctgtactgttttctgtttctttttttagattcgatttcggcctggattttctttttttttttagggaaattagatattattcttttttttatatataaataaaattagatatttttttttgaaaaagataaaattagatattattcgataatgtttttttagctggaaatttttttgtctcggttattttattaggaaaattaaatgtatattttttcgtatgaggataattaaatatattattctttgggtattttagtttttttaggaaaattaactatttaaattatgttttaaccatttatataattatattgattaatactatatttaattttttttttaattactctatatactaattgttatttttttaaaaatttacagtttgaagtattttttaacatctttaattagtaaatttcactaaatttatgtgttattttacaaatttaagtttttagcagttaaactctcttaactattatttcgtacttaactctctaaattcaaatttcgacagtaaaattttctaaactattgaattattagt

SEQ ID NO: 77610 - DNA, 730 bp, Cannabis sativa
taaaaataatttttaaataataatattagatatactaatataaacgtatcatgtgtacaaaaacatatatataagtagtctgatatttattcggatgatactttaaatttactaccactttaatagtttaaaagattttactattaaaatttgaatttagaaaattaaatacaaataaaacgacagttaaaaaaatttacccgccaaaaactcttctataaaatgtttgaaaaattataatttgggagtgtttgaaagtgttattaggttacatagttatactttataaattccactctattttattgaatttatttattatttttttctcatattttaatctttgattattttttattcccatttttttaatttatatatatgccatataaaatcatttcaaaaaaaaaatgattttgagtatttggtattttcattgggctttaggcttttttcaacatttgggctttaagtcgattgataaggcccatattaactcatcatcaacgtttagtactactacaacgtgtaacgtggctttctattcttctaacacgacatcgttttgctactttcccccctaacttcccttcatttcctaactaattatcactctctctaggttttctttcctcctttcttttctgcaaaaatggcgaaaaatcttaaccgtatcttttcatcaaaatcgaatctatcgaccccgaaattgatttcccccttcgccaga

SEQ ID NO: 77611 - DNA, 868 bp, Cannabis sativa
gttgcacacccccactcctttaacgattgtaccctttgccatttttggaggggaaatccaatttcaattttatgttgagactaccgtttggtgggtttataagaggcatttccaaattcatttagaccttttaccagttcttcaactcttggagcttagaaaaaggaaaacttgttcttcaaattgtgcaagctttgcttccatccaaacgtcttccgcgaagaagttcaactctcaacacatcagtgtgtaaatcattttcttgattttccttatcctgtttttgcatgcatggtattactggaatatatatgcattttgttattgcttgcttgattctagggtttcttcaaatttattttgtgaaaagaaaagaaaaaataaacccaaatgtaagtgtgtaacaccctaacacctaaggacgccacgtatatgcttttgaaatataaatttgtaatagtagttaaaaatttaataaaatttgcgataataataaaaatttcattaaactaaaaccatagcaatgaacaagattacatcgctagaaatctatttcgtggatcccatgttacaaaagtttttacaaaagggctatatacaaaattagatcaaaatacacatcaagtgcaacagtaaacatctcttgacaactcgaccatacaagccagataagttgatatgtatatttgtcagagaagactgttatctcatggctaccttagttttcctttgcccttacttaaaccacaaagcacttatgagtcacaaagatttagtaaaaaaagtaaacataaatacatataattaaatagtaatacacaagtacttgtctaataagacaagccatatctgttactttataaagtaa

SEQ ID NO: 77612 - DNA, 858 bp, Cannabis sativa
  modified_base (801)..(804): a, c, t, g, unknown or other
ggtcggagtagaaaaggaggatgtgaaggaaggaaggaggtctagaaagagagaattaatcgagaagaaaaagtgagacccggatttagagattaggtcgtagagagttacagaagaaagaattggaaatgccaatcaagtattgtgccttggattggattggattggattggatttcatacctcttctaatattattcttcaatctcaaatttttcttcaaccccactttaaagagaatgtgcctttgaattgaggtggtgtttcgatacaagtaatgaaatgaaatcaaaatacatttttactattttaaagtatattatcttttttttactatttaatgaccattctattttaaaatagaaagaaaataattttaataattttgtgattaattgaaatttttacttttaaactttaatatgtataaaattatactctttgaatttttctagtcgtcaaaaattatcttattgagattgttagattaaaggatttttgtttaattttattcaatttgactatttcactgattgtttatttactaaatcatgttctctagacttttgatatctatcaaatcatgcctcatgaactttcatctatattaaatttttttactaaaattagacaaaaattcttaaatccaataatctcaataatttagggagtatttttaacgaagttcagaggacttgatttagtacatgtcaaaatttgggggtaaaatttataattagtctaattttttaacaaatttttatatgtatataattagtaatttttccccttgaactttgannnntactaaatcgtgcccctgaacttttttggtcgttaaaaattccccttgaactat

SEQ ID NO: 77613 - DNA, 1452 bp, Cannabis sativa
agaattggagtagagccatagatcacatcgatccatctgacttaaactagtatatatcttagtgttgttttttgttattttttgcctttattgttctttgatttttcctaccctgttatcctctatttttcataccattattatttatgatttggtaatcgtatatttgttaattatttatatgtgaaagtttcactaatttttgtttttgagaaagtgatttgaatcacaatatgacaaacgtcgacgcggaggaacttctagtcaacaagctaattttctagccaaagatatacaaagtcagaatatgagtcgctacaagcaaagcaatttatacaagaccaaattatctccaaaattaaaaactggagaccaccttcaagaggcatctgatataaacaatgaattggagcaaaactacctacaaaatgaatagatatagaaaagtagattagcacactttacaacgataatactgtaaatttttaaattaaggacaaaaaataaatattgttatgacgagagaacttatctttgaggtcttttttcactcagcatgtcaccattatatagaaactaatttgttatgtccaactattagagcaaagtcttccaatgatagaaatatactagtcaattaaacctgcaccatacataagatttgagagattaatcaaatttaataaatagatctcaactaaaattaactattttgctaaaaaagtaacaaactcaattattagctaacaaaattataaaaatgatgatataaaataaaagagaaaatttctcaaaattaataaatataaataaaagcaagatttaaaatttatttgtaaaaattagtaattcactctttgaggttgtattcaatatcaaacaagtaaacaacatactgtaaaatagccaaataatataacacaaaataaccaaataaaatagtacaaactagtcaaaaaactatggcacagactataaaaaaaatatgaaacaaactaacagtaataataaaaataaatgtaattaatcaatattaataaaacaatactaatataagataattaattaaaaatattaaattaaattaaatagtaggaaacaaacataaataattataaaattctaccataaataaaactctctgattttaaaaagaaaaaatagctcttaagacaattaaataatgagaaaggaaatttgtcataaacaaaggcattataaatttatcataattaattctaaatcatgaaaaataaaacataaatttaacctaaaaaattggataattaattataattaaattattaaaagataccaaaagataacaccgaaaatatatataatgtttaattaaagaatctttacaaaataaaacaaatatatagtataactacttaaggaaaaataaactaatcagtgttaattcttcactgttagtgataatttttccaa

SEQ ID NO: 77614 - DNA, 784 bp, Cannabis sativa
tcaaaaattaagctcagggttctattttgtcatttaacaaaacacaagatccaatcggtaacttttgtaaaatacaggatccaaaatattattaaccctaataataataattgatagtaataatcaagtgcatcatggagttgttaataatagttcaaaattaatcaaagcaaatacaaataataataataatattaattatcataacggtcatttttatgtatactgaggaatgtcatatagtctttgaaatgtaaatagttcaaaaattttgtgaaaataacctataaacttgtgactgacgaaataagtatggcatcatgcacagaaataattccaacttcccctccaatttatattgagctgtggggtttatattactatcaaaaactacaatctcccactatcttttttttttttttttcttttggaagatagaagatttagttataaaaaggaaaagtcaataagcatacattgaaaagaaactcttgcatctctcaccttaaacataaataactatccccattgacatagcaacactggtcacgttaacgtaacaaactacctaatattttcttgatttttttttacaccctgaaaaaaaagaacttgtgtagttgcttatctccaaggccccccataggcttatgcggtttagacccgtgcttaaggcccacttattttaagagctcaattaaaaaaatatcttttaaaatatatacatatttttttaataatttttaaaaataccatttatttttgggctatttacaaaaaatat

SEQ ID NO: 77615 - DNA, 522 bp, Cannabis sativa
taaagagtcatcgtttccagtattttccctcttccacgacttctctatgactttctcacaatccggtctcgaagtccagatttcaaagaatctaaataggtactttaacttactgtttctccccacaggtttaaaaaaattggcgcatgatccgagcccacaataggaaagttatggagacgagcctttgggaattccatacaccagtatgcgtcagcaatagccctgtccaatctcttttgaactctattgcaagcatttctagagtttttccaagtactaacaccaccatcatatcctagatccacgccacctgaattgaacaagaaatctctgagaaactcccttttgcacatcatgacttttttgcctccttccttctcgaaatcatcaaggataacattaagatctctcatcaaaacccaaggctctcgccactcagagatcttatccgaaagccattgcaaataagctcttttcaattcttgatacggggtaccatagacacaaaataaacaactt

SEQ ID NO: 77616 - DNA, 2253 bp, Cannabis sativa
  modified_base (2084)..(2091): a, c, t, g, unknown or other
  modified_base (2213)..(2216): a, c, t, g, unknown or other
ttaatttttgggtttaattattgggtttatttattaacggaagatcaaacctattaatgttaaatttgaatattctatttttaagtatataaagatatcctcatctaaatatacttgatcgcattattgaattgaaaaatatattagagaaaacacacaagcttgaatgaaatgaatgagttgatgatgatattcccaaatatactaaattaattaggaccaattaagttggatgcaaagttttgtatatttctcttttttcttatgatgtcaccattaaaacttgaaaacattgaattggatatattggatatataattatgccaaataattttcaatagaattaattataactagttatcatattaattaagaggattaaatccaatactacgtacgtctctaaacatgacctatatacatatttataacaagctctagtttgaaattgtattcataatcatgcatagactttcttttgactaaagcaatatactcaatcgatcccttaattaaataaatcaacatatatattattgaatatgtataagtaatgaatgccgttttcttgcaataatccaaggccaaaaatagaaatcttcgaaaggctagcttagccctttaggaatctctgtaattctaaatacatataatatatacattgtacatatataatacatatatatttatatatataaatcactggtactgacaaagttgagtattataaggtaggcaagaactatagaagtgagaaaccattaattatgtgtgacctccatcaatccaaaattatgatttgtaggaaggttttcatatagatagatctggagcaaagagacaaggggtgtcccagctttgtaagtagctaggttaagcatgatatatatgtacatgaaggaagatatatatatatgggtccacatgcatgtgtagtgggtaattaaaattgctaattaattagattttcaacattaattgtagggtttcaatcattgaggagactttcaagtaattaaatttggaatgtagcacaatgtatatttgtgcaactcgctagtgaatttagaaaaatcaagattttgaagcattattcaacctaccacttacaatatgttttttgctttgggatagtggcagcctttcaaaattattatgcccaaaatttcacagcaattttgtattacacataatgcattctctagctaggtttaaaattcccatatttgtatgtatatatactatatacacacatgcaacagcccctctatgttacattcataataagatttttttttttttgttgataaatgagtaagcttcaatattgcatatcagtaaacaatacaactcagaatagttgcagctcagaaacagtttaactaattgtgatcacaataaggatattaacaaacttaattaatatatgtatgtatataaatcctctatccttaatttcttcagttataaattattaaaaccaatggacacagacacataatctaacagtactgtgccctacccttcatgactcacaaagaaagagatctcaaattctaaacaatgtcaaaaacaaaaaaacaaaataaaagtgaaccaactaaaaattaacaaaagtcttcatacaattccaacaaccataataaaatataaatcacaagatacttttactctaaaaaaatgataaaaatatatggatgcaaatatgttgaaggtaagaattcgtcaatcaaacaattaaaaaaattaaaaataaagaaacaaacaatttaaagccaaaatattttagctaaagaattcagatatgatgaaatgatactcttctattgaaactgtaagtttttcttacaagtaattttcccatctctcttcaatcttccaaatgagctatttatacttattgaagctctaaaatatatgtggttcctgatgcatgtcgtttcctacaacaaatttattaatttttctttttttatattactaattatttaatgaaaaatacaggtcgatcccacaaaaactattatcatacaaaaaataactacttaattttagtgacaatttttagttacaatataaatttnnnnnnnntaaatgtgacttttagtcataaaaaatgttacttgttactaaacatgcatctcttttagttacaagttgtcactaattttgttttagtcacaataagtattgtgactaaaaacacatttagnnnnaacaaattgtaattttttttgactaatacatttagcc

SEQ ID NO: 77617 - DNA, 2398 bp, Cannabis sativa
  modified_base (2349)..(2349): a, c, t, g, unknown or other
tgatgattacggtgtcaaaaccgaagaaagccaatgtcagtagagaggttatgggagaaatatgactctggtattgggtctgctattctatcatagttgggcttgggtcttaggtttgttcattggatcgcatccaatatttttagacccatctaagtccaatccaattatacattggatgttggatttctcaaaccgatccaatccaatactataggctcaaccgaaccgaaccaaaccgatccaataaatcattgggttggattgattccatccaatggatgaatccctgtattggatcggatctatccaataattttgattcaatattttttagataatccaatccaatccttaaaagagtaaaacctgattttttaccttaacactaatatattggttcaaaatattacaacccaacataataatccaacctaaattggaacataggtccaacataaatctaacctaaattgtaacataaacccaacataaatccatcttaaattgtaacatgagtctaacatcaagttataataatacatattacataaataagagtgcacaaattatgaatatcataaaatacttcatcagtccaaactccaaagtgacaatgtcactcaattctgatatcactaattccagcaatatttttgaaaataaaaaaaatgataagtattctatagctaaaccaacgataccgagtcaaccacctatttcttcatattaattattctctacagggaataatattattgatctaactttcattctcaaagacattgtcaaattatgaagccaattttcaataggcagagtctgcatctaaggaatcctaaaccataaatctctctactttagataattaggatttcattggcaatcagtgtgtggtgaattatgcaatacacatgaaagatttcatacaaagaagttgtaatttactaaatccagaacagcaaaattaatgaaagaggtagaaaaaaacttcaaattcaatagtcgtagggctttaaaaataccgtacttgaattatcgtaactcagaaagattcgaacatgtccaaaagtggtgcgactcttcaaaaaatttaagaatcaaatgaattaaggggaatgttgaaagggttcttcgtaacctgatggagaggtctaatatgagctaaaggaagagactggatctttgaaacagagcaaggagaaggaaaaaaaagaaaaaagaaaaaagagaaacgtgaacgtgggtctcagagcttgataggaagaagaagaggattttgatccgtgtttacagcagaaaagcaaagttaggttctctctctctcaatctctctatctattcccctgctatggtaatggtatggcaacaaaaatgaaaatatcgactaaatctctccattcccaattgtatatataaaaatcataacatgtatttataaaaaaaaaactatcattatatatattttataaatttctttaaattaaaataaatattgatacaacatgtttagccctttctagttgactaaactctaatctcagcctattttaattaatagagttacaataatcacatcagagaacaatctacaaatgttatgctagataactttataactttatatatttatatatatggttggtgaaaccataataagatgaaagtgaaacaatggttaactgggtcaacaacaccacaagattagttttagttctagaacactctcatcatcattcggaggctataacaacaaaaacaatatcatcatgggacaattttcttggttttgatttctctaattttgggggaaatgagaatgcaaaagttctcctaatcaatttccaatctcattcttgttgtggaactcgaaaattgtacttctattcctaaaataaaatgcatatatacataatcatactctgaaaaatgaaaaataagagacctgagttgctgccgttagcgagggagaagatgtgtcttcgttggggagggaggagctgtgtcgctttcgtcgttggtgaagatgccgtcggcaacttagggaggagatgaccttcgtcgtcagcgagtaggggagaagatgtcgtcgtcttcgatcgtcggcgtctccgtcgtcgtccacgggggtctgagtctgatagtgattaggttaagagtccaatccaatgctaaagtaaaaccacacactttgcttgaataacagaaaatcaacttccataaaaccaacaaaaacataaattaacaaaacaaatatatttaagataaatactattttagaccttgtaattttttaaaagttacatattggaccctgtgttttattaaatgataaaatggaccctgtantttctaaaatagtaaaaataggatgctgagcttaatttttaacaacttt

SEQ ID NO: 77618 - DNA, 2090 bp, Cannabis sativa
  modified_base (1550)..(1551): a, c, t, g, unknown or other
gtaaatttttttaaaaaaattaaataatttataattaatttttattatattttcttatagtatgtaattattttaatatttattttctgtaaattattaaaaaaaaattaaaaaaatttataattaatcttaaataaatacaaaatacaccaaaaaaaaaaaacataaattttaaaaccattttttaattctaaaacaaatataaaatgtatcaaaacaatcttttcagggtgctccatacaattttcctaaatttttatctttaaacaataagtaatgggatttgtgttatttattaattgagcattataccagtcgtgcctaacaccttctcgacatgtcgcgttgcgattggctagcaatacttcctaaaagttattatattaaattatatgggacccgatacttagttagaccaatagtgatattgacacataaaaagatgttaggcaaacttttaacatttatcttattaattggatccataattataaaggaattaaaataataaaaatacaatggctgaaaaagacatatacaaaagtaaaaaaataaaaaatgaaaaggaatgaaaaggacatatcgaattaaataattagtaagacaatttgacccataagagtggaggagaaaacaaagtttgagaggggtattatgtcttttcatgttaaaggatgcacagctcaatgaaccacagaggtccaggagaaatcaataattgaaaattgggtcatttgtataataaggttacgcgtggctcttatggtcccccattccccaaaaaaagaatattaagtgttttatatttaataatattcctagtccgtgcgtgtcacttcctaattaagttacaaaaattaattaatcatcctctaaatttattaattgaataactctttaattattattattattcactgaaaaagttattgcttttttggcctattctctcccaaagagatggaagactaatatttttaatatttcttccttttatctctttttctattgaggatttgctgaggtgttagagaaggttgataaaatgtccattttagaccttatagtatctcctaatggagtattataatgtaggtccaagtttataaaattaaattctaataatagtgtataatattagcaaaatttagtataagttaaaaagtgtgcaaaatttaacataaaatattatatatttttattacatttttactacttattaatttaacggtagatgatacatgcaatacacttataattagttttctttttaaattatattttatttttaagccaataaaattaaaaatatgattaaaaatattttaaatttaaataaaatttccttatataaaatatctatctaatttttatttttaaataaatataataatattataaaattaataaagaatattaataatatatttggttaaagttaacataaaaaaactaaaaaatatcgctaaactaagaattttatgttaaaaatatggttaaatttatctaaaatattttaagtattttaaattaaattaaatttttttatnnaaaatatttacataatttttatttttaaatacatatataaatatataataatattataaaattaataaaaaaaaattatgttaagtaatagtatattatgttaaatttaacacagaaaattaaaaaaatagtattaaatcaaaaattctattatataacaaaaatttatatacaataaattagtaatattttatatttaatttatatatttagtagaatatttatatacttttaataaaactttaaataatttgttgatttctctaagttaattttacacctaaaatataaaagtacaattgtacaatttgaattaaatatcattaattcatttttttaaaagaaatttaaaccaaattttacaccaaattagaaaatgttttgattttattatgcttgaaagtcttgctattcacgtcaaatataatttgttttcttttctaaaaaaaaaaaaagtagtttttcaatttaatataaaataattagtaatttcgccccctgaacttttaacaatactgattttgccccttaaaatatac

SEQ ID NO: 77619 - DNA, 839 bp, Cannabis sativa
taaatatgtcttcatgcggatatctatatcacacataatagcctataaatactctcatcccttcactttatgatttcataacacttctactactttaatcttcacaatataagttatatagtagaaaagccttgttatatatattaatttgtacgtacgtgtactgattgaattctcatatcatcactaataatcatcatgtcttatcactgtttcaaaattggggtgtctgaattatgttttgtagtaataactgcatcactactcatgagtagtcccactgtcaatgcacaactctctcaaaccttctatgcatccacgtgtccattgtttgtgaccaccgtacgtcaagctatgaggcaagcagttcagaaggaacctcgcatggctgcctctattcttcgcttgttcttccacgactgctttgtaaatgtatatatatacatatatatatatatattgcatgttttattaatttaatttgtttttgtttttgttttacggttgtgtaaataaataataataataatatgatgattttgtgtacgtaggggtgtgatggatccatactattggatgacacggcgactttcacaggggaacaaaatgcttttccaaacaggaactcagtgagaggaatggatgtgatcgacgacatcaaagcaagagtggagagggtttgcagtaacactgtttcttgtgctgatattttagctcttgctgcaagagaaggagtcgtttcggtatatatattcacacatatataactattttcataacaaatttaatttgcctaacaattaaattaattaacaattattattagagttagtcatata

SEQ ID NO: 77620 - DNA, 592 bp, Cannabis sativa
aaagagaaattagttagattaagtgtaaagactggtctaatgtcgtggttgaatcggactatctagttgctgtgcaagccgtggctagctcagttttgatgtcctccacgtttggaatgctggtgcaaggttgaaaagtgttgttttcatctttaaataatacttctataaatttgttaagctatctattaataaagaagctcattaccagagctgtaaattcgtgctggcacggcccagcccggcccgttttcaaaaagcccgaaaagtatgggccgtgccgtgctggcccgtatagaattatgggtcgtgccgtgctggcccatatttccataggtcaagcccagccccgcccatgggcacgaaaaaatcgtgtcgggcccgggcccacatcgtgctttaaacgggctttgttagactgactaatagatttttttaacgggccatgttcaccacctacaatgaaggagcccgaaacagtaatgcctcacctgagataaaaaaaaaatgagagaggagcatagagcaagttaagaagagagtgagaagagcaaaatagatggagcaagttagactgactaatagatttttt

SEQ ID NO: 77621 - DNA, 1923 bp, Cannabis sativa
acaagagttttcttcaacttgtcataccaggatctaggtgcttgtctcaagccatagatcgatttcttcaacttacaaacatggccaggttttgatgtatcttcaaaacccggtggttgcatcatgtaaacatcttcctcaagggtgccattcaagaatgcgttattgatgtcgatttgccttatttcccaaccttttgtcacagccaaagtcaaaacaattctcacagttgaggcttttatcacagggctaaaagtctctttgaagtctactcctggcctctaatggaagcccttcgcaactaatctagctttgaacttttgaaagctaccatcatagttgtatttgattttaaacacccacttgcagccaacaattgagtgagcttcttctggtggaacaagaacccaggtaccattctttaaaagagcaacaatttctacactcatagccttatttcaccccttatgcctaagggcatcttcaaccgaatatggctcatgaagggacaaatcgaaattagcttgaccaagatacatttttggcttaaaaataccagcacgtgccctggttatcatgggatgttgtcgtggcacaacctgagtatgagtagctgcttcatcaacatactgtgtagattcattagttgtaccaacagtagtatcgggtgtgacattaacaagagaaccaggttctatatcaggaaaatttacctctgttggtgttgcagcagtgacagcagatggtggatcttcaaggtgtgcttgctgtcaaggctttgggacagtattcgatggtgtagttggtgaggcaaagggcagtacaaaccatgatggaggtgttttggagagtgactgtgctttctttttgataattgttcaagaaaccagacttgaaaggaaattcattttcgttgaacacaacatgcctagagatgtaaattctaccatgaggactcaagcacttataccctttatatgtttcactatagcctaggttcacacacttgactgagtgaaactcaaacttgtgtgtttgataagttcgaagacatggaaaacatgctgccccaaacaccttaagaaagttatagtcaaggactttagcaaataggacttcatgtggtgactgccctgacagaactgaggttggtaacctattaattaaatagacagcagtatagaaagcatcagaccaatattttaatggcatatgtgcttgtgcaaggagggttagacccatttcaactatgtgcctgtgttttctttcggctcgaccattttgagtcgaactgtgaggacaagaatgctgaaaaacaattccattttcagtcactaaatcgacaaaggcttcatactcaccaccccaatcagttcttatggctttgattttctttacaaattaataccatatttttgaaatgtttgaaagcagccagagcatcagatttgtattttaatgggtaaagccatgtgtatctactataatcatctataaaatgaatataaaacttgaagttagtgtgagatgcgattggggcaggcccccacaaatcagtgtgtataagatctaacacagaagaagctctagagttagaatttttaaggggtagagcatgtgactttccaaattgacaagcatcacaaaacaaaatactttcttcatagatgattttacattagtagacttcaagacttgactcaaaacaacactagaggggtggccaagtcttctatgccagagatctgacatagaagtaggcttactggttttattggactcgatattggaagtagcagaaaaagagtaaagagggcagtgactggttttacttcttgcacgactggttttgggaacagtggaagtgtttagttggtacaagccatctttaagcactccttgaagaaccaccctctttgtcac

SEQ ID NO: 77622 - DNA, 826 bp, Cannabis sativa
tacttgaaattaatgagcatttttttactacttaataaatgattttatttaaatttgcatctcaccaactatttatgcatatgtattttttttttttttttggttaaagaacaagcattattaataataataataataataaaatataagcctattgtgtcatatttatcgggccaactcacgtgtcaacaatgtgcaaattgtcagaaggagaggacccctagtccctagacctaacattttggaaaaaattgaggaaaaaaaaactcttattttttctttattattattattttatttttattttttcatatttatttataaaattattagttaattaaaattttgttttgaatttttatatatattaaattatattcttaaatttttttcattaaaaattctcttaaattattaagattattaaatttaaaaattttacttatttttatttaattttattaatttagtgattgtttatgtactaaattatactattcagactttaatatatgttaaatcaagttttttaaactttaacatatattaaattatgttccttaaattttgattaatgttaaaactttctttactaaaattaaataaaagtctttaaatttaaaaatctcaataatttatgaaaaaaaaaattaacgaccttaaaaatttaaaaagatttgagatacatgttaaaatttaagagacaaaaattttaattagtttaatttaactttggatgaagagctgctataagcattgacgacaacaaaaacgcaggtttctatataaacatatagtctaagtaagagtaagacattataattaa

SEQ ID NO: 77623 - DNA, 543 bp, Cannabis sativa
caaactacccggaaatccctaggcaggccgcgacactccctaggcatgccgcatcacctaggttgaaaaacccaggatttcaagtgtggggctgcgatgctcatagagcgggccgcgacacctgggttccaaacccagaaaataccaattttaaacaactcataaatcaagccaataacatcttaaactcaagtgaaacatgcctaaagctcaacttaataatttactaactatagccatcaataacagtagattagaacacaaaaatcaaactttgatcaagattaatatatgcaatttacacaactcatcaagcatcattactagtagcaatcctaaaccaaaacccacatcaaacttccacttttcaagcttggaaacaatattaaacagaatcaaattcaaattcaagcacaaatcacatctctaaaatctcttccaagcataccaagagcaatacacactattctaccaacataatcattcataatacacacaattcatcaaatcctcacatacatgcaccaacaagctatgaacatc

SEQ ID NO: 77624 - DNA, 834 bp, Cannabis sativa
tgttagtttcacagggcttgatgataatgtctcccctccaactgaatcaaatccacaagccaatgttgcctttctgcagctcctcctgatgatggctggtatcttgatagtggggcatctaatcatgtgacaccagatgccactaatcttctgcagagaacatcttacaaaggcaaagaaaagatggtattaggtaatggttctaaacttcatatttctaacattggtcatagttcattcactgttgatagagttctttatctaaaaaatattttacatgtgcctgccatttccaagaaccttattagcatttctcaattaccaaggacaatgatgtaaccatttaatttacacctaatctttgttttgtcaaggacaaggattcgaagaagcatcttcttcagggcactcttaaagatggcctataccacctccaaaatcagcctactgtccaaaatgcttcttgcagatccaagccttccccttcagctcaagtcttcatgacacagccgagtgctactagctctcattcaaatgcttgtaataaagatttctctgttgtaaatctttggcataaaagacttggccaccctaataaacatcttttgaataaaattcttagtcatttgtacatttccaattccaccattgatttttgtaatgcttgtcaacttggcaaattacaccaattcactgttcattcttctgcaaatatggctaaagcaccctttgatatagtccatacagacctatcggggccatctcatgagccctcaacagaagggtacaagtattatgtacattttcttgatgagtttacaagatatacatggg

SEQ ID NO: 77625 - DNA, 1109 bp, Cannabis sativa
  modified_base (377)..(388): a, c, t, g, unknown or other
  modified_base (521)..(522): a, c, t, g, unknown or other
ttatacaaatacaagagccaaataagaaaaaagaaaactaagaaaaaaggaatgttgattacaattaatggtaataaataaaaaatttggacatccacataattgttaatatttataacagctatctcattttaaagcacattattaaatttaattttagttttattattcattcaagttaaagtaatgttgaaattataagtataaaaagtaatgatagctatattattatcgacctacaaagttgactacagtttatatattaaaataaggctaattaagatttttgtcccaaaactttaacatgtaccaaatcatgccccttgaactttaagtttgttaaaaataccctcttaactattgagattgttgaattnnnnnnnnnnnntccaattttagtaaaaaaaaaagtctaacattgatgaaaactcaaggggtatgatttagtacatgttaaagttcgaggggcatattttgtagatatcaaagtctgggtagtatgatttagtacataaataatnnctgaaatagtaaaattaaatgaaactagataaaagtctttaaatctaacaatctcaatagttcatggggaatttttaacggctagaaaaattcaagtgacataatttagtatatattaaaatttaaggggtaaaaatcttaattagcgttaaaataaaaacttacataataatgaactgggtactatatttatcgaactacaaagatgactaaagtctatatattaaaacataaacttacataataatggactaggtacaatagacaatatactttttgcaaacaacaaaatgacttattaagaatacacacaaaagttattacagacatttcaacaaaatacaaaaaatataaattaatgtcttctcccaattctacgattttgacaagcattatgctttgattttttttaccaaacgactccatcgttctcctttcatcgtttcgaccagcccatgaatgattttatcgttaaggagtatgtatcctaatgaaataccaataaccattccacttccatatcccatcaacacaattttccaatcaaataatccattcgcatgctcctcctcctcttcttgttgaga

SEQ ID NO: 77626 - DNA, 1316 bp, Cannabis sativa
  modified_base (203)..(211): a, c, t, g, unknown or other
gaataaaccaagtcattattggtcatctatgtacaaagcgagatgcttctacccacgtcaacgttaatcgccttgaagataggagtgataagagttatgcggttttctagtattgtctacacgtatttaaatgggacgtgatcaaagcccacgtttcgtgaaaacagttatgtaattcaaatttaaatgtaaataactgccannnnnnnnncctataaataggggcagattctatggaaaaaggatggaaaatctttgagagaaagagatcaaaaactgtaactctatatcgagaaatatcttgaataagatagactcgtagactattcagatttaactacaaaaccacgtaaaatacttggtgtcattcatattattctacttttaaatttcttatatctgtgtttaaatacaaaataggctcattaatcgttaacgaaaatctacgttaatagtttggtgctttcattgaaagcctacgttatgaaaactcagaaaaatccctcctaaccaaaaagaaattttcatggctaatgataatcaaaacgattatagtcgtcctgaagagactaatcgtcgtcttgggaaagaaccaatgggttcatagaggccacccacttaagcaacaacacgttcaacacgttcaggaagaagccaatgtggtcatgatcaagacccaaaaaccgagaatgaagaaaccaatactgatactggttatgtacgtaggagtgaggatgcctatgatcccactaggtatgtagtatgtaccgttagttgaattggaaaattgacaactctagcaacgtctggccgagtctaaccaacaaaatgctgagttggaaagagagacagctgcagccaaggcgactgaaggaaacaatgcacaaaaccaacctgatcctagagtgagaaggccacgaggtagacctcgaggttcgagtaccaggaggcaggagacaaatcaagaaaatccccagaacgcgcaggaggagcaacttggggaaactagggatgttcaagaaggaaaacaacagaataatcaagcaccttgtagggaagtacctcgaagaccctaggaatttacgaatcaggggattgaaaaacaacaacgtgccagaatcttctcgtagaaacgagaacataaggcaacccagaactagggaacagaagatccctcgtaataacgagagaaatcctgagactcaaccgaggactagtaggttaccaccgagacacccccagcgtccttctcgaactgatagggaggaggcatacacataccccagcggggaacgtgtatctaaccttttccgaag

SEQ ID NO: 77627 - DNA, 986 bp, Cannabis sativa
gtggggtgacacgtaggactactcttggatgcatcttcgactactctcccgagatcacccctgaggatatccgactgcattttttgagtcttcatttctctaagcgagagtcatgcttctagaaccaaaaggtctggctttgccgaggcataattacagctaaagatggaattgtagttcgactctggttgtgggctgacccactagttggtttgagcttggtgaatgggcttgtgagttgatttgggactttgaaagcacacatgtcacttatccagtaatacatataacattaacactcccattcaattgaactatcaagttccccagatgtaagtatgagctagactttaaggttaagctaataatgaacaagtcaaagaactcaagtaatacaattaacttaaagtttaaccatatcgaattgagatcaactaagtgatataaactcataatagatataatggtaagtttataatatcaattttactgtcaatatcgctaaagtccaatgtaaacaatatacatcctatacaaatttatttcactaatgtcctagaaaagacattcaacttgcctaagtgtaagtaaaccacattatcgattatcatgttagtgtaatatagcgcactaataaaccttaacacttaataagtttgaacatatatataatcacaattattttctattgtggcgacaatactataaatgtgaataactatatgtttaagatttaatagaatttatatattaaacatataatcatgtgaacaaagcaatagacaaagctaaaatattatttcatatctttattgataataagatattacactgaaattgaattttacttaagatacaaaactctaacacatcatgttgtagattttttttatacacgcaaatatacgtatcatttaagtagtcactcacacgagtgagatcgaatccaagagaattgtaactaagtactaaccaaattggacttt

SEQ ID NO: 77628 - DNA, 4050 bp, Cannabis sativa
catgagatttgctaaattgacaaccttcacaaaagttttctttagcacttaaagaggattttttataaacatgttttagaagaagactgagtacactatgttagaaccaaacatatagaattggatgtacactttgttagagacaaagtcttgaaaacagagttggaagtgcgatatgtaccgtctcacgatcaaatagctgaccgctgcttgacgaagagcctcactcatcacatattttattttctaagtgacaaacttggagtggtaaagacccctcttaatttgacaaggagtgttagaaaataaatttatttccacattttgttctactgtattatagcgccgttggggttatggtcccaatacaattttattagtgaatagtgtcagaaatcgattagaatatattttttacattgcattttgtaaaatctttttcatgttgtgtgcaccctttaaaatattcttatatcaccacaaatgtgatataaatacaagcctctctagtgacggcttgatacctaaacttgacctagcttgcaactttacagtcctaaaacaaggtaaaaaagaagcataaacatcactaaatgctatttattttatattttaaatggtccaacaaaatgacatattaatattgctataaatcaatatggagtttcacatgttgcaataacagttacacagtatataactcatacactcataattttctatacctacattatatctatgtgtgttaactgagatatatatatatcgatcgagtacgtgaaaaagtttttgctgtcatattaaaccattagtataagctacgcccgtctgaggcaaccaattatctgcaagtaaaaaactcgacaatgtgaaattctcagcatcggtagcgttaatcacgtgataaccaggccacgtcactctcttcgccgtctccgaactcggccctctattatcatgctcagcataatacaacgtactcaaaccaaaatcaccattccattctcgccaacccgccacatcaaccacattatccatataagactgcatataaaccgttctagaatactccttccatggccgacccagataggtcttcgcattgcctccgccactagacgaagccgccaagtcatctgcggctctgaccgtacagttgtggatcgaaatcccggtgttctggttcgggtcggttcggccttgagcggttatggcgttgaattgtccgttcattggaagtctagggaataggttgcagttttggaaaactacggcggcgttgccgaagatgaaatctacggtgccatatatatcgcattggcggtagaattggcggagggagtgggtgtagagtgtgtcttggtagccttcgaagctgcagctatagaaagcagataaatcggcactgtttcgaactgctaccgcttggtgcttgcttgctccggccgtgtttcggaatgttatgttcaccgccacgaaaccttgtccggtgacggctgccacatagttgagataaaatcatatatgtataaaatatttggccttataaaaagattgagcattgttattatttttttatatatttaattaccaaacatatataacatttatattagaatggtttaacagagacaccagcatcttgattcttatctaattgttccactaattattttagtacatattatttaaacctatttaacatataataaattcgtgaacaaactataaactaaatttatacatataaaataataaatgatgtgtcctaaaacaattattagaaacatggacctaataatttgttggatttatttttattacgttatagagcattgctatttgataccagtagtgtctagcactttaagatatgtctccttgtgtctaattagctatactccttaaaatttattataccaaattatacgacacccaataattaatttgactaaataaaatacataagattaagcaccgctggtctctttttagtatttctgttaagctatagcatgatattacttactttagcatcactattataaagtggtgtcttataattggttaaccactctctataaagtttattaaaataaaataaatggaatatatttttgattgccaacactaatattacaggtgctaggcagtgacttttactatttctctaattttttttttaattatctttttatgattttatgtttttttattagttattatatctgttaaaagaaattcaggtatggtcgttagttattattaatttatatataatttttcattttttaatgtaataataataataataataaagttcttaccaaatgttgctgatttgaaagtggtccaaccaccaacaacacttcggttaccagtaataacagtctgatttataccatctccaatcaacatcaagtacctcttatttttaccaatggaaacatactcttcataaacccctgccttcacatgtatcacgaagtatcctccagatcccatggttttgttaggagcagccgcaacggcgtcgtttatacttgtgaaattcccacttccatcttgactcacagtcacctgttccctcacaacaaccaccttactatgatcaacatcattccctctctccaacactactgatctaaccaacttcttcttaatattattaggcacccaacctttggtaaagagagctagagaaacactaaacagcttagtgtcgttcgccaaaggagcgaaaagaccctttctcaccatccaagacgaagaagttgccgatttaaggccgtcgtagcaagtctcttggttagttaaaatcgcgctaaggagtgtttggatgtcttctgttttccaaccaggtagagcactgtgtgtggcgttgatggagcccaatgaactcgataggtattcgacgtttaggcccgcgaggaattggcaatcctcgagggcggccaccgttggtttaggcaacccggccccgaggtgaagaaatttgtttactaaagtttggaaatggagagtctgagataaagatttgaagatagtaaagcgggcgaaatcgtagacattagaggttttgtttgggaggagtaatttgcatgaagttgggtatggtgtgaatttgcaaatgtagtctggtgtaacaggcctgcttggtggtaaggtgtagttataagtattagcaattggagatgatgagattagtagtaagaagttgatcgaaactgtgaaaaagaggaagaagagtttgtagtagtccattttttgtatgtgatatttgtatattaatgctttgaattatggtaaatgacaatggtttttataggaataatgtggagcggcaattatggtgagttagtggaataatggtctttgttttgtcaagtactgactactgaacgcgtttggtgctaaccgattagtatagttatatatatataacatttatataaattggttatatctaccaaactattcttactcatcatttcttttgttctgatttggccaattctggtttcttttgaatttaagaactacttgagtactacagttatatggaagcatacgttccaacaatcttattttttttttggtatatatttgttgaaagtataatttgagagaactgtacattaacataattaacagttagtttgatgaaacagcagctgatcattgtatgttaattatttgtgaatgtgcaaattatgtaattttctatctatatatagttgtagagaaaatatatattacatagggtctgtttattttctagctcaaactaagctaccccagccataatattaggggtgttcctaataatatttgatttgaaatgaaatcgtaagtggaaataattgttaggctggtacgcactcatatctaacctagtgaaatctatttttgttttttgttttttgtttttttggttataactatgattttattgcactcaaagaacacttacaacaaacaacaagaacaactaagttgttgaactcaattactcaaaccaagtacaatcttttctacatggttttctaa

SEQ ID NO: 77629 - DNA, 719 bp, Cannabis sativa
tcggtttacatccggttcttggatttcgataatgtccccagccattgctaccaatctggccatattagatttggtgattgccttcactggtagattgtaaacccttcctgagatggaaaaagatgtcaattctgtttcccaatcggacggaatccccttcattcgttccagaatcagaaaccccgcattgagcacccatggagatctgcctagaattcgttcgagtgtggtgttctccgagaaagaaagaaccacaaatatggcttttgttgaagtcttctttacttttaaatcccattcattttcccccaaattccatagcctacagagaatgttctttatcaaagaacgactgaaagatttcattgtgcacagttggccaatgaggcaagacttgccaatatcttcagtccctgattcattaatttcccacccttcttcatctgttaccgtaagtttgctggtgcgggccagcagatcgctcattggaggtaggctttggtagcacttcttcagagtaggctcttccggagagagcatggaggaattacagagttcaccgaggaagacgagagagacgagagtatttattggtttttattttatatactgtataaacctaaaaactatatacgtataagttttagaaaacctaaaagggttaatcagattaaaccttgggtcaaaatgtaaaatgaccctaaatctaacaattaagt

SEQ ID NO: 77630 - DNA, 788 bp, Cannabis sativa
cagagcttccaatgaagtataacccttcttcagagagcttgagtcatgagtaaaccccctgactatggctatacagtttgcaatattggagaaagactcttctggtatttggaaagatatgaaatccacaaaactgcctcgacaagtctgctgataagagacagcttgagaagaatcctgcgtaggaatcatttttcacagaaaaaaaaaagaatgagtacaaaatcatttatgcaaattacattgtacgatcatgcaagttaaaaactagaataaaatatcatagaaacaatgccaattactggtagcaggtacctcatagtaagatatggaagtaggaatgtttagagatactgaagaagggggaaggggggcaagcggcaataaatccacacaaagtatctttcttgaaattgaagtaaagggcatcagaaaagcctccttgaaactgaaattcaatcaacaggaaaagtatattccaaaataaaatcactgattgggagtatatacaataacaaaaccctgagacgtattttcatcagtcgaaaagctcattattctttctatatgaacaatgagagccttggtatggtgttccaggttcagaatattgatagttggctggcaaatttcaacacgttaaaattgggtaaaagaaggagaatttggagcagtgtacctagactccatctgatggaattgtttagctaatgtccttcgcagataatcacaatctgaaaatcccccaaagtgagacaattctttgactctctgcattgtttccctga

SEQ ID NO: 77631 - DNA, 622 bp, Cannabis sativa
atttatgcataagtcaattattttgtatttttgagacctatataatgaattttatctttgggcatgggcccatagacttgtatttttatttttctatactttttgttttctagttttattcttcagctacagagttgttttctgtagctacaaaatatctattttaatattatatttattatatcacatttaattaattaattaaataaataataaattactaatattaatattcaaaatttcaaactacttttagaaaaagaaaaataatctagtgcaacatcacagaaataactaattttttattatataacattttaatttaatcgctaaatatttattttgtgactaatacacaaagtagcaaatagaaaatatttttacaatgaataatatgcgattgggaggcatgaataccatgtatgaaaaaatatattagtttaaatacgatacgatacaatactataaattagcaggacatgacatgaaaaagatagagttaagtatagcacgagataaaaaatatatgcttaaacatgacatgactgttggattaaaatcctattgtgggtacatatatataatgtatatgctattataaagtgtgatacaaaattaagtg

SEQ ID NO: 77632 - DNA, 551 bp, Cannabis sativa
agtccgtggagcagacaacacgatcgagtttctcccggataagattattccaatcatgtccgttagtccacgtgaaaagagcccccataccttccaaatcaacagccccactgtcgaataagaaattacgcagacctcgaccttcactctcacaaaccggccttcccccaatcttctcctgctgacaaagaacagcattcatatcgcccattgcaatccaaggatccccaaaccccctgacaacctccgtcatagcctcccaaaaagggagtctctcactccttcttggaggggcgtacagaaaacagcccacccaagctttaaaatttctattctccccaaacctaaccacaattttgtcaaaacagacctcaatgatgtagttggttcttcattaaggcaaactagacttgtgttttgtgccttcaaaacgcagagctataaaatctttattaaagttatacattttcataattatatctttggagtttttagtccttataattttgtttaatttttcggcattagattattaattcaataatatattc

SEQ ID NO: 77633 - DNA, 3753 bp, Cannabis sativa
aaaaaaaaaaaaaaagattgcaacattctagaattaacacacagtcactctatctcataattctgcaaagaatagattacaccgatagtactatgaaaaggctatgggtaggtaagcatctgaaaggtaccttgttcatgatggcaacaattccagggtctgcagcaagcatgtgcattctttttaatgcctctgatgcaggagggttcaactgaagacaagcaataacccaattaacaaacaaaacattgctgcaaatactcgattttcttaaatgttacgccaatagatgcaaatttaaaggaaaagagaaagtaaggatccagacacaactcaaagatggattgcttcaaaaaaattcataaatttttaatatatacagaaaagtaaacaaagtgaaagttacaaatttatgagatgaagattattgtttaattctttgaggacacaatagttattatactaatactatcgttagtcaagatctcttaagttattccatggcttgaatagattaggaaacactttttgaaggcagacctaaatattagcatactcattaataactaataagatactagatatctggaacacaggtttcttagtttttgctagcgaatgagtatcactgtagtaggctaaacttgctgtgcggctatagaatgatgggtatatattcaatcgtcaatacgaaaaacttgctaattatttcctctacaaaggttacaactccaaataacctcctggtgaaagctcggtaatttgtttaaacttaaaagtagcaatgagcaagcctagtccctttatgagtcttattttctcacttatctctcaaatatgaaagctattccaacaaaataatactaaaaaaaaaccataacggtgacaagtgaatccaagattacctctattcctggcaattgaagtgttcggaaatcacagaagatataaggtccttgaggaagttgttgtgaaaactgtggcctatttgaaatgcgctgtctcagtctcttttcctcttcatcaaatccagctatccttgagttttctttagttccttgtaaaacttcatcaacctcattttcagatacacccatcattctaatgggctttccctgaaacaagaacaggttattattctatgtatgcatcacgtggtagtgacatagccaaatctcctatcatacaatttccaatgccactaaaaggaccattttcgtgaaaactaactaaaatttctatatctaaaacctactaaagtttctatatctaaaacccctttctttctagacacaaaaacagtgtaagaaagagaatgaataacttctgtgccataattacagcatccacataaatgttgggacataatgtgcatccacaaatgaaatacatctcagaaaataaacaagcatatgattaaacgctgaaaaatgatgtaggaaatgcctcaaataggtatctcccatgtgtattgtggttcttctattatatcctaattctcactgtttcattaacataatctatccatgtatagaataataggaaatattgatacctgagtcacaaaagtttcctgtaaactcaagcgttcatgctcattcgaaaatggagttagcaattgtgagcttttgttcgagaactgtggaacaataaacctcatagtatctgttttaatatgtgtcaacttttgcatttcatggccaagatccttaagagtagaactcggattcatctgcaaagtaaacttctttcccctccatatgactgaaatattgtgtatgctctgagggtcctccatgttatctgaaaaaaaaaggtgccagaatagttactgattattctaaactacaccaaatttctgcaatctaggcaatagagagatcaacactagatctacacacaggaaaatgcttaatattagtgtgttcaagcacaaaacttgtcaaactatactgctctacgatatctaaatcacaatggccataaatgtaatagtgagaaaatggtgtttctcatttccatccaggtgtttactcactgttgatggaagattctcattaacaaaacaaaatacaaacattcttcaataatgcataagaaacaaggaattataatggtatggccaaaatagaaatgaccaacatctgctataacttttttattatgttgagctcttcatttccgtaagaccccaccccgccttgataaaggatcaaggactcgtgacctttttagaatctgatttctaatttaataatccgaattcagaaatcatatcttatctaataggtggggagttacaacaaaagtggagataaatctggacatgctgtttatcattttcatgtcatctccttcttgaatgtgtgaggatataggacagctgctttattgtggaattaagtaggaatactctagttattgaataatataaatagagaaagggaggttagtgggtgtggaattatttagtaattgtgggaattcattagaaatctattcagaggcttaagggatcctcgaatttccctgtctatcttacaactattgtattttctgatattgaatatcaatggagaaggctgaatccccatttttatatctgcattcctatcagaattctttccttgctagcgctgtacagatgagttggtcacttttctaactactatgtgcaaaccaactcattgggttctcaggtttcaacatcgaagagataacagcaggtgtaacagttgcactataactaaaacacaaattttttatatgccaaacataatttagcaaaaataaatacagaaagacaatccttgattgatgtttgtaatccttctcatccctttctcagtatgggttagtaaatgtgtctatacagttagaataaattaagtagcaaggatggttggacaatatctaagtattagttactccatgtttgaagatgatgctttctgttcgaatcccattgtatctatggcaagcatgatgatgcagaacacaaacgggcaagcagttaactaacaataataatcaagaactatggcaggaactttctggtacaaagagtcaaaagatgacgttcaacaggacaaataggacattcttttttatgaaataaagcaataaaccccatcaaaattccaacttaacggacacaagacgtgttgattgattctttaccactacccacttgatcataaaccataacaattaatgacactatgctaaatatgatcaaagactggcaactcaaattaagggaaagttctaaaaacaactatcaaaatttcatcagaaaacacgtaattgagaaaaataaatcatcatcaccatcatcatcatatagtaataacaataaatctattgtaattcattaaagctgaccttctactttgatcaaggtcaatgctctgagaattcactttttggttggttctaagagagaaagtgttgtgaggaaaacaaataaaatgggggccgtggattatgattttataggcgcgtaagataagggactgtagacgaataaggtacatgctaaaatcaaggggttgtgatttttcgacgtattgcgctacgtatgcgctgtcgaagacacaatacagtaattggactccgaacaatctagaactgacgagctcaaatgaaaaatatataaataaataaaaaaataaaaaaaatatcaaacctgctaaaattagaaaacataacgtgtgcttgcggtttgaattatttttgctgaaatatgatatg

SEQ ID NO: 77634 - DNA, 763 bp, Cannabis sativa
atttttgtaataaatttatctttttttgagtatttataaaaagatgttctctttcatttttgctcttcttcaactgctgttctactcgcggctcgcctcgcctcggccaacaccttcatcaaggtatgtatgtcaattttgaattttgattatcatctttgaatctatccatgttaatgatgatgaacaaacaaaatgtcgagtttttagttttggaattttacttaattcgccattgtttcttgttcgatgtgtttcagtgtagagttctgaaaatttcaaaagatggatcccgattcagtcaaatcgactcttcaaaatttagcttttggaaatgtaatggccgctgctgctcgcgattaccaaaaggttggatttttgggaatcataggctgtcagatctgttactgttctttgtaaattaattaattaattcatcatgttgggttcaccatttattatatttatgatttttgttaaaccacacagttttgtagttagtgattaatatggaaaaacttgtgtttgtgtgtttatagttattagtataaagctctagcttagtgtcaatctccattattggggaacttatagttgtgctaatcaaaggctactccatatatatttttttagctaaaatgttaaaattagaaaaccatttttattgttgtcgtttcatttttagagagttctttatccattctctattataaagagtcattcttttttatggctggggttcattttttctactctttttttt

SEQ ID NO: 77635 - DNA, 1204 bp, Cannabis sativa
atgttatgtaggagaatggtggaatgctaatgtgatcgatgttgagaacgaaggtctttccgttggggcagctcctaatatctctgacgcttacacaatcaatggaaaaccaggcaatctttacaactgctcttcaaacggtacgtctcaataaatatatgtttatactaataaatagcatattatcatatcattaattcattttctttgtgatcagatatgtacaagttaaaggtagagcaaggtagaacttatttgctaaggataatcaatgctgcactcaataaccaactctttttcaagatagccaatcacaacatgacagttgtagcaattgacgcagcctacactaatccatatgacactgattacattgtcattgctcccggtcaaacaacagacgttcttttcaaagctgaccaatcacttagatcctattacatggccgcccatccatacataaccactcctcctacggttggcttcgacaacaccactacaaggggtgttatggaatacaagggtgccacgtcagactcagctccagtgatgccgaccttaccagatttcttcgacactcctagggcccaccaattctatacaaacctaactgggctcgctgatgggccccagtgggtcccggtaccactccacgtggatgaaaacatgttcgtgacattcggacttaatatagagcgatgccccgtgaatgccacgtgtcagggacccttacaagggagattctctgcgagcatgaacaacgagtcattcgtgcttcctaacaaaacttctatgcttgaggccttttttagaaaccaaagggaaggcgtgtacacaacgaatttccctgacgcgcctccgttggagtttaactacacgagtccgttgattagtttggatgagtctttgatctacgcgccaaaatcaaccaaggtgaagaaattgagattcaattcaacggtggagatggttttgcagaatacggcgtttttaacagtggagaatcatccaattcacgttcacggtttcaacttccacgtgttggctcaaggattcggcaattatgacgccgttaatgaccgtcaaaaattcaaccttgtaaatccacaaattcgtaatactatcgctgtccctgttggaggttgggctgtgattcggttccaagctaataatccaggtaaatttactggtattatattatatt

SEQ ID NO: 77636 - DNA, 533 bp, Cannabis sativa
  modified_base (102)..(111): a, c, t, g, unknown or other
  modified_base (377)..(380): a, c, t, g, unknown or other
ttgatttctaattaaaaaattgaaaagtaaaagcagttttatagaacatgtttttgaaaaatatttttacttttacacttttaaaaatagaaaactgattannnnnnnnnnaccaaacgccaccttagttatttatatttttgaagatcattttggagaagttgggttgggtctccttgtcaaaagattttcatttgagaagctgttggagattaaagaaaaaaatggtcctgttatgaaaagtggtaaaaatctaaatgaattgggccaaaactaatatgatagaaggaaaaacttcattttgatacgtattatatagaggaaattacatgggaatttaaaatggtgggctaattcttgattggttgagtgttttnnnnaacaaaatttgaatactattttgagttttaggttaaaaaatgaaaataccatttttttgttttttgtgttttcaaatcattgaatccaaaaactctctaattattctcttacttttttattttgaaattctcaaccaatcacatattcaattt

SEQ ID NO: 77637 - DNA, 770 bp, Cannabis sativa
ttttcgtgaaaaataattgaatatctgtttcttgaattattttgattggatagtatggaaaaaattaagcaatttacttttttacaggataaggaaacctgatatgcctgcttggcaatctgccctagtggagtgaaataggaaagtcgtcctggtggagtaggatgaagactcttcagacaatgatgctctgtctgtgattatttgggcaaatgcttgtgcccacgtgtagggtatctttgacttgcatttacttcttctataacatgctttacatcatatttgcttctaactgtgttattttgtttgagcaaaaatgtctcagaaggtacttcacgccttgaagaagagagttaatggcagctcgggccaatctcctctgcccaaaagatacgaaaggaactgaggctccatcaaaggaaaagggttcggctgaagaaggcattgacctttccaaggaacagcctaccgcacaccctccagtctaaaaggttttgaagtcaaagagttctagaggaggcatctcggacaaatttggttaacctaaaacctcttcaacggtcatggtactgagcacggaggcgaaaaaaggcaaagacatgctctagtacatcttggaccgatcacttcctgaagtgagcgatcagttgtctggggcgaacaatgagttgtctttggaactggtcgtgggaggagtcttgaaggaggatactcgagtgagtatttccttctttatttttattctattttcttgtagcttgagctaagtc

SEQ ID NO: 77638 - DNA, 846 bp, Cannabis sativa
tggttcgtgtataaaatatatctagaattacttcatattagaagttgacagtgaaaacccatcaactaacttaaagtcgaaaaatcaaaactcaaacacaagatttagtataagaatgaaatatgaaaaggtttgagaagtgtttagagctacaatggaggaagagaaacacttgtatttgttaaggtgaagtattacaatgattttctaaccccctctcacctttgagaatggggtatttgttggatgttattttacttgtatctaaatttactaacatgtatcttgattatattctataatctaacaccctaaatataaattcctaaaatgaaaataaatacatataaggttaagagaactttacattggtggcagcgaaaatatgtctccttctactcagatctctaacctttgttcccttctgtcgcggagtattatcaagatctgagcatggatctccttcaagtgttggattcttcacacagtcttcccacactatgattgagtaattgacttgatatgagtgggcatgtactctatctagctcgaaatttatgaagagaaagagaatgagattttgaaatctataaaaggaggctctcaatctctagttgtctgacagagttaaaaactaggctatgaaggattggatgagagtgagagccatcatattctttatataggatttctcctatagggttagatttaaattgtatggaattaaaaaagataaaaagttggctaaaaacactcttaagtggtcggccatacaatgggccccacaagttagaattttaccattttattcaacaatttatattttctttcaccaatgtcatattt

SEQ ID NO: 77639 - DNA, 619 bp, Cannabis sativa
atagaacacaaattaaagcaataaagatttaatatattagaaagatcataatgatgaacttattgtttcaaagtcgtgtctaattcaaagccttgttttcttcttttcatttttctttccctttatagtatatatatacatatagaattgcttttagtttattctagagtctacacaagtgtccagctggtatatgtggacattgctatgcatgtacacgtcaacccaatctttcaaataatttgctgacttgtcatgaaaaaagtttagaggattatcaacatcggatatatatatgtatatatatgcatgcatggcctcttaatgcctttgagtttgggagacaataatatttctctgttccactcgaagggggacactttgcttataactttgttatgtaatcatctagaacagctatatatatattccactaactcatatgtatcatcattatatatgatcaaaatctcaataaagttttgcttttggtgtatacacatgtacatatatatagataatggattttgttatcaattattgatctagttgtattaaaatacctttggggaaagattaattaatctataaatatgtatgatgttttttttgaatggaa

SEQ ID NO: 77640 - DNA, 678 bp, Cannabis sativa
  modified_base (611)..(620): a, c, t, g, unknown or other
gctcccactcaattgaactaccctctctctttcaactctctctcttttcgaaccccctagatcagctagggttttgaattttgttcttcaattctagcaagttctagcagctttaagtttaatccaagctaaggtaaaggttttgacactcctctttatgttttcttgagttttaagtttgagatttttgcatgattttgagttattagttactggtgtggctattgttgtttgttaatgttttcagaagttaaaatatgtttagataggttgatttaagcttgaattgttggatgttagtagatttaaccaagttttaagtttagaactcaaacttggagctttaatggtggattttgtttctgagcttgtagaagtgttttactgctttgatattgttctatggggtataaatagcaggtctggaagtttttgtggtgtttggagttgatttgaggttgtggtgaatttttgaaggtttcctgcactgaattggaattccagttcagagggacctataggaaccggtctaccggttggggcaattttgggaaccctagtttttcctatttttgtaatgtttagaatattgccatgttgtttatcgatannnnnnnnnntagtttcaagtttaagtccccagaaagtgatttagcgtgtcacttacctatgttatga

SEQ ID NO: 77641 - DNA, 964 bp, Cannabis sativa
gttgtcgcaccaaagtatcggacagcttgaaataaggactgatatttcattcatgagggattgtatccacattatttcagaggtggctaaagctagtgctctatattcggattcagtgctgcttcgtgccactacttgttgcttttttgaacaccaacttatgagattattggcaaggaagatgccatagccagaggttgatttgcggtcatctgggcaccctgcccaatctgaatcagtgtaaccattgatgctgagagcaggggcaggagtgaacacgagaccgaggtgtatggtgcctgcgaggtacctgagaacacgtttgcaagccccccagtgttctgtagtaggtgtttgcatgtattgactcaaacggttgacagcaaatgagatgtcaggccgtgtgttgcatagatattgaagagccccgatgatgctcctgtactcagtgggatttggtagaggagtgccggagtttatggacaatttggagcttgtgcacattggtgtggactgtggcttggcatcaagcatcttggttcttagtaataggtcccgtgtatacttttgttgagtgagaaagatggtgtcattgtccctgatgacttcgaatcccagaaagtagtttactgagcctagttgcttgagggcaaactgattttgtaaggcattgatgatggcatgaatgtgtgtaggattatcacctgtgattagaatatcgtctacatagactaataagagcagcagagatgtgtgttgttgtataaaaaacaagcttgtatctgattttgaattgtgaaagccccattgtattaaggtggttttgagggtgtcaaaccaagctcgaggagcttgtttaagcccgtatatagccttgttgagtttacacacatgtgtgggatgttgagcatctatgaacccgggaggttgtgccatgtatactgtttcttgaagatcaccatgc

SEQ ID NO: 77642 - DNA, 1911 bp, Cannabis sativa
  modified_base (483)..(484): a, c, t, g, unknown or other
  modified_base (1158)..(1174): a, c, t, g, unknown or other
tacgtttaaaaatcacgtaacacgcctaggctagttagggtgttacaatgtatctataataatgtaaaagaaatatatatgtcataatggataataataactgttagcaaaaatttatgcaactattatgaaatattaaaaatcagaacagtattttcacgcacgtaagtctatctacatgtctcttcatgatttaatataaacaaattcaccattagaaatttagaaaataacgaaaatacaccaggataaatattttactatactattgatataattatttttgaattgtacttgagttagattgtttgggaaatccagttctagtttttgagatctgaatttcatggatctgaaaaattgaagtcacgacattagttttatgcaaattaaactggatttccagttgaattttagtttcataataatttttctacacttcttttttcatgaattcaaaacagcccctgttttgattgattnnggtcgtcttcttaggtgaagttgccggaattaatgatggttctctttctggttgaatttttatttcagttgcgttgggttgctacgtggttgcgcgatggttgtccaggaagcatggatcctgagttgaaggtgtgtgtaagtgatatttttgtaatttttttttaatttaaactgtatatttgtttatatggccaattgaaagtaattttacactattatttttttttttttttgttaaaattgaaaaaaaaaaaccttaataaatatatagactgactgagattttgggggctaaaaaatatatttagaaacttaaaattttttatacagtaaaatttataattgtgcacctcaattgtaaaaagaaaaccacaaaaatattgtttttattaataatgattataagttttattaaaagtagaaagaaatattttgataataattagccactatagaaaacagataaaacaatataaggatttcaagaaaattaatagatactagtagctcacacgtttaattttcagtgtgaagaattttggccgagtcaaattgggtggctggtttgttgtgtcctactattttctgtttattgagatgagtgataatcatattgattatattttatagtacaaattaaccagaaatataacaaataataataataataannnnnnnnnnnnnnnnnataataataataataatacaatgtgcacactgagagaaaagataagcttgcttggtagacgaaccaatcaaggatgtcttactttgattctttattgggctgggttgttggcccaaaaaaccacgtctataacacgacctcgtcaaagttgcttgtaattaaatactggaagagaagaagtgactgatcccaataacagttacagtttccttaaaaaagaaaaataatacaagagaatagagttagtgagttacagttgatgtaaccgaacaaccgctaatacctaataccttattgtacttaaaaagtgggcatgatgatagagtaatgagtacaatactttagtaatacttttcttttttaattttttatcacaaaatgaaagtaaaatttttgtttttaaaaattttatttttgaaaaacaaaaatgtgttctataaccacttttgtttttcaattttaaaaacaaaaaacaaaagtgtgttctgtaaatttcattttcttttttaatttttgattttatttaagtcgggtctagtccgggttcagattcggattcaggtcagaagacaggtatagcgctagggccgtggggaggtgatttgggttcgggtttggtcagagtgcaaaatattaataaaaaaaactgtttaaaaaaatattgaaagttattttttttatttttaaaattttgatttttaattaaaaaattcaaaagtgaaaacagttttatagaa

SEQ ID NO: 77643 - DNA, 678 bp, Cannabis sativa
gaggctgaatcactataatttgttctttatatataggttcactcatgatcatcattgatcattttaacttatcgttggtcaattttacggtaacaatatacattatatcattttaatttagaacttctacatttcacaccttattttttatataattatcaaaaaataatttttttttcaattattaataacatttattttacctatgtttcaatactttatatcgatgcatttctttatttcatatttccggctcttctttctcattttattaactttaaaaataatttctgaccatatggatatgggttgaatctaaaaaaaactataattgtgattgacttttcaatataaatatttcaaaatttgagaagcatatatttttttcagaaaaaaaaaactatttaattactaatatagttattagttactgttttataagttatttaaatatcaaatattgttaaaccattataatatattataaaataagtgattaattttcaaaataaaaaaatgtatataaaataattgatatataaaaatagtagtttgttatattacatgaaaataattttcaaggttatctaagggtgcgtttggagagccacagtgtaattagatttgtgtgtaattggaggtaattacacaatttggcatgtttgtctgaccatgtaa

SEQ ID NO: 77644 - DNA, 744 bp, Cannabis sativa
ttctctatatagacatatatcgatctaataatataatattaattaatgaataataataatatataataacgtgcatatatattatgtatatttgatcatatatatgactaatgtagtaaaattttatatggttaaatattacttgatctaagctaattaattacacaaatattacatgtaataataacaaccaaatatatatacttaaaatatatatatataaaaatatgattgagagtgaaatatattgatcatatatatatgtatgtatatgtatatacctgaagtttgaggcgtttttttccagcttcagctcttttctgaagatcagcgaccatgcgaaacctccggcgacgattcttgacgacggagacggcggatctccaccgtatcaaagcttcctcggagggtctctttgcttccacgtcaaaattcttccttaaatatttctccatctatttattatatgatcttctaactctctacatgtagagaatagttctctctttatatatatataatatatatatatataatatagaaaaatatatataggtctgtagtgtgtgtataaatgtgtgtatatattatatataaatttaagtatatatatagggatgggatgggatgggatggcataatagggccaagtctttggctattccttgaattaagccactcgttttaaatctcactaagtactattaattaactcatcacctcttctaattaataatatatata

SEQ ID NO: 77645 - DNA, 1615 bp, Cannabis sativa
aaagattggagggtatgccgagatgattttattactctgggcgttgaggcgatctttctatttttctaggttgagagacgttttcaccatcctccctcaactctggctacaacgaagaattttgcgacgtacaactaggggcgggcagaaagtcatctaatctaatcacaactaacatatccaatcctaaccgatcctatggaatcggatatccaatcataattggatcagatcagatgtaaattttgaaaatccaatcagatcggatcatatcaaattgaatcggttattggatgagacatctggtccaatggataactgaacaaaactgatccaattatcatccaatggtcatcaaattatatatatatatttttaaaatacatttataatttaatatatttaatatattttatttaaaaaataaattaattgatttaatatatatatttaacacatgagattaaggaaaaaaacttagatctaaaatatcaattctcatctttctaaacgttaataaaattatcaatgcatattgaataagttttattttttggcagttttattatgggaccatgagaattagattggactaaactaatgttgattatgtatgttggattattaggttttaaattatgtttttatatatttttttctttgtagtgaaatcaacttaaatggtagttaaaatagatttgatggatccaatccaatctaatagaaaaccagtgaatgcatctagtggttggaactaatctaatccaatacatccattgtaatggatcagattgcatgacttaattcaattggattggatcagatgatagattctaatatctaataaataattagattggattggttgggtccaaatccatttgatgtgatcaaataaacacccctacgtatacctttatccatctaagtctgacaaaaatacctctaagaaaaccaaggacaagtcttcctcttgtcaaaccgtatcagataagggaaagtctgtccaatctgatataatacctccagtccgtccaactcccactttgatcaacataccttgagtagcagttgaagtagtttggccccttaagcatgttgttaagagtaagtgaaaaagggtggtcaaagaggagcctctagtggaaaacatcatccttcatgatgatgcccctctagagattaggggtacaaataatagggccttgatctacattctttatttaactttgtttatatttgactaagtctttctatttctttgtagctatgttagccaagatgctcctctgcatgaagaagaggaaagaagagggtacctccgagcatgagtctcctgctagagtcccaaggcatgaggaaattactcctctatctaaaagatgcttgcccttagctcaacctcctgctccttcatcttaagaggaagaggttgtgattctggacagtctggcttcctcttcttccagtcgaacatcatctaagcagacctctagctctttcttgttggttgctccatcaatgtcagcccgataatcttctgatgcacttgtccctctctactctggagccaaaaaggctaaggaggtcgtatgagtctaccaggacagagtca

SEQ ID NO: 77646 - DNA, 1211 bp, Cannabis sativa
ttaatgttgatttatttttcgttaactaaataatatatgaaccttttacgtaataaatatatcacagagctttagaataataataaatgaacaccagatattttttgttgttttgtaactaaaatctacatactccatgagtctttcttattagggatgttaatctggatacaaagtacaattctcttaataaatgtaaaatacagtttttttctctcttaaattggttgtctctttttccgtggattctttccctattcataggtgtataagatggcagttattttcattgggatataatcatttacaaatgctcatgaaacgtggacattccccatgttttatttttgtcacatgggataatgtttaataactactcaaccgctcttttgtctttatccttaaacggttatgctgattgtgaaggttgtttctcgctaaatgtgagttgtccttcttcaccgtctttatagaaaaaaatgctaagtacatatattcttctcctcgcagggatcttcgtattagaatgatactagcgagatggccattccattgcgttgagggcgagatggatgaatgtagctattttctccatgtacaaatatgtaggttaataagttgctagctcttactcccaagtatgagggtcaatgagttgatagcacttactcccaagtgtgtggatcaatgagctgcaagctcctcgatatcttatcttgtatacttttagtatatactctatttatcccaagatggacatattgtctcgtcaattacatatgttgatagttattattcttatctcgcatatgcttatgtggcaacaagtttgaatatttctatcaactataattaattgaaatgagttatttaagttgcgtttaataatgcaatttaatattataatcattgagttgattcatattccttttgtggtacacgtgtcagcatctggtagatagtcgaatttctagtataacatttatcataatagcacacactattccttgtgtgtggtggatggatttggaaggcactgtgtgagttcaattgcatcatcctcatcatcaagattaaaggatacaatatacgagaagttttgaaaatactctaatagtcatcaaaaggtatttattcttaacttgtattttattgttttgattttatgtatacacatctggagatccattgggttatggtacaatgataat

SEQ ID NO: 77647 - DNA, 5512 bp, Cannabis sativa
attgaaggccattcatcgtttggaccaacgttttcactttgaataagccccctctcactgtggaactctgaatccttggatccatggtcttgagataaatgcaaattgtgatgtgctgaaggaggtgcaggcacagtttgatgatggacaccgtggtttggtgggttagacggggcagaaacctttggctgtggcctgcccatcttaacaatatcagccattgatacttgaccggggacccccaaccaggaagattgaaatccagaaggtggctgtggagttgaagagataccatctgtagagcctactggccatgtcttgttttctgaggagacagaatcactgaaacaaatttcgaacgtaattggaaagaatcaacttcaaaatcacaggtaaattggctaaagagaacattataagttacagacaattaaataaggatcactattacattgactacttaagtatattcttagttttcttttttctttttttgacttcagactaattgtaaaatccgaagaatttaagaatgtattctacttgattcatataattcttctaacctgtaggatggaggaggtcgtcggttagtattatttccagtcacacccgaagctgaagatgaagatcctaaataaccatgtgatccattttccttcttgtatgcaggtttaccatgatatgcaccagaatctaaaaaaagaaataaacatacaaagaaataaacaaaacaactgaaatacataaatgtgaaacacaccgaaagggagtgaagcaattacataccgttagagctgaactggcttgaaccaccacgtccagaataacgatccccgccacccttaccaccacgatgatttgaagagctactagtaccgcgaggcctcaaatcagtggtatccttattctgtagcaatgaaaaatgagtgaaacaagttaaaatgattgccaagaaaaaataaacagagctcagaaaaacataaatgatcaaatgtgtttggtaccaaacaccaaactctctcatacacaaggaaggcaaacttatataaatcaaagaatgtttcaaggtaccaaacgaaaatcataataatgagaattttcaaaacacacgaacctcttttttcttttcacgtttgctcttcacttcatgaaaaggatctacaaaaagttataaactttacattagcattgactttcaatatgaattaacaaaatgcccatctaagctataaccccaaaaaagtaacttaattaggttacaatggattagaacataaaccacataaaaggcacaaaatcatgttgatcaagatatttatatatatatatatatcaaatgtaaacaataactacaaaacatccacctttaagcatatataccatttgtagaaatggaaacaaacttgttaggtctaaagcaaacaccttcaatagattttctctccaaatcaaagggaatatgacgtataaagttgtatataatcgaatactcaaaacaaaaaccctaacccaataaaatcaaacaaacaaacccattgacctaaatccaaataaattttcaaaataacaaaaacctaaccttgagcaaggagacgattaacagcttcattagggtccatgttacagtctttgagcatagcgtagatctcttgctcggtacagttattgacaatctccttcaaactttgaacaatcttcctcgaagcaggtggaatcgatgataatattccactactattactactaataataccctttccattgttacctcctttgccactcattgctaccttcaaccgaagtttcgttccccacccaaaaaccctcagatctaacaactcccaaactcaactctctctctctctctctatctatatatatatatataaatatcgttttcagtcagaagttggattggggttccgccgcgggactcagaggaagaaggaacaaaagttaagtacttggaaggaagacgataaagtatcacaaagcttcaagctttctctctctacctctctctctttctctctctaaaatatatgtttatatatatatatgcaccgaaaaccctctcttctttcaattcaattttttttttttaattttctctgtaactgcaaattttatttttatatatataaatttaaagaaaattcattttaggtatatatatatatattgaaataatcacaacaagataacaatatattgaaataattgatgtgataaattagtttaatttttccttgttttacgttaaaaattaatgtgtattgtaaaaataataatgtatttttatttttaatttttatttgggtaaatataattttataaaagttattgattaaattatttattttgttaaataacaacttaaattctgtattttttaaactaatactaaatggtaatttgaaatgatttttttaaaataaaatttaataataataattcgatataaaaagttatgacaaaattgattatgttatttatatttatttgcactaaaatttatttttaaattagttatataaaaaaatattaaaaattaagttcaagattctctttatattattttagaaaatatataatctattttgttatttattaaaataaaaagttaaattattaatttttgtaaaatatataattatcttatctaaaatatacattttctaaaatattataaatgataacactatgatatctaataattaacaataaaaaataaggagaaggtacacgtgtcactttggtatatgactaggcaactagaaatgaaaaaaaaatgtaatggaatattttgaagaaaaaaaaaattagttatttattactatattggatgattgataaacaaaatggattattataaactaattaggtaaagcttatcattaaaaaaagtatctttatttattcaatattagagataaagatgttgtgtttggggtttgaattggacattgtttcattgacaaaattagtgttaacggagagaatattaaccccttttttttttataaagttagggtttttgacactatataattaatttataaatataccacattttaataatttttattttacataaagtatatttctttaattatattaacttttaaaaaaaaaaaaattcttccaattcatattcttaaaaaatacatatatcaaacaaaaataaattatatttcaaatattagtaaaaaaattaaaataaaaaaaatatgtgaaattttattataaaaaggattatacatgatttgaaaaaattatgaaaataaattaaaataagtattaaaattaatacaaaataatatgaaaaaaaaaaagttttaaaaaatattaagagtgagttgtaaaaattattttaagcttaattttatatatactaaagtgtacttattattttgtggggtgcaaaaaaaatttctcttatcatcgtaagacaaataaaataaaataacaatttattttattattattattttatatttatttttaggaagaaacatatgacaataatgtatcattaattttttaggtgtgtaattggcatggctcaaataaaataattgagatgaatgaattattattattattaagaagaaaaatcatactaaatagtgaaatatattattgaaaataaataattaaggaaaatttttatgtttatgttcataatgtgggagataattccacgtacttctcaaaataccttttttattttataattctatgtatcttttgttaataaaaaaatcagtgtgtatgtggtataatttcttcaaatgtaaagatttttataagttattcatgaaaagttatttgtctttcggatattgtttttggacggctaacatgcccattctagaagaagtcttgtggaatgatagttgagttcgaaatggagttttcggatgtctattatatccactttgggttcagtcttcaaaatagctagccctcctctagaaaggagtttcagacagctagttattctccttgaaaggtaattttggatagtcaacttcagctggttttatcctatctggaagcttcgtcagtaagtaccttaggtctgtgagtttagaagctcaaatatgttcccggatgtactaagactaaagttgacgtggagacttcacttaaagaggagttgattaagttagttatttctaattaacttaacaacctcgtttcttacaactaccgattttaggatcttgatcctaaagctataaataccatcttgacttgttattttacacacatgagatttataactcagttcagataagattgagagttagagagagaaaagagagagattgggtttgagttttttatgaagaaccttctgtagatgaagaagattctcgagtataagtgtgagagttgaaactcttagtgagaattcaacagagatattgctcaagaagatgaccaggatggaggttgtaaagacaaccttaactaaaggagtccccgatgtataagcacctccaacaactaatgctcttgataaagtagatccaaaagatcttagaacttcgggccttcacaaatatgggaaaggaatagctgctgaaaatctaaagaatacttcttccaccaagcaacatcaaaagtctaaagttgccgaccaacagaaaaagaaaggaaccatgattcaagggatggtgtccggactaattctaaaggctgagtcgcgtagaaaactaagactgatgctggagttcgaaagctggagtccctgaaagataaacctcatctcagtgatttcattaaccgcgatgatgacgttgatgaggtatatccagtatcggacggcagcgacagaagtctctccacgaccgatctttgaagaagattgaatgagaagaaagaaagagccaaagcagaaaaagctagaccccacgggaaggatttgagaaaccacatcaatgatcgtgtttgcgaaagagaatctttaagtgataagattcaacacctgtaacgtaaggtcgaggagttgatgaaaatcacagaaaagatttctaaaaataaagaggtgtcatgtcagactctaggaagaagatatagagctttgtgtgaaaaaatcattgaatcaccactgtcgaaatgcttcaaaatgccacaaatggaactgtatgaaagacggacaaaccccagggactacttgtccaaatacaatcgcattatgctagtcgccaaggacagtgataatgcaaaatgtttatgtttttttcactaacattaagcaagttcgtggaggattggtagaagaggttgtcttcgacatcgatccacaactggagagacctacaagtggtgttcacaaaacaatttatagcagtcggggactatgacttggaagtcagttccttgaccagcatcaagcaacaactaagagaaatcccgcagaagttcattcagcgcgtgatggatgtggctgttgaaactaaggttactgataacatgaaaatgatggccttaacatcag

SEQ ID NO: 77648 - DNA, 2107 bp, Cannabis sativa
actgtttacatgagatgccatttaatagatgcttcttgcattcataagagttagtctttgatctttattatttttgtaagagtgaaacgatataaattctcactttttctgtgctgaaattgccatttacctttctaacaaactatggaaaaaattagcaccatttatcattccaaagtgatggcatgtctctcccaaaaagtataatattttgttctcctaagataatcttccagtgcactataaaaagacaaaaatatttttcatatatatatgtagtattttaacagtacaaaaaatttaaccgttatgaaaagattaaaaattttatgtgatgagtttaggtttaatgatttaaaattcttaacctagcaaactaacaccgagttggaaatttaattctcaagtgatgtattcattattcaagttgttttttttgttagatttttttgtttggttcgaatagtttatttggattggacaatttgtaaattttattttacacaagatgaaagagactacaaaatagactataattacaaaagctattcaaataaattgaaaatagcttattttattttcaagtttaattcttattttaaaaaaaaaaaaacaaaaaatattttaacaaacatgttttttttagaataattttgcttagctaattaaaaaaaacaaaaaattatttaagtgttatcaaacgcagcctaaataattggtttttaaattctggatgattacaattcaagattttataaaaatttatatgtaaattgataaatttaaaacaatgaatgctaaaagttcatgaccaaatacaacacaacaagaatggatgcatagatcaaaatgaatcgaatttgcagaccttcattcatgggttgagaaagattgaatcaattttcatttctcttatctttcttctagttcatattacaagaaaggtgtacaaatctagaaggaaataactaccttattctatttttgaaaagaaaatcaacttcgtcaaggcgatcaagcttcctcctagcagtaatcgatatcactgcaccatcggtgagcatgcgttgcaatactctcgaaatgttcttcgtgtcatcaaaaccaagatggtgacttcctaatgaaggtatacaaagttctttcatcattgtcatcattcctgttgcctgtcatccacaaccgagctaaacacgattcataacaggaaaaaaccgaatgaaccatattacttcatgaacttcaaacaccgtggtgagaactttgtaccaacaatggtgattaaataagttttgataagttcaaagataccatatgaagagaaaaggcacatattgtaataatttcttgaaaatttataaccaaagtgattatgaactaacccttctattgtagaaattaagatacacatctttgagattgatccattccatgaaatatgagggaagcttcaactttgatgctttgcattgctgagggacctttgtcttgagatcccaatttccactaaaacaagtagaacaagaaaaagggtcaaaaacttcaaagtattgtttatattcattatcaattgtgcctttgtagaattcacatagaagaaactattagtgccaagtgttatctataggaggcacttcaaaacttcaaagcaactaaaaacaaaagctgtaatagcttgttgtatgagaatatcttcagttaggaatggagtttgaatgagaggggtgtgaaaaatgtttgggaattgagttttggctcttgcgagtgttgaagtctctcgaatacctcgggtttcagtgttcatatcactattctatcatctaatagcaatatcaaatcggtccattactatctagctccattctttcttccatatttggcctatttcgtagctcttaagttcctatcatcttcatatagtggaaacgaaaacagaagtttataataagaataatgatcaaacttaccatgttacaaatgcagctttgttaagaaaaccacctgaatgttttccccacaactgatgttgagtcaaccaatcttcaaattgttcaagaacgtctgtaaacggtatagctgtatcgtgccagacgctgcatttttcaaa

SEQ ID NO: 77649 - DNA, 917 bp, Cannabis sativa
ctcaactcgtcgcagatctgaaccctaaaccactcacgccagaggcagattgtaagttttgaataaaatgtagaatgtgaattcatatataaagttttcatatattttcgattatcgacaccgacaattcattcgctgcattagagtatgagattgacagattatgttactgacataaagatttgttcgacttattggactcattcagttcgatatcatttagctttagacatctagaattagatattgttattatgattgtggaaacagaggatttctgagattatgaatggaagatggttttcatgagctttgataagatatatttgcggcattattactttgtaattaacataatcttaatgaagttttgtctagtttcatagttacagattcttttagtcttttaaatagaacacaagtaagactcagattctaaatcactgtgtatggacggaaatatctggtgttagtttcttagtcttggttacaaatttaagacgctaatgttttactaatattgagtacttttatgtcgcaaatatcccatttcataatatatttacatattttaagtctaaataaattgtttgatgtgtctgatagcaacacttgaataatttagtgtgtgactttttgtatgcttctgttctgtttcagtatgtttgtgaattcgtgtgtgtacatgtcgtttttgtagtttgataaactattgtgtttattctggattttgggactgtatgcttgtatttgcaagttaaaacaaatataactatcaaataaatttaagtaatcaatatatatatatttatacatatatttttgtgagagaaggtatgttgagatagttcatttacaacaatagtataaataggggcaggaatatctgctaaccaaatagaatcattatcctccct

SEQ ID NO: 77650 - DNA, 544 bp, Cannabis sativa
gtacattttttttttcaggctaattagcattcccccaaatttcgatacatatcaaattgagcgctctgaacttttcaggctataaaaagttccccaaattactgagattatcgggttcaagaacttttattcaattttatcaacaagcgtctgacatggatgaaagttcgagtgacacgatttggtatatggaattatggacaatagctcattagacgtttgttagtaaaattgaacggaattcgttgaaagtcttttaatctaacaatttcaataatttcggggaaatttctaacagctaagaaaagttcgaggagcaaaaaacattttttttctaaacttgtttagaaattcagtcatgcggatcagtgaaatatcggtctccagttccattatctcaaaaattcatatttgttttaactgaatattaccaacctctggatgcattcggtactgtgttttgagcatggtaactggatagccagccttctgaaatcgctcgaacatactcataccatatcttcaatgaggtaatcaagaaaga

SEQ ID NO: 77651 - DNA, 652 bp, Cannabis sativa
caatggaggcttgaagcgaggacgctacaacaaataaatgatatgcctaacatttttgtttagtatctataaatttttccaaaacttacatataatcagggccagtcctgagaatatatggacctaaaacgaattaaattttagggccctcaaaaatatatatatatatataatattaaaagaagagtgttatgggatttgaattcataaccttgaataatatgtcatccacctcaattaactaaattatgaatatttattgcttacaatacacttaaattttacttaaataaaagtctgataaatttttttatttttttattttgggcccccggaaagtgtgggccctaggcacgggcctagcccgcctataccaatggtcggccctgtatataataatattggtaaaatctttaaaaaaaatattgaaaaaatgaaatggaaagtgaaagttttattaaaaaaagctaattaggatttttaccacgaactttgatatgtatcaaattatgtctcctgaacttttaaggtcgttaaaaatgccccatgaactattgagactgttggattgaggacttttgtctaattttagtaaaaaaagtctaacatggatgaaaattcaggggcctgatttaatatatatcaaagttcg

SEQ ID NO: 77652 - DNA, 972 bp, Cannabis sativa
  modified_base (926)..(935): a, c, t, g, unknown or other
tagttagggtgttacataaaggatctacagattcaaacttccaatcagatcgttctagaaaatcaacatcggaatcaatcttcacactaagtggtggggctatcatatggattttaagaatgatactctgttttattcttcttttatttattgtaattaagagtgattaatgtgtgctaatcattgtttagttacgtgtgtgtgtgatgtttttctgttattgtggtctcccttattccaactttagggccacctgtcccttctttattggtgcttgtattattgatcagagtatatatagaaaatgttcccttcagcctccattgagctgagtttttatttttgcattttgtgtaaagtttaactttgtatcagagccaagaaaagtgcatcaatgtcgtcgcactctcagactccacaagtcaccaccatagttgcagcaggtgctgcaagctcctctattcctgctcctatcaactaccatttcctctaaaactcgatcgcaagaactacgttctctggaaaacaatggtgtcaacaataatcagaggtcatcgccttgatggattcgtgatggcactcgtccttgtcctcctgagtttgtctctgctcctgttacagtagaaaatgaaccaggttttggagtcactctcaatccagagttcgaacactggattgtgagtgaccaacttcttatggggtggctgaatagttcgatgactgcaggaatcgcaacaaaagttatgggttgtgattcagctgctgctttatggaaagctcttgaaaatttgtatggagctcactctaagtcgaaaaatggacgagactcgaactttgattcaaacaacttgcaaaggctcaatgtcaatggaggagtacttgaaacagaagaagaactggttagatgttgggttttgtgccctaannnnnnnnnntttcaatataatcaggtttacttattaataaagatca

SEQ ID NO: 77653 - DNA, 1057 bp, Cannabis sativa
caattgggacaaggtttggggacagaaaatttgactctgtccaattctctctccactatatgcagcaatgctacctgtcctcagattaatactaattcaaatttttgtttagttagtttttcctgaacactttttctctctgtgttctggaactaaaatattttgttttcagaaattgaaaattgaagtaaaatagtaatattactaaagaatacacaataatttattgatatataatgcataaataaaagattatttttcttatgtatatttacttttttaaaaataataatattaatttgtattatcatttaatattttttgacaaatcatttactttatctttataaaatatttttttgaatggatttttataaaataattttaatttacttagatgaataataattaaatatgtaggtttttttttttctctctttcagatcttataaatataatcttaaaaatttgtgtatgaaaattattgtgtttgccaaaattattaaaacattatacacaatttatgggtgactattcaatggttatatttttattgttaccatatgattacattttctttgacctgtaatagcaggttacgaataggtaaaaattctatttttagaattaattaattataattatctatttttaaagtaattaaataaatatttaacaagatattttttagcaattaaaatttataaatacattttttttatttatatataaatccatactatgattattttaacactcaagccatttaattataatatttacaatttttttacaaaaattaaacttatttttatataaattaaaattttgtccttataataaatttttaaataattaattttttttacaattagatgatgaggcctcaagctagtgctgggcctcaagcttataataaatttttaaataattttttttttttaataataaaatggctcttgagctattttctaaaaaggcacctagacatgagtttaatggttgttgccctgaagagttagtgaaattatcttatgagattctcaaaaaatgtcga

SEQ ID NO: 77654 - DNA, 551 bp, Cannabis sativa
cttgaggttgaagatgaagaataaaggtattttcggatttgggggtaatattgatgatttttggtgtgatttttgatggaaagtgaagattgatgagtaaaattgggttttaagatgaattgggatcgagtaatcggtaaagagatagaaagattgaagaatggtgaagaaaatttgaattttttggaagagagaaaagcttgggcggctgagaggtttattttgaatttgtgtagggttgaatgggggggggggaatagggtatttatagaaatttcgaaagctggtcgcgactagcccatgggcgggtcgcgactagcttgaatttgaaaaatcaagggttctagaaattggggtagtcgcgaccagggtcgcgactagcacgaaccctggtcgcgaccactaggtttccagtcccgaaaagtaaattttttttttcacgtttttaacgattgaactggaaaattataatgtctggtacttaactacaaatttaaaatactaaaaacactaacacataaactaaaaacataaccaaaaagtctgaaaaa

SEQ ID NO: 77655 - DNA, 559 bp, Cannabis sativa
cagattccaaaaaggagaggaacctgcacccaaagcctgcatcagatgaaaattattagtgtagagattaatccctcccagatggagatttgaggctaaatccactccaaacctcagagcctccaattccccatgttaaacagaggagaccaccactttcttcgcgccaaacgccattacagaatcaaagaaaacagcagctgcagcaccaacgtccttagatttagtaaaatctacatagcatctaatccttccaggtctcagaagaccccaacgaacctcctccactcctccataatctttcccagagacagagttaatagctagccgcctatgctcaagaaagttgtctttcacctgcttttgcactttagtcagatctaagggagtaccaccaggatacatcgcatttcgcatcatccacaatttatgatacaacaaggtaccataaagaaaaaattctaaagcttccaccttagacagaagatgctcaaaggagggattggagagctaagagaccaattccgtgtcagatgagaaaaggagagaatctggtctt

SEQ ID NO: 77656 - DNA, 761 bp, Cannabis sativa
acaactgaaatagatttttttttttgttatattcttacaaattatttttatttatatttttataattttgtattgttttaatgttattttcatattatcgcaatattatatcatatttttacaatatgaatactttttataagaagaatatctataaaaatataaaaaaaattcagaattctataaaatatgtaaattttttattattttaaaatatttttaaaataattccattttaagaacagctcatcatataattgaacttacttagcaaataaatgtggtagagaaatggagattttttatatttatatgcctatataacaaaataatcttacttataacaatagacaaaaaaaaaaaaatattgcgtacactccattatagatcatttgaaatgttctaaacctttgcaaaaaaaaaaaattcgagctagtgaacgaagtaatacttgttggtggtagtgtcaatatttttaagcgattattgattttatttatttgttctgagttaatctaaatttaaagtgagtgggtgttatacaatcatatatgcatggattagtaaatgtatatatgacatcagtttctaataaagccattacgttatgttattaaagaggaagagagacagtgtggaagagaagttgaaaggagagtggaagtagaagccatggttgagcttgattttccaaaaaatctgaacgtaattgctgccatttctgggtctctcgattcggctaaacggttctccactttgac

SEQ ID NO: 77657 - DNA, 554 bp, Cannabis sativa
tattgttaggcttttttatttatgacattatatatcaaatatataatgttacaaataactccttttgattccttatttaaaataaaagaataattagcaaatttccatcctgaacttttgacaatactcattttggcccttaaaatatacggcttgttaagaatcccctctaaattattatatttacagaaatttagtcctttagttaggttctatcccattattctctttaaatgatgacgtatctttttcaattagcaactttgcccccaaactttttcaactatcaattcgtatccccttaaaataaaaatgacaaagattcaatatttttttagaaagtcttaaaaaattaatttagatcttaagaaaaattattttgaatgattaagaaaattaaaaatttttaaaactaattacacgatataaaaaattatttattttttattagaaaatttacttagatcttaaaaaaatatatttaaaatagaattgtaaaaatatattaaaaactaaattttacaggaacaaacttgaatatattttgtttttat

SEQ ID NO: 77658 - DNA, 825 bp, Cannabis sativa
acaaatatatctcagagtgttataaaaatgatgtattgacattttttaaaatattttagtaaaaatagctccgataacagtgtaaaaggtgtgaatttgaaatctgagaacccacttttttttttcaaggttataccatttgtagaaaggcaaagcatatcccggatacaaattaattagaaatattaaaatttataaatattaatttcttatatttttttacagagtgaaaaaattcaattttctttccaaataattaatgagctgatctgcgacactgttcttacgaaaattggaaacgcaatgttagttttataaatgctgagggtttggaattgttgcaaataatttaaaaacccttgcattattgtacgtttcatatatctaaatatgtgaatattacattttttttattaataacttgcgaaaattaattggcatttcttctgtataaatatacatttttcgaaaaggaatgtagctactagctagtaagtgattcaaacatttacctgtgatgatgatatatttatatatatatatgttgtagagtaaatttttctatttttctatcttcttattactaccaattccagtgtccatttatgcttttttaagatcagcatttatattgtgaatgtctttatcttgtatctaccataattttctgtgtttttctttcttcttcgttttttacagcactaaactattccaactaaaagctgtaaaaaaagattaaacattaaagtcctcctttcccaataaaatacaggtgtcaatcaaggacaagaattaggatctttgtgtgttttttttttctttttc

SEQ ID NO: 77659 - DNA, 1805 bp, Cannabis sativa
tacaaacaaacaatcaaccatgtcttcctcatgacagtccaatcgaaccactatatcagacttgcattgtactacagagaaccgtgaaatacatctaaaaatactagtgcttggaatacttgatataatcataacaaaaattgtaagtgatttttctgtgtgagaaaggaataacttttctccaaaaataaggtacacaccacaccatctcggtcgagacaatgcgcctgtgatattcaggtcatgaacctttgtatgactccacccctcttccaaaaaaaaggtacccaagcccaacccaaaatgctcatatctacactatatatacacttataaataagtgttcacaaaatgcacattttcatcattttttaataattcgtaaaaatgttctaacaattcaatttttttataaacattttcatcaaggagtaatctaaataataagattgatagacaaatgtatctttagacttggaaatttacataataaatacaacttaaaatatacgagtgatttgtaaacatataggttgacttgagtagttttatagtcatttaatagtgtaacatacaaacatgaatacaaagtacaaacacaatagttgactttaattatttattcatgatttggtggtgcaactccattattagcccctttcaattcttctgttagtacataaatggaatccgacacttcagccctatacacataatacttagaaataaacaagaagcaaatgaggttaacaaagctcaacaatgctaaaaaagcatagtaatagtcaagatgtgaatcatttaggttgttgagaatccaaccatgaccatttcttttggttatattagaaactgtagaaagaagaaaactactaagaaaccctccaacagctacagttgtcatgttataagaactcccaaggctcttcatattttcaggtgcttgatcatagaaaaaatcaattttcgccacctccatgaaggcgtcggcgattcccatgaaaataaattggggaagcaaaataaagattgagagtggaacttgtccaccactcttgacaagcccttgttcccttgcaacacttagtctgtgtcgctcagtaagaaaagcaacaaacataactatgatgtggaaaatcattccgattcccattctttggaggagtgttattcctctagggtttttggtccatttttggatgatcttgacaaagtaccaatcgtagagaacaacgctgatgagcatggttagggttacgaatgcgctgagacttgcgggtgggatttcgaaattgcctatgcctctttgtagagtggttccttgtttgatgaacaaggtgttgatttgagcaagcacaatacttggaacaaaagttgctacccatattggtagcatccttaccatttgtttggtttcttccactttagtcactgaacataatttccatggacttgtagtactacttgagcctgttttaactgaagctttgctaaggaacctaaaaaatcccacatctcatattcattaaattgtatatagaaatatattatatatattagttatattaatgtcttaaaaatatccaaagtaaatatgtactttattttaaggtaatgttgtaatgttgtaattttgtttttcttttacaacaaagtttaaactgttttgaataatttaaatgtcaaaattataatttcatagattgtttaactataattaagttttatataaagtctaactacattatgcaaatcgcttacgtaccaaaatactaaaaatacttataaatagtaattataaaaca

SEQ ID NO: 77660 - DNA, 938 bp, Cannabis sativa
ccagcaacaaatgtctgaacaaccgttggagatgacaccgagatccaaaacctctgtgatgctcttggactcatgcaaggccatactaatactctgcatcataatcaggaatagctctgtgttgccgtgaacttttcatttgaagaacataggcgtctattcactgaatggagggataaagaagtggaaacattgagggctcaacgagcagccattgacgactgaacaagataggccaccgtactgatacaaagagcctaccaagctaccaatcagcaacctgtaaccagcaccccgccaggcgagtcaaacgaagatccagctaggaacgcatctcaaactctaaacggtcagccgcccaatcctcggccacaggtttcatctgtgggccaagcggtaggtggccagaccttatctagtaactcgtcaggaggggttatacctaataactccacccagaccaatggtttcggccaagtgcttggccaaaccaatcagtcactgagacaacttaatgcatctgtatttaatagactcggaacagctcatgatctcagagaagatctaaatagaaggaaagggttagacgaacagtatgtctcaccagccacccagcccgggacttgtgctcaaaatccaactcaaggagatcttgatgtgaccctggttggccaagaggccaaacaagttcattcgtccgtgcaagcactgttggatgaactgaaaaacatgttccaaggtctaaccagtcagaagaacaatgatctggagttagaccgagcatgtggatccctttttactccagagatcaatgttctagagttgccccataagttcaacatgtcgacctggaagatgtatactaggaaagaagatcctttatcacatctcaaatattttgaaatgcaaatggacctacaaggagtacgaggagatgt

SEQ ID NO: 77661 - DNA, 694 bp, Cannabis sativa
atcccaacttttccaatgaataccacctccttgagaagccttagagtgccaccagaatcttcccatgaggcgatcaatatctttgcaaatttcaagggggatcaggaaaacactcatagtgtaagaaggcaaagattggataacaaatttcaataaaacctcatttcctgccctcgaaagtaacttactatcttaattttgaatgtgtttcctaaccttctccttcaagaaaccaaatgccacattcttatttctaccaattacactcggcagaccaagataaaaattgtggtcatcagtagctctcatgtgaagagttgatagaatcgtatgacgaaccccatcatccctgttggagctaaaaaatatagaagacttattcaaattaaccttttgacccgaagccttttcaaacttattaagcagccctagaacacgttgcgcctcctccttggtagcagtacagtacaggaagctatcatctgcgaacatcatatgagtgacaaaaggagccctacgaggcactcgacacccatgaatctctttcttctcttcgtaaagacgaattagagccgagaaacctttcgcacagataataaagagatatggtgaaattggatccccctggcagatccttctagaaggattaataggcctaagaacatctcctccatgaacaatgttataagaaata

SEQ ID NO: 77662 - DNA, 3897 bp, Cannabis sativa
acaaaagtgttaccaaacggcacaatttaataatttttttaaaaaaccactaattaattacaaaataatacttataagtagtgaatagtgattattttgcattagagtcccactatttcaaagctgacttgtcataattggacccatatggtactacagcctattatgttccttccacacaccataacaaaatgtccgtttaaatccacctcacaaaaaataaaaataaaaataaaatcttaatatcaaacggtatttcatttgtgtggcattcgctaagcttaatataatcccttctctctctaaattatctctctctctctctgctaaattctttcttctcaacccaatccatagcttatttggccaaaatctagcttctcgctgagtctttcgagctcaatcaatgtctgaaattctttctgcttctcagttccagaggacgctctttgtatagtgtttttttttttgttctttcttggttttagttcgctgtagatattttcttcgtgacgttcctcttcttcttcacaacttcttcttggaattttctggggcgcctttcttttggttgtttaatgctccgcttgactcaatgattttgttctgttccattacaaatggcctctgctccttccatgtcgggtatgtgtttttatttgttttttttttttaattattttctctgcttcctataaaaatggtggatacttagtggaattgtgattttggattttggattctgggttttgttatttttcattaataagtactgaattcgagtgaacttagagcatagtggattactaaggtgtcagtcttgtattgttttatcgaacctaaggagtatataaacttggaatttttaatttagtctgttaacagttttatgaggttcaaacaatttgattcttgattaattcttcatgagttttctgggttttgacttattaatccattgttatgtagtttctctagaatgcgtgaacatttgtaagttaccaaaaggggatggaagtggcagatatgactgtaattttctctcatgtgcgtggaaagctccgagggtcttgactgggttccttgcgagtacagctcatcctccaacgtgctctttgttgtcttatgcacgaaatgggagaagaactcgaatcaattttgtaagtttctacgagaatttaagcactggttgattccactccaattatgcaattttttaatttttgttttggtaaagttgatgcacatatcaatttaataatcattacttttaaggattgttaactaactcttcatgttttgaaggagaaaggttattacttttgtgtctttattttgcttaatattattgttttaacattgtactcttgccagatgagtgaatcttccactatatgtggttggtatggtggtgaaacttcagatttttcacacagaaatctcattagatcaagcatacttcatgttgcttgcaaacgatggaagttattatgctcttcatccttaacttcaaatgtcattgacgaggtttctcctgaaaggttgtgggaggtataatatgttttgccaaatctagaatgtttgaaaataatattaacctgccaatttggataatgtggtgttttctcatgatttttttaacttgttgtttggttcgtgcaggatcttagacccactatttcataccttccacctatagaattggatttggtccataatgctcttaaggtcagctctcacttacatgaagtaaatttagtacatatttttctgtaaaacccattacttcaaacatgtggttgtctttaaattcaaaatagttttgtgggttcacagctggcttttgaggctcatgatggtcaaaagaggcgcagtggagaacccttcatcatacatccagtcgaagttgcacgcattctaggagaactagtgagtcttataagtggaaaaacatgatactatttattacattttttgtatattgtttttgtgaactacaataagattaagtaccatcttctttctaggaattggattgggaatcaattgctgctggattattacatgacacagtggaggatactaatgtagtaacctttgaaagaatagaggaggagtttggttctactgttcgccgcattgtagaaggagaaactaaggtagatttttcattttttggataaatgcttttttggtacccattgttttattgaaatacaaacttggtacctatcttttcaataatatttatatggtaccttgtaatttgaaatagtacatatttggtaccatggactgaaatttggataaattaaatgtaactgaggacaacttggttatattgtttaaattagttaactttatttgggccacaagatacgaaatatgtacaacttcgaattacatgtactagatatgcattattgataaggaaagagaccaagtctgtattccaataaacacagggcacctaatagttaattaccttttttttttcttcttcacattagattaacttaaaatattttggattggcttaatgtttatttatatttttggcaggtatctaagctaggaaaattaaaatgtaagaatgaaagtgatacagtacaagacgtgaaagctgatgatttgaggcagatgttcttagccatgactgaagaggtacctcttattaccttttttttttcttttttaattgctgtgtgtactttgaagtcttaacccatttgcaaattataacacgtgttgtttcaggttcgtgttatcattgtcaagctggccgacagattacataacatgcgtactctctcacacatgcctccacacaagcaggtgacttgttattcatttaatttactgtctgttatgtatctactttgtcagacctggtgttacattgaatattactcttgtgttccagttcagcattgcaagggagacactacaggtgtttgctcctctagcaaagttgcttgggatgtaccaaatcaaggtattgccctattcatccgtcttctgctattcttttcaactgcttaattaattagattttccatttctgcaatgtttgaaagagtagttgatttacattacagttatctttcatgatttgatttttcttttcatgttatccatttttaaaatgttcaaatatgttatagtggtatctggacttttaaatacaatttaagggatggaacaatttttgcattcaaataatgtacctacactgtattgcagtcggaacttgaaaatctttccttcatgtatacaaatcctgaagattatgctaaaatcaagaggagagttgccgacctctataaagagcatgagaaagaacttgagggggtacgagttatctagctctagagattactaattcgtgggatactatcataacatcagatggcagttatcaagtatagctttctagtacatgatataatatatggatttcaccatagtctgcttatcaatacttgtcttttacaggcagacaaaattctgacgaagaggcttgaggatgatcagttcttaaaccttatgactgcgaaaactgaagtttgtactgtttttaaggagccttataggtctaaaagaataattcctgctatttttccttgcactttgcacttaatatattctattttaatatgcacgtttgtatttagaaggcctagaggcttttgtgattttattttgaggggatgagggttttcgttcagtttattgaatggtctacctattaacttgcagtatctataaatctgtgctgaaatctaaaggatcaatcaatgaagttaaccaaattgctcaggtttgtcttgatattttcttcaactttactatattttgcaaggaaacgtatgggactaatgaatttcttgacttaaa

SEQ ID NO: 77663 - DNA, 3493 bp, Cannabis sativa
ataatttatttcaacattctccaacctgcttttatgggttatcattgtctaccttctactttattggtcactgtcaccgtttctattatttttgtgtttacttatgcaattatgattattttagatgacttaatttgatttgagccaagtacatttttctggttattctattgttaatgtatttcaccattcttcaggtcactactttgttaaatcagatgcaattgtatgctgagcattctgtttcaaacaataaccagtgcactatcaatgtatctgtgcctccaaccaggagtgacgtgcttcacccatgtgatgtgatggaggtctgatagtaaaagaagttcttagtttactgatgcttcttgaacgtatctgtttaatttccttctcaatacattttctttcaggatgttgcgattgcttatggatataacaatattccaaagagaaagctggcatctttgcagccacttccgttgaatgagctcagtgatcttatccgacgggaggttgttttatgggaaaatttgcgataattatcaattttggattttcatgccctttcatatttttcttctgcttatgtatttctctttatagatcgcaatgaacggttttacagaggtcttgacctttatactgtgttcctggagagaaaattttattatgctaaatcgtgaagatgataaatcaacagcggtggttattggaaatcctcgttctgctgattttgaggtttgcatttttaattttgtgttgttgtagtttctttgtgaacattttgacttgtggtttgaactaaacacagtgggcattatttaattgtgatcatttgcaagctgacagattgacaacttattttaattgccttgtaaaagatacatattgtttttcgtgagatactacttttctaggattcgttattagtttcagtttttatgttttaagagtttgctttttcatcagtgtaggaaaaaattacgtttgtattgttgtcattgttttttcttcctggatatatttcctaacttctcatatgcatatcattaatgtcactgcttcttgacgtttcattcttatttaaaatgttgagcatatatatatatatatatcacagtaaaatttctcctagttttcatatggaaagattgataaaacattgatttaaacagcttgttcgaactagtctgatgccgggtatattgaaaactgttggacacaacaaagatcatccaaaaccaataaaggtaatattagaagttagaagtttcactcattttatatttgttcgactttatgtggtagaaatgcatttactgaacttatacagccagctagattgttatactagaggctttgagtagcttgttcccaggttttatagtatttcataaattaatttctaatttttattcttggttagtgattttaccttatagagtagcagtgctttgtttccatgtcatatcgaaatggtggattgtctcaggtttagcgtgcttggtggttaatttttttaaagtagcaatattcttttctgctctctttagtttgtgcttgtattaaaatctaacttctttttgttatcataagatctttgaagtgggtgatgtagcagtattggataagacgaaagatgttggtgcatcaaattgtcgccgactagcagcactgtattgtggagctacctctggatttgaggtaaatactaaaaagctggaattaagtatggtcttacgcattcccatatgctacaagaatctttgtttttttttttcatagtttttccttcacttgtgtgtagatatttttcatcatcctttgtacatttctgtttctgcagttttttaactgccgaaaagcattctatttttaacacgatatttgctataaaatgattagtttgagttgagatatgaatcctggaagcaggaaacgttttatgaatttcaattaaatagtacaggaactatagtgtactgtactgttcaatcaaaagatcctgtaaccaatcattttaagattagtttgaaagccgttgattgcactaatggaatacaggattacgaagatatggattagtgcattttaacatattggtctaagtatttccctttcattagtcactcttctaagcccaatggaatgttttttctccttatttgttttgtatgtgtaagttgacctttataatttgattttcagttgattcatggccttgtggatagaattatggaagtgattggagctccttttgttccgcttggtgacaatacagggtactctataaaaccatcagaagtgagtattttctcgatttgagttttctttggctaccttggacatttaaggttaccatacttactttgtttgtaccttgtgaaggaacctgagtatcttcgtggaagacaagcaagcatcatttacaaagggaattgcattggcacatttggcattgtgcaccctgaggtagatttcattacattatgtcgagtattattaattttgtctcacaagttggctacaacctacaaccatcaacttctatacacacaacttcatccaaatcaccttttttttttaatcgaaaagaagaaataagtgtttacttgtttggcttctcaggtattaaacaacttcgacatccccgatccatgctcttttgtagaacttactattgaaaggttcttttagttgctataccatggcagctgacagcatatgtacgtcatcgctcatttatctttataccaattttctttgcacctgaaggaactttttttttttttgataaggtttgaagttaattggctcttcaacttgctcttcaactttcaagattacattgtactttttctaacaacactaatgtttgttattttagatttgcaggtattgtaagatcatggagttgatttaaaacctgtgatggtcgtagtacaatttcaaatcctatatctgatcgcagagtcaatttgatatcctactgtttggagacccccgatttttatttaaggtttgaagttaattggctgatgtagttttgatgtatttatagtgttttgtcacaaacaaaaagagaaaaagcccgtgtcttccaataaaacaatcaacattaatatgttaaaaacagcttcaatttaaacattttacattattttcacgatcatcatcattggctactactagtcctgtaaataggagttgagttttgacacgagttcgaaaggcatgagcataacatggcatgaaaaaatacgggtttgaatacgacacgacatgatgctgtaaattggcatgacatactacaaaaatatctttaagcacaatatggcacgagaagcacaaatagactagtttaaaaagtatgacacgcggtaaactcgaaaagtacgacacggcataataagacataataaaatatgaatttatcaattataaatacaaaaattatatttacattctataaagagaaatttgcggccaaacc

SEQ ID NO: 77664 - DNA, 526 bp, Cannabis sativa
gcttagcatccttcaatatgtgatatcaatattaatgtaattaagtaacgaatcttacataatttattaaaattacttttacgctaaccaattacaaggtgcaacctctcgatagtactaagtagggaccactcgaactggtgcctaagagcatctccaatgaaagttgtccattagagtgatcttgttacatatacaatgtggtatactggtataatttttaagatcaaatttatgtatagtgttgctgaatatggatcatgatcacatgtcatttttttaatttatttattttattgagaaaaatttattttttactaataactcaataatttaatgtgatgtcggtttatagtaaataatttttagagttgtaattattaaggtatttttttagaaaaaatgtattaaatctaaagttgtaactattaagatcttatgtgaataaaaatagtaatattttaaaataatgtgtatattttttataattataaatactgcgtcatctaacagtaatgtaacaaaa

SEQ ID NO: 77665 - DNA, 1059 bp, Cannabis sativa
  modified_base (136)..(137): a, c, t, g, unknown or other
tatatataaacttaataacatgaagaaaattacaatgtaattcttgcctatcttgaattatacaaaatctaaacaagaaattacaaaagcaaactccatgaatgaaagctgtaaaccaaactacaccaaaaataannaacaaagaaaactagcaactaaaaaaaaagaatgagaagctcctaatctgactccaactcggaagttggaagcacacgcccctcaaactcttcgaagattatctaaaaggcatgatctcggctgtgtgatgctagtagagcttaaactgtcctttgggagccagattgaataagatctctaagcacaacaaccatattatatctctattgtcaaagtcaatagctgaagttcgaaaagatatatatctctgtgactctgtcagtaaatgtctacaaagcataatgcctctcacttgtgctaagaaaatcaatcattctatgatatattataagatgcccaaaaaaattgaagcagaaatacaatatgctccaaaaaaatttcaagtttcttatataatcattaaagcacttacaatacaagtttctgatataatcagccgcataaaacctaattgatattgaaaactactatttaagggaaatgattgagctattaggttttctcctaaggatttaagactatacacgtgtttggaaaaacacaataagtcaacgtgctattcttttagttttaggtggagttaaataatattcttataagaagactaattaattaaggtgttgtttggtaacacttttgttttttattttttaatcacattttgaaaaacaaaaatgcgttctataaccacttttgtttttcaattttaaaaaaagaaaacaaaagtgtgttctgtaaagtttatttttaatttttgattttatttaagtggggtctaggtctggggtcggtttcgggttcgggtcagaggccgggttcaccaccagagccctggggggaggatttgggttcgggtctcgtcgaagtctaaaatattaattaagaaaaaaaaactgtttaaaaaatattgaaagtgacttt

SEQ ID NO: 77666 - DNA, 548 bp, Cannabis sativa
ttaactgcacctttggatagcctcatgtccgtgaaaactcgaacaaggcttgtccgaagccgtgtctcgaccgagtatcccccaccatccgcccgcgtgtgctaggaaaccctagcctagatatttttcaaactttgaaaaatcataactaattcaattttaatccaaataaagttctgcaatagccaaaattgcttaatttttcaccaacttttcaaataaaaaatttccagaacaaaaataaaattattttttatagaaaatttcataattcacattcaatcatcaattaaacatataaaccaatatgaacacatccaaatcatacaaacatcattttaaatccatatttcatgaaaataaattaccatggctctgaggctagttgttggaacttgttttaccaggatttagatttactaacatgtatgttgattatagaacaataatctaacattgtaaatatgaatttcctaaaataatgaaataaacacatataatgttataaaaaaccttacattggtggcaacgaaatataatgtcttctt

SEQ ID NO: 77667 - DNA, 844 bp, Cannabis sativa
gctctggcctccaagagaggaccctctaaaggcaccttccatcgaaggaaggacccttggggaaccgtccccaagaacaacaaccgaatcttgtccccgatactatgtaggagagacaggatcaggaattggcaagccccatgtgaacttgggagaagatctcgagttaaccagactgagagaggttgtctatcaggccagacttactgaagaaccacacactgctggttacgatgtattcgctcagtagagacgcgaattcctgagattgatggatgactaggagtacatccttcgatctcactaggtagagctgaatcgccgcaacagagaggtcaacaacctaataagtacgttcaatcatagaacaaatggaagaggccaggatctcatcagagatccactccaaagaggactagttgatagatcaaggagggtctttagacaagtcaaccaaccagattctttaggaatgaggatagatcttcccttgttagagggaggacaaacctcgccacaaaggtctaatggcgagaatagccagatcctagcagccattggcctagggggttggccaggaatttttggcactacaacgcccccaattgtcatactcatggttggctagcaccctagaagtgcacctctagccagccaacaaggtgaattcttgtcccgagacattggggagcgagtcactaaaaggtcaatctttaaccggcaaggcctgggaacgggtggaaacacccaagacaatattaactcgacaagtgaatacaataactttagctagttagatccaccaaactctagaaattggtgtgatctagcccatgtcaatgca

SEQ ID NO: 77668 - DNA, 679 bp, Cannabis sativa
tggctagccgcagggactcctactggtggctagctgaccataggatggatagcgggggctattgctaagcctgagatcccaggcaagccccatgccgctggttgttgggatctgtctgttcttaccgatagacctttgaggtaaggtctatcctccctctggcaagggaaagtctgtcctagtccctgaggggctaagttggttagcttgttaataaaccctccgtgatctatcaagtagtcttccttaaagtggatctgtgacaagatcctggcctcttacacgggttctttggctgaactgccttatagattgatggcctctctattgcagtgatctaactttgcttagcgagattgaaggattcactcttggtcacccatccatctcaagaattcgcgtctccactaagcgctacatcgtattcagcagtgcatggctcttcaaggatttcgcgtctctactgagtgaatacatcgcaatcagtagtgtgtggtctttcaattaagctgacttggcagacagcctctctaagtcttgctagcttaagatgttctctcaagtccacatggggctcgccaattcttggtcttgtcactcctgcatactattggggatgagatccggtagttgttcctgggggatgttccccaagggtccttgcttcattgggaggcgc

SEQ ID NO: 77669 - DNA, 1495 bp, Cannabis sativa
atgttccagcaagcacgagcatgaccacacccaactaacgcatgaaaaatagtttcaactatagtgagacacaacgggcatgttaggttaactggaacgtatcttttttccaattggacacaagttggtaacgagcctgaagccaccttccataaaaagttgctgactttaaggggaacttttaaactccataaatccttccaaaaacccatagctccattaacaggccaagctcttttttcttcttgtaagaacatgtaggcactcttaaccgagtagtgccctaatcgttcaaaccgccagcttcaatagtcagatattgcattagaactcaattgtatagaaaaaaatcagctcttgatttagagaagctactattcatcacttaaaaaaggttaaaatagctcattttatagaggtggttttttgacacttttaaactgtattaattttagctgatcaaatgagaatgctcgttcaattagttgctaacaaggtactgctattgaatttttgtttgttaatttgtgccttctaaattggattgaaactaattctgttcttgattgttgttcactcattcttagtcaattattagatgaattaatattaattttttaaagttttgtatagatttgatgtgttttctctaagtttgtaagtttgtgcttaaaagataattttgtgatagactgagatctttgagccaattttttataatattttcatcattttctcaaagagcttatgaaacctaaaatgatcgagctcgttcccaacttttcaaatgttaaatcatctcatttgaagtccaaatgcgttactgagcaaggccgaagtagtaaaagagcgacgaaaaaatagcctgtagcgctatagtgccaatcctgagaaaaaaaataaaacgaagaaaaaaaaaatttagcacatgggtgatatcgagaagtcatgtatggcactatagtattgtgtctttggcgttatagcgccgtacgagtatttttgaatttaaatcctaattttaaatggattctttctatctttttggatctatataaagaatgatataattcgaattttgagacgggtggagagatacaaatgagcaatcttgagattagaaaatacaataaagagcaagaatctgttttgatgctccagagagggtagcattagatttggaagaactctgccatttccacagcatcgcaaagagacctctcgtgttctcaatctaatctcctcgtgttcttctcatttgtattcaatttcatcttactattaactgcatagtatacaattggttagtagtatagatacatatacttcacatcacatgtgagagcatatttatattattattatatagacaatagatgtatgttgtcatttcttcacctattaaaaagcaacataactctaggtacaaaatctctatgtataatctggtagatagaatcttatgttctacatgttggaaaattctcattacaag

SEQ ID NO: 77670 - DNA, 1141 bp, Cannabis sativa
taggaccataatcccacttattacctgattaacacataatataaatataaactctaattatttcctattagatttattgggatattacaatatctatctgtacattatactattaattttcattagtctcatagttagcttctatctctctattttttttttctattttcataatcatatatcatttttattttcaatgcaatcaaattttagtttttattcacacatcatcatattaacaattgatgatgtttttatgctccattagtttgtattgataatatatctatttttatttataatgttgattttttaagtatgacatatattgctttttatatattaataatgatttttttttaggcctatccatgtagtcaatcttgatttgattcaatgcatcaagtagtggccctactctctaaaggcatggatgagaattctacctttaattgtttggaacaataagatttcacggtaagtgaactcaccctcttttgatttctacatctattgatataaagaagaagtaatttcaatctaaatagattgttatcatggtaagatgagatcgtttctaataattacaaaaaataatttataattgtatatttggtatagttataaatgtatttttttcttttgaaaacatgtataattataaatatctataacaactatcttttatccttttgaataataattaattagtttacaatatgaataattaatatgtctaaagaattttattttattttgtttagaaaattcaactgctattatgaaccacaaatcgtttacaacaacagaaaaaattccagttttttcttattttattataacaaatatgaatttactaatttatatatataaatgagagatatgaagcgatgacatgacattctaaaatcgctttaaatggctctttttcttatttgcttaattctcttactttttgaattttttaatttcattttctaaatattttaattttttattaaaaaaaaaacagttatacatatttaataatttttactttcttaaaaaaaaaaaattcaaatatacggcatgtttatctcatttaaaattttcatagttatttatatagtagtatgatatatctcttttatataaataatca

SEQ ID NO: 77671 - DNA, 592 bp, Cannabis sativa
gattttgctaccccattaatatgtatataatgagtttttcttttctcaaggtttgaatgcaaaacttattttaaaaattactcatattaccagtttgtagcgcccggtaacttggtttgttttttcaagacacattaattgagaaactaaaagtcacttgatatgttgctaaattgttaagttataacactaaacaagactgacattttatttattattaatttatattgaaaggaatatgacattggaagctgccatgaatatttatgaagaagcaattgctcacttcccaacacttatattctcctcctccttcctggatcacatctaagttagtgcatctttttactatcagatcaaggaaccgacgcctcacttttcaattcagaattagatttattatttatttgatgttggtttcagtgattatcgtactttattattttatttttttttcttgaaggcttcatcctactatctctaatgttataaaattgggtaaatagcggcaaaatcccaatactttcgttttagtttcattaaaccccaaaacccaaatttttgcgggtaaacccccaaaaccaggaaactg

SEQ ID NO: 77672 - DNA, 915 bp, Cannabis sativa
ttatttgataatctagctatattttaatattgtttaattgtattatattgtttaatcttgatcagttcttttactatagaagtactaatgtactagttttaatatacatttactcacacagacacttctatgtataaaattttttgttaaattaattaacttttgtttatgattggctgcttggaaacaaattacatgctcttttaatcttgctttgtaattatataatttggtttattattatttgtatgcggatgatacagtttgcatagtctttctttcaggaattacctaattgtatgtatattatcattgtgagtagtgttaatttctcaataatgaagtactggactgattgtatgccaaaggattataaacatatatatatatctatatattatgcattattttctgcaaaagattttgtttggaaagagttttgattgtttctagaatgattatctcttgttactgtttttcttttccctgctttttgtttttggttttagagagataatcagtaatatattcaaaactttttcatggtttaaaagctttataggggtttctttattccataacttgaagttattaaaatataatagggtatttttagtttatttggaacttagaagtctaatcataataataaaaaatttgaatgttatattaattatctttttgtatgtatactacctaataccataaaaatttaaaaataatcacaacctctatttttcattagattttattatagacgcacttgatgtgctacaataatccatgtttttcgattaattgtttaaataattttgaattttagcattttgaagcgttttattcttgtggaaaatgggttaatatactaaatgaaaggaaagtcgatctttatttgtctatgtataattggttttt

SEQ ID NO: 77673 - DNA, 933 bp, Cannabis sativa
aatagatagtgataggctcttaacatgacaaaataacataagctcctcaatctaatttgtaagataaagaaaagagccttctctatctattttgaaatacatctttctctctttcttcattaatttcaaacccctatagtgataagagtaccttgcccactcatatcaagctagtacccaatcatagtgtggaagattgtgaagaattccaacacctgaaggagattcaggctcagttcttgttattactttgcgactgaaaggaacaagagttggagatttgagcggaaggaaccatattattctgcttccaccaatgtaagattttctataactttataagtgtttaattcgttgttttagaaagtttatgtttagggtgttagattattgaatataatcaacatagttgttagtaaatctagatcctggtaaaataattttcaacaaataattacccctaacaattcttatcatcaaaccccaaaaacgaaactaacaattcaatcaaaaggctattaggctcttgaggttttagatccctcaaaatgtcatgagatatttcgtatgagaaatttcattatatatacttaaaaatatatttatcatgagtttttaaatttttaactaatttatacctaataatgcttattttaactttcttttccctttttaccccgtcatattagtaattgcatcttagaaaaataactctctctcttactcactcatctctatgctctctctttttataattaaaaaaaacccattaaagaccatacggatggcgttgacggcagagattccgctaaaatcatgaatcacacacaatgattgtacgaaacctgctgcacttgcaataatggttaagtgttttacacaataattttttaatcattttgaagaacatgttgctgtttttttttttttttt

SEQ ID NO: 77674 - DNA, 638 bp, Cannabis sativa
cgttccttatttaaatgaaaaattcccactctattagggatgggttccccgtggatcttatcttatagggaaaatgtgcatctctaatgtttgtcattttagtaaaaaagaatgtcaagaaagaatgcttaataatgatacccttttttttcttttttttttttatattattttattttaaagtaacaaaaataattatttaatataaattaaatagtaatataatattattttaatatgtttagtattggaataatttataataaaaagtattaaaaataatatagaaataagaaaataaaatagcaagtatttgttggggacgtgagcttctaatcaagggactgcgatataaaattggaaataaagttacggtgaattgtgcttcagacccatggatacatggacatcacaattttcagccactttcatactcaatgccgccatctttaatagttgcaaatctcattaaagagactagagaatgggacaaaaacatgttagactcttatttttcttctgacaggattttgtctatccccttaagtatcttccaaacacaagatcggctcacacggttaagtcggggttccatttagcagatgagttggccaaggtagatgattctttgacatcaa

SEQ ID NO: 77675 - DNA, 550 bp, Cannabis sativa
gtttgttttggagtaatgaaatttctgattcatcaaaaaaaaaaaaaaaaagatgggtcggaggtatgtttacaatactgttacaaatgtatattttagaaacttttatatttatttattttgatacatgtgttggattatttttaatttttttccactttaatttaatgtgctatttgtagtttcagctttattttattttcttgattttataatgttacttgattaatacactttcatgaaagtgtactttgtttcaacaattcattttttgtctatatgttttttttgtttttttgtcatttagatttttagttgatgattcagtacttagtggtttcttattttactttgatatataaatggcttaattattctctgtatctcactacaacaattttgataattaggggcggacctattactggcggggaaggtccgcccctaataataaggtcattacgggcgaatttagggggtccgccggtattagtgtttatctttttaaaaaaataaaaaatataattaaaaaatagtaataccggcgggg

SEQ ID NO: 77676 - DNA, 866 bp, Cannabis sativa
  modified_base (46)..(52): a, c, t, g, unknown or other
tctataattatcaaattaaaaacattacatttaattttttaaaagnnnnnnnttttgttagtgggggctataacccccacattgttacttatgggtccgtccctgatgacatgtgattgtaaaactagttagttggccagctctttcttaagttcactaactgaatttggtaagttagttacttaggctctgaggtagttaaatatgttttgtctaaagactcatctactcaagtaactaggtataaatgaacaacacttcatttcttctttcaagtcaatacaatacaaggggaataggctattaccacacttacgaggctgaacctttttaaaatctagtgttcactttattttactgtttttgctttcttttaattatcatacttaatcgctttatattttactcaatgttgttggctagaagagagatcaacaagtaacaatgacatcaatggacaacatcaagacctcaattttctattggtatttctttttttttttttctatattttataatatattttttgtaaattactaattattgttaatatcttttattttttcttaatctctcactcatcaaaatatttcacatatagatttattttatgtcaacaacttcaccaccatcaataattttgaattattcatgatttattcattaatctcgatttttcattggtatctttttctctttatattttataatatattttttggtagattactaattattgtcaatattctctgtactttactattttttttattttagatacataatatatattctaaatttttctctcactcatcaaaatatttctcgataatttattcatgatttatttattagcataaattatt

SEQ ID NO: 77677 - DNA, 572 bp, Cannabis sativa
actttttgtattgtttattttgcccttccacataatgcatacaaaattatagagaaatactaaggacattctatattttctatattgctctctcttttacatttttttttataaatgagtgacatgtgtaattgtttaaattatgtttgaatatagctacaattatactatttttacttttcattaataattaaaatgtgtcatctcatttatttgtttattttttttttactattttattaatgttttattttttcactaaataatatgcaccactataaatctttcttttaaattcttttttataataaagatgtactattttatgttataaaaataaaaaacactaactctttctttttttcaacaaattttgcatcaacttttttttttcatattgtattattttttaaattattttttatttcttgtttattatattagtggttcctatacttgtcatattctaggattatttacaagtggtattcaagctcttatttttacaactttagttgcggcttatataagagaatccatggaaggttatcattgactagtttttgccatag

SEQ ID NO: 77678 - DNA, 2185 bp, Cannabis sativa
attgtaaattatttagaatttttataaaacaagtaagaagtctacagtaattataatataacccgtcatatatatataaattctctatatgctaaaaacataaatgtctgtaattatagttgctccctataaatatatagagagtatgtatgtatttgttacccaagaacataaggatttgatacttttggaagccttggccagttgagaattagcttcagtagtggcaatagaggcagagtccaagtttgtattaacttcttctgtagtatgattatatatgtgtaacaaacatattattattattaataataatattatgacattatgacattataataaataggaaaacagaaaaatagattagttgattaattgaaagacctaccaataactatgccttggtcatggacaagaacagcaaggtccttgaaaatctcatttgtttctttaatttggaattgtatttctttcatgtcctgttccctttcctcaataagggcttcatttaaaacaatatcattgtacattacaactacttcctgcctgccatggaatattcattacattatttctacattgaataaactacaacttccttaaatatatctatgtattcatatgctgctgctagacttaatatcttgcacactaagtaatctctgcaatttgattgattgaacagtctattaatgtatcaagagatcgaatactcatacaaatttctcatgacatgatcgaaatccaaataactgtaagcttgctcctatattcatactgggttggaataaatttttgtcccctgattctacagactattcaccaagattgtatactacaaattctttctaaccattcattaccatagtcataccttcaatttttttctatatatagaaataagtttacctttggtgctcctgaaggaaaggttggtgggaagactggggatcctcagtagattcaggtctgaaagtgtaaccgtatgtaagaacttagcaatagttattgttatgaactgaagaaatgaagaaatgaaaagagtaaaaaggtacatggttgtttcaaaggatgatggtgataatgaagtaggagtataagaagattccctctgagaggcaaggttttggacattttggaattcttgtaacactgttttgaaatcttttgcaagcttcacatcttctatcttcttaatcttagaagtagctgaaaactgaaacaaattacaatattaatcataataatatttgtattttatataattcatcatcttcttcaaatgaattaaaacaaagcaagaaagatttacatggtgatggtgagtcttatcagactgagttaaggatttcagctgagctgtagtaactttcactatctgaagtattcgttgtctgctttcatgcctgtgccatcaattatatataaattatacaaacataatatatatatatatatatagatgatatctttttctagagtaaagttagtaaaagcttacagcttgcggcggtgatcgggagtgtccttggcggttccgacagcatccaccaaacgtcgaaaagcagcaacagaagtattgagctgaaaaatggctgctgccacaccttgagaggggacttggtgtttggcatattcttgaaagctcatagttatcaatcacagtactatttgctctctcaaagattcaattttgaaatcaaatcaaagcagagctctgaattggatgattatgatgatgattattatgacacaacacaactaatggacccaaataaagatcaattatttatatagtttctagaaagagtaaagaagacaacgaaatgtgggccattttattattatggcagctggactactaaagcatctttctcttccaatcataacgcataaaaaagttacaaataaagaaagataatatttttttaaaaaaaaaaacctttttcattaagatctactggtcaaagtcaattgtacagttgagaatatctgggcagttgctgttgtaataatttataaatctttttgtttgaattgtgtatcaagcaacaaatatcaaaagcgctattcctgttctgttctgttgtgtttgatataatctttattccattatgtttccaagccaactttacaccttcaaattttccatgtctttactccaccaaaaacatcctgacaaagt

SEQ ID NO: 77679 - DNA, 662 bp, Cannabis sativa
gagctcttaaagaaaggttgaaggttgaaggttggtgattgctctactataagatgtcattcaaatccgtgggtgccaagtcaatcagtatttgtacctttatactactcagggaattcaacaaatatggttctagattatatcacatcaaatagagaatgggatttatctaaactgcagaataatttctctcctcctgatgttgataatattctctcaattcctctatcttttcattcatctagagatgaatggttttggcactacactacaggttaattcacagtgaaatcaacttaccatctggcctgttcaagtgatgaagtttcaaaatcttcatcttcacacacacaagaacaatggtggaaatcttattgggggtctgaatcttccttcgaaagtgaaaatctttggttggagggctatttaaaattgcctccttgttgctgcttcattgtttagaaagaaatctcttacctctgctgtgtgttatttatgccaaaatgcttgggaatcagtggggcatgcaatgtttagctacaaacatgcaagatcaatgtggcttcattttgggttttcttttgatttgcgatttgctattggtttgaaacaagaggaatttttgtttcacctctcacaagttcatgttggaatttatttta

SEQ ID NO: 77680 - DNA, 554 bp, Cannabis sativa
  modified_base (507)..(511): a, c, t, g, unknown or other
accaagtcaaatcataaagatcccttagttatagccttagtgatttgattatttattttcaatgattaactcggtagattaatatgtatacttacatggggaatgtatttataagctcattgtgtggctattttatgaccattgatcttgatcatatgggattcggagtgatcttggtcatcctttttttttttttttttgaggagttgattattaacaggatttactggacataaacattgaattagctagccctattgtctcctaattagccattattttaaagtgtaacatcacacctacaacctacatccctttaagtaaaacacttttccattttacaattcaaaatacaaaaacaattcaatgtatattagtattactccactacttgtttatttacactccacaaaataattaaagaatgatttttttttttaaaaaaataaattacattaaaatctttagggctcgtttggtacgctgtataagggtcgtattgtattnnnnnataaataacactatgtttggataaaacaatgtattgtattaat

SEQ ID NO: 77681 - DNA, 511 bp, Cannabis sativa
ttctagatttaagatttgttatcccaaattttgcacaactgacatggcacctagtcgagccatcaatatgtcggctagataagagaagatcagtacaccttccaagattattgtgtgagtaatcttgtcaaaaaaggcaagtctcgaaaagggcctggccaggttgtcaacaagtcagctagaataaatgacacaagaaaggtcggacaaggctacacgagccttgatttcttcttcagcaacttccacaaatatctctaaccacatccttcagatacggactggattttttttcacttagattgtaggagcttcaaccggtcgtaactgcatcctagaatataggaatatttactttttggttactccttttatggagctaattataacaacctcccctataaatagtgaatgaatttatagggggaaatgacctgaaatcattatctcacatctaagagcactttgctgaattatgttctctgtaaacatcttgagagttgtagctaga

SEQ ID NO: 77682 - DNA, 1159 bp, Cannabis sativa
  modified_base (653)..(660): a, c, t, g, unknown or other
ttttcttgtcttctttctttttcatcctaaccaccatagccacctcatctctttcttcccctcgcctaaactatgaccaccctgaccaccatctacccttctccacctcattcgccagaaaccccattgtaagacccccaatcacatttgtcctctcttttttccccaccatcaccaaacctagaaatcaaccaacctagaaaatcctccgcccacttcactctcatctcatcatcatcctcaacttctcttcacctgaaccacaacctcatcaccatctttgcatgaaccaagttgcaccagtcctaatacgcatcgttcatcatcatctcattaaagttgactaaaaataattataatatcgtgtattattttaaaaaaaaaaaaatcagatcatcactagaaattaggagagttaaaaataaagtaataataattctatatccgctacctcatgttaactaaataaactataacaaaccattaccattaaactaaaaatgaaagatttaaaaaatactcttacatgtgagcaaaagttgatgctctcacctaaaaaaaatctaatatatatttatattgaaatcgaagttacaaatgacataaggtgatgtttggtttatcggaatgtaattgtaatggtaataggaatnnnnnnnnaatgtaatggtaatagtaataggaatagtattatcatatttggtttattttgtaatgaacattataattagaattgaattgacaaaaatatcattgctttatttatatttccaaagtaagagagagaaaagataaaattgtcattttattatttagttgtcattctaatccttatttatgaagagtaaaagtgtaataagaattcatagaatttgtgtaatgtccactacattacctacctaagttattaaatcgttatagtatcgcgtacctcgaatcttaattaggatcaaatacataaactaaaggtgactgagtaatttgaaatgaatgtttaggtaatgctgactttgttatgaaatggtaatttgaatggccttcttcactacggtcacatgttttagtggaatacttattttttatggtacaattatcccgaactccttttgcttaatcaaatacatgattttttttttttttgaaagaaaatacaatatat

SEQ ID NO: 77683 - DNA, 2678 bp, Cannabis sativa
ttgtaagaaacgatgacatttcacaatttacattctttacttctttttttcgagtttttggttgcaatgacacaatgttctattatggttttaaaaaattaattgaaacatggacatgacatgaaaagtagtgcaattccaagagatcagtagaagaaaaataagcgaaccaatattctcaattgattgattacactgttatattaactcttgtgaagtatccaaaaacaaattcagttcaccaaatgcacatcttcgttataacccttaaaaacagaattatttcagattttatcatagggagcagtctataaccctgcatctgtagtccaagtctgagagccaaaaccaaaaaaaaaataaaaataaacaattcggtcacaaagggggtcgaagacactaacaagctataacaaaaaagaaaagaattataagagaggggaggaaaagaacgagcagtctacttaacattgaaagaaagcaatatgcaccactccccaccattaatttcttttctcaagctcttttggcaaagtcattagtatcatcgtcgtccctgtaacttccttccaaaggagcatctggtttgttatctccgaaagaatcgtccccaccagcatttccactgctaccagtacttgcatcatatccaccaccaaaatttccactgccaccaaaactgccagagaagttatctgtgctgggggcaccagcagcggcattgtaactcccagtgttgttaccatagtcaactgaatttccaccataactggcaccactacttgcaccataacttcctccacttccgaagctatcaccaccaccactgcctccatagctccccccagcagcagcaccaccataaccacctccacctccagagtagccaccgccacctccatagccaccaccacctccgtagccaccgccaccgccaccatagccaccaccaccgtagccgccacctccgtagccgccaccaccgtagccaccaccacctccagcacgcctatcagtggcataattcacccttactcgtcgaccatgaagatcctgggagaaaaaaaatccacccaaaacaggcattagaagaatacatatatgatctaccgtgatacagaagtccaaaacacatctttggttcaacttatactggattctatatttgaatgcattttcaatcataactatcaacactataatagatggatcaccacccttattttgatctttatttgttgtagatgaaaatgatgtgcagttttaaagataggtctcacaacagctaacataatgtgacagtaactttactatgttaagattaacgagataaaagtgatggtttgtagcatctcacattttgtaaagaacaagagaacgtaattgacagtagtggttattagtagccacagtttaaaaagaaatctgaagaagtttaagcaataaattacaaataaagactactaactcaacaaagctaaacaaagttattaaactatgttatttgagacaatgaaagaaaaagaaaatgtacctgtccatccaaagcctggatagcactggatgcctcttcactagaagtgaaagtgacgaatccaaatcctctcgatctaccagtgtcacgatcaacaataattcttgctgcaagaaattcagtagataagtattttgcaaacacagtaagcagaaaccaaatatcacttccagcttttcacgacaaataaaataacatcatgcaaaaagaaaataaaaaatgaaagtgcccaaatgggacaagaccatcccaattgtgcaacttgaacctagaaatactccaaattaataaagccatgccagccaacggaagaagcatgtgcaaactgaaactataacttcccatccattatctctagcaaaaatagttaagaacttaccatcaacaatctcaccatactttgcaaaagcttcccttaaactttgttcatctgtctgatatgatatacctacactaaaaatagtgagaaatccaaaaatgaaaaaaaaaaatggatacaaagagtagattgatatcaccgggaggaaaaaaacgcaaatttacctccaataaaaagctttgaacttgccattgaacacatgcatcttaccgcttgggacatggagagcttaaagggagacacttcagaactaatctgcttagttgcagattgcctgagtatattcccaagtttactaaagaaagccattgcaataacctgcaacaaattgaaaaaataaatggatcttcaatacaagttgaagcaacaaccaaactaatacttattcaaatcaaacagaaacttgggattcctttataaactatatcagcactcaaatacaataagcaagtgttttcatactatgctaacagccaaaaaaaacactgaccgactcaaaacaccaccagattaacaaaagtcgctactacaagtatgtccacagaggaccattaacaaatcaatcatgtacatctattacaatctatgtgacaagattaactaaacccaagaaacgattaaaaaaacacagatgagaaccctttttctcgaattaaacagctctgtaaatccagaaaacgaaacattcatctttcatttccttcactatatcaactaacttacagggaaatagagtcgcacatagttattgattgaaaacagaaa

SEQ ID NO: 77684 - DNA, 859 bp, Cannabis sativa
attattataaatagtcataatattatttggactttcagcaaaagattggagaagggatccaagaactggtgttgatgaactcctaagcagcatagtttgaatcttatcttgttctgtaaaaacaaaaaatcaaattttgacaaacaatctcaaacattatcaaacaattaaagaaaagattcaatttttaaggtaaaaacaaacatacccttttgagatttcctcaaaaaatcagccaaagaaaagattatccaaaccaaagaaaaacccttttcttaaagagatattatttgaaaggtgggaatagatatataattattgtaattatatttaaagaaaatatctttagagaaagtgggaatcaaggcaagaaaaaatatctcttccttcttggctggacccagaaaagcaagctcttttatttatttatttatttctaagagatattaaaattgggaaaaaaaaaaaaagaagaaaatgaaatgaatggatggccacacatttgtatgatcaaaaaatatgaaccctttgattctcctaaatataaaaatctgttctttttttgaaccccaaatgagagagagaagtatgagttgtgatccaaaaatattcaatgattgaaagcaaaatagaaaaggtcccacgttttaaatgtttccaaaaaataaaaaatttgtaggtttttgttgtgttttattgtccgtacaatttgtttgttactaattatggtgtgtgtgtttttttttaaccgcgtcagcttttctatacgtcgtcgttttgttgaacttcctttaatgtttttatttttgggaatatatgtcgttttttcgttgccataatttaactatatccatttttt

SEQ ID NO: 77685 - DNA, 726 bp, Cannabis sativa
agcaaacggaatcaaaatataaaattgagctactagacggacaacattcatagcaatatcaacgacttaaaaagtcaataatgccacaacaatcaacaaaactacaatttggatatgaaaaataagaaaaagatcaaatcgtatccatacgcataaatcagaacccaaagcaatacacaaaaacttgagaataatatctccaaaagaagaaaaactcagctcagaaatgaaatgcaggaacaatgtaaggctcaagtgttggtaatatgatggaaaaaagagagaagaaaatgaaaaatggacaagagaaaaggctgacctccgggataattcgatgatacgggagcgtttggcctgagagttgtctacgcaaccaaacactgccagtatcccacacatggcgacgtagccttctctctctctctctctgagtacaagtgaggaagaagaagacgaagctgggtgtgagtatgaaatgaaaatggagaaggctgcgggatctcttggatgtgtgtatatatagtcagcagaagcagtaatcctgaccgttgattctgacaatctgacactacttttgtagaagattccgttcctcttattatatttagactttacgattattttattttttttctaaaattagggtttattttgttctgattctgtatatattaaagttaaatgttgaattgactgcgatactggtggtggggttttggtttggtt

SEQ ID NO: 77686 - DNA, 938 bp, Cannabis sativa
cacaaaagtaaaagtcccccccccaaatatttcctagggacttcaaatccaaagccagtttgaatttatcaatagcaccaggaggcaaacgagtctccattgaaaacagaaccaacgacctatgctccttcaccatgagggagagtcttctgaatgcacggctacttactagtcctcgtgcattccaactaatgatcgtcatttttttgggcgggtgtgctcagcatcacctgcttgttccagagataaagagcaagagtagcagtgtcatcactatcattagctctggctctcttaagcatagctcgaagagaaccaccaacaaaagcttgatgcggttggaaggaagcacgcttcactccagaagcagaagcaaggcctttacctcacacagaaggatcaggctgaccaccatgatgatcaatgatattggcataaacagaagagagtcgagacagtcttaaaagcagaagccagtgcaatatcagtaacattctagggatcacgcacaccctcagacatatcattcccagcttgatcagccacaagaacagaatctgtgggataggaagtgtaatcaggggaagaactggttgagacagattcaacattactgacaagagaaatcaacatctgagtattaggattaatgggtgtgggaatcatgatcgcagcagccccagaaggcattagaacctaattttcaacagacatactatgatgaaacaaagaagggaactaaatagcctggggattcatagaggaaggaaggtggaaaccccctggttcatttgaacaatagggacagtaggagggtgaggatattgaaaaggctgaggcttatcagtgagtttttgttgggattttatgccctaaataaaacccctttcaatctaatctgatttgttatcaataaaagattagaagtcatttatgtt

SEQ ID NO: 77687 - DNA, 1004 bp, Cannabis sativa
gagctattttcatctcctaaaagaactaaatatttcaattgaagggatttcacaaggagaagtaggacagaaatatttccaaattgtcggagaacaccaatttgtataaacattcccaaattaaatcaaatttgaaaagtactgcttattcagtcgatggtaggtttcttttatcccgagtttgttccatccgagaagagtgaccggtagacaaggaaaatgtgattatttttttatgttttatgaatcgaagttttcagttttttacaatgtattttcttgtaccattatggtacgttacgatagtgattttgttagctctataattttatatggaacgcttgctgcagttggtatattgtacaaaaatacctttactccagtttggtgttccctcgtctgcctttctggtttctttaattatgtttctaaaaattttaagtgtcacgaaagaaaagctgcccaaaaccaaactgaaacttttgcaattctacaaagccaccacgatttcacaagcattctgaacgatttacaaaccaaatggctaccccaaacagttttatttttagaacaaagggaaaaccacaattaatctacaccaaaattgttatttgttaggctggtcccgactcctgaggagctccagtaaacaaggctccactaatgactgaaccatgctttccaagagctggaatactgagggaccgtttcctggttttgctgttggcggaagatgacattctcgattcatttctctccctgagcagagacgagtacgaacacagtggttcagacaagggatcgcttctagttctttgaaattgatccatgtttcgacgatccctttgttgtctccgcagtaaaggatcccctgaaacaggcacaacaatcttatccttggcttcttcttcatcttctgaccagtacccattttccatcatatcctgcattgccaggtcatcatactcttcatctgattttgtggactcctcatcaactgagcc

SEQ ID NO: 77688 - DNA, 640 bp, Cannabis sativa
tgtgttctagctctaatatattttcaaaaagaggcaatgatataaaaaagatcacaatcatttacttttgtagtcataatcactacaaatagattatgatattggcctaattaattctataatttaaaaatttctagacatcattagatatgcacagtttcatattaatttcaacaatatcatatatttgatcataaagctatatttaaaaaaataccacatcataaaaataatacaaaaatctcatttacttttacatataaagattatgatgttgttctaatattccattactaaaatttgctagacaatacaatataatttcaagattagacccaaaatctatggtatgttccaagtatgtatgcaaatcttggttaaccaatgatttcaaaatggtgggtgtaacaagtatgaagaattattagtatgaaaagaaattcatggaaaattatggtgttgctaaatctaatttctgatgatattacctttaataataaggtaactgttgttgttaatggctctattcattggtcattctctcttgtctgtattcaacttattggacaaaaacgtgtatatgtaactaatagagtagttgttatgatcttcgtatggaggagtttaagccccttcatct

SEQ ID NO: 77689 - DNA, 1265 bp, Cannabis sativa
  modified_base (126)..(129): a, c, t, g, unknown or other
ctaattataattgacggatacaattccaaccgatccaatcgaatcggatatccaaccataattagatcgaattgtatataaattttgaaaatagactatttaaacattgttttttatattgtaaannnntctgaatttctcaaaattttgtaggatatcttaaatagttagttataacgtagtatgaaaaaaaatagactaaatttttttttttttctgaatgtcgaaacaagtgaagggtgcatcaatacatccttttcaaggggtgcattgtagaatcacctaataacttatatgcattaactataagaaaattctataataaacaccccaaaattaaaacttaaaagtaggggtaagtccaaaatccttattggctaatggctattattgtttctgtggacctagttctatgtggtacatgttgtattagattttttactgttaaaaagagggtacactagtgtgactcataaagtctcttattattggtacacatgtctacgaattaaccatcctcaacctcgtctcaacacctcttcaatcccatagtaaacaatttactcctccaagaactctccaattgattgatcatccatcttaaaaacccggtttagggcatccatcaatttaaatactctaatttctttttaacaacaaaaaatctaatttgattgaaaacatgcatgctatcaagaaattactatgcgtaaacacaatataaacatgtatgtgtattatttgattgaatactttatatagagaagcactaaaaaaacttaataagggaatcaagacatattcttcaaatcccaaacaaaaaaacattgttgggctcaatatcaataatattgcccaaagagcactgaaaaaacccacatatgaaaaatgtgaaaagagggagacgagatagcttagagtcgatgggtggacgtaggaacaatggtgttcttacttcagagttctccggaagaagaagaaagttacacttttactttattttttaaaattcaggttgattagttaattaagtgaaatgaaacaatttccacgacttttagatttcaccattttcatttcttaaaaaataaataataaatctaaaaatagtaattttattttaatgttctacaccctcaaaaatatcgtgtatcctaacacttcaccaattacaccgcaatataaagggatcatacctatatatccgctttaggggtgtgtactctagaagtgtccttaattatatatataaatacataaaataa

SEQ ID NO: 77690 - DNA, 758 bp, Cannabis sativa
ttcatcctcaacctcaagcttcttttagccaaattatgtgccatctcattgtttgttctcacactgtgataactttgtctaactcttttattactctttgattgctttacacaattaacctcatataagtactaagaagagtagtcttattttgatttaattgccttaatacctaggagacaatctgaaaaggccttcaattttcgaagattcagccttgaacacaatggtaattcttttttagagacgttgtgaatacctgtggtttattcatttacatatctttagtattgttgttagtaattgacatgtttttgttaaaactaacagaattttaaaaaatattatgttaaaccacaagaaattctataatataggcatttattatatagcaaagagataagagattttataatctttaattttgtatgaatatacttgaatcttgatatttatttttcacacacttttcaattttcttatcagttttggagtgtatttatttgtttaataattttaattttttcacaacctactctgctactttgtactttgctttgtaaattctaagggagttttgataagtttggagaaaagcaaaggaaaaataatagttttggttttgcctaaattaaacttgtgcttgaaactaccactatttttttttcattcaaaacttcttttctttatgagctacttccttttctagcaaaagcaaaatttagaagttgaacaagtaataatatctacttttcaaa

SEQ ID NO: 77691 - DNA, 933 bp, Cannabis sativa
aaatcaaacaatcttaatagtttaggaggaatttttaacggcaaaaaaagtttaagggacatgatttggtacatgttaaagtttagagggtaaaaacactaattagcctatatgtaaagtatgaatttgacttgggtaaaagtgagtttgtgtaatagtgtgtctattttcttaaatttcacaaaataatcatagtgtatagagtttgagggggtatattgaaaaatacatcttttatttgtcaattaactaaatctacttctaatttatatttaattgaaacatatctctttttatatgtattgtactcaaaatacagtgacataagggaatcacatggagagtatattgaagtgataggggaaaaattagtaaagtatttaaaaatagaagtaaaaataatagactttaaaaaagaaggtaaaaataaaagagtttaatataaaaagagtatagggtctaatttcctcgagtttgagtgtgccctaagaatgggcctagcctatcttagcccatggttaaacttgattttatgtggctatgtaattaaacgaacaaatcttatgtttattcaagttatgtaaaaatttaattttttcaaataaaattaaggtacacattaatatgagaaaatatcaaaataaaaagtttattgagaatagttttaattgtttaatgaaaattgtataaagaaaattaaatcttgtatttactttatgatttttaaatttatgttgtgacacgctcttagagaggaaagaaagctcctgaactgaatgacattaatactactagtaacacacccactttctttcgattttagaaaaataacaacatggctcttttcgactacaaacaaaattactcaaattcccatcaatttcttaataatttataacttaacttgcatcatatagttaacatataataaat

SEQ ID NO: 77692 - DNA, 681 bp, Cannabis sativa
gttttttctttatttctctagcaaattagtaatgtattttaaattatactatttaaatgatataaaggaagaaaaataaaaaatagagaagaaaataatataaatgtataaagtaaaataaaaaaaaaaaataaaattttagtgaagtattttaaaaattaatttagctagagagttgattgctcttaaagactgtgcttgtaaaggaaaagagaataaataaaggctgtgctaggaaataacaaggaaaaattaaaaatgatatacactaaggagtgtgagacaaccatggaaatgtttagaaaatatctaaattgatatatagtagtacttgaataagctaaaataagaaaatgagaacaaaaaaaaaaaaaaatcatagaatgacataacatgacatatagaagagaacattcaatacatattagtcaatccattttcaacccactcatcttcatgagatattctttaatttcttccctgaaaataatggataaagactgaaggtgattggtcagctgtgctatagtactcttcactgatatttcattcattccttttatttgcattaatcacttataccaaatttattgtttatacaaaatatatgagatatatatctcttcttccctgtatcacatatatctactggactagtatatatatggagaaaatattgag

SEQ ID NO: 77693 - DNA, 955 bp, Cannabis sativa
aagttgtcaaaaattaagttcaaggtcctattttcattattttaaaaaatacaagatctattttattatttaataaaataaaacaatcggtaatttttgtaaaattacccttgatattattttataagtttagtttttttgttattttaggggatattttataagttttgttggaatcttggaaagaagatgagatatactttagattcttaagaagtgttgactttagtgttttaatagtattctctttcctacaaattgttggttaaaaccatagatatttatcagacaagaaagaaaaaaaatcatatatatttgtttaattaagagagggtatcattgaaaattagaaggaaaaataattaaacagtacaatttttggaatttttcatatagatatataatattattgaataatgataatagccaaataattatgaaacatacacaaaccaaatgatttagttttcaccaccccctcattctccatgtatatgtggatacatatacatatgcacgtataatatatgaatgcagattgtccctttgtgagttattttcaagatgggctacatttaactcaaaaaatcagttaatattatatttagttgaaaattttataattttactccaatatattaaaagtaaattaactttattttttataaaaatgtgtgaaaaagtcgtattaaatttagattgaaagtgaattcaattaattataaaaggtcattaaaagcactaataagtgtaaaaaaataacatttattttatattatacatcgctaataaagtttatttttataaaaataagttaaaaaatacatatacatcatcaaaatagcattccaataaaaatgctcattacacttactttttacatacaataatatataattaatctttaatactacataattgtttttttaaacccaaatactacgtaattaaaagt

SEQ ID NO: 77694 - DNA, 560 bp, Cannabis sativa
  modified_base (28)..(39): a, c, t, g, unknown or other
tacgtgcctcgcacgtagttttttgctnnnnnnnnnnnntatatatatatatattaaaatgaaccgaactatgcatgaaaagtccataaaccatgtacattgttatatttttttgttgtttgattctagctaaacaaaagaaacaaaagtattgagatcaagttttgcttgtgcgcgcttgtggttgcttccaaaagaaaaaaaaaatagttacgggtaatagttatataattatgctagggttttggagtgaaaagcaaacatatcatatttgtaaattgtttccaaccaacgtcctaggatatgtataaaatgtaatatgattgttttccttttttaatttaatctagtaatattattattttttttttcttttaataaacaaaataataagtcaccttttataattatactttttgtgaatagaaaattattaatatacactaaaaaaaatcacatttagtgataattttttagtcaatcaaaagaaattgtgactaaatgtgatttttagtcacaacaaaaaattatttgtgactaaatatagtatttagatacaa

SEQ ID NO: 77695 - DNA, 2998 bp, Cannabis sativa
ttgctactgcagtgggcagagaggtcttataagccaacttttggcacctaagtttggtgaatttttagtgtatggttatctaaaaagccaccctattcctggcttaccaactttggttagccttaaacaaacttatgagcttgaacatgtaaatgagtacacaaaaatctttggccttatttcaaatcctgttggtcatagtaaaggtcctattctacacaaccctgctctgagacatattagatacaatggaatttatgttcccatgatggttgataatgtcaatgaattctttcaaacgtacacaagcatggactttgctggtttcaggtatactcgagctatcgaatttatttacttaaacaaatctataatggccttcatgttctaaaccagagcttattttagttgttggccttttatagttattactcataacaaccacattgttgtttttccttgttggtgggtggaactagtgttggcataccacataaagaagaagtggtaaaatgttgtgatgaagttcatccactggctaaggtttggacattttcaatgtttgtcaagttcacataatctctagaaagatgagaaattaattcccttgaattgttttattttagtccataggagctgtaaataccatagtaagaaggccaagtgatggaaagttgattggttacaatacagattctgaggcttgtattactgccatagaggatgcactaagaggtatcactacattaccaacatgcttaattcctttcattatcacaatgtatcaaattttttcatagatgtaaaaagctataacactactttcttaggataataagttgagcaaatgatcatatactaaataatttgtttttaatgtatgaaacagaaagagaagttgccaatggggttgtaccacatgcttcttctccaatttctgggaaactttttgtgctggtgggagcaggaggagcaggaagagcattagcttttggagcaaaagacagaggtgcccgggttgtaatatttaaccgaaattacggtagaccacattgctactcttttttcagtaattttatgaagcaacaaaccttatttctaaccagaatgtcttctaaaaataagagagagcaaaagctcttgcattggcagtttcaggagaagctctaccgtctgaggttttagacagcttctgccccgaaaaaggaatgatatttgcaaatgcctcttctattggaatggaaccatacacaaatgaaagtcctatttcaaaggtcctcttattccatctctgcataagttggtatacttatattaaaatcaagacttttcttacatttcttctacactttttaggcggcattgggagcttatgacttggtttttgatgctgtttacactccgaaaaatacaaggcttttgcaagaggctgctgaggttggggccgttgtggtgagtggagttgagatgttcatcagacaagccattggtcagttcagcttatttactggaggtccaggtataaaaaagcctattcccaatttcctttgtccattaatgaccacctttgtttttatttcacttagtcagataatgcatatcttctattttgtgacatttttggcctgattccagctccagaagatgtcatgcgtaagctggttcaagaacaattttgagtattgtaagaggtccttctgagactactgccttaaagtaaccgcacataattaagcaagttaagagattatgtgggggcgaaaatatgtacataaatttgtgtgaattgtaattaaaatcaaataaattaaacgtgctgtgatatccttaacatttctcaaagctaaaacactgaaatatactttcattccacctgatttgatgtggggaatttaaaatccaaactcttgaaagaagtaaaacctccatccactactaaattatgaccactaacatacttagcttcatccgacacaaggtacaaagctgcattagccacatcctcaggctcacaatttgctccttccaaaacaccagtactataaaccatttctttaagccggccatcatcaacccccggaaagagcctgcgcatctcatccaccacaaacggtgtcggaacagcaaagggagagacacaattaacccgtattccatacttgcacagctcagcagccacagacttcacaatgcctataacagaaaacttagaaacagagtatgtgtgctgcgccaagccccccacgattcccgtgacgcttgcagtgcagagaattgagccagtttttcgagggatcatcacgcgggcagcgtgtttaatccctgccaccactcctcggacattgatgtccatgatcctatcgaaaaccgccatgtcaaggtccacaatgctcagaggagtgttgcaggggacccctgcgttgttgtgcattatgtcgagctggttgtgatgagagactgtgaagtccacggctgcggagatgtctgactcttgtgtcacatcgcaggctacaaaggttgcgtttggaccgagctccttagccgtggctaggccgagattgtgttggatgtctgctatgactactttggcaccattgttgatgaatttggtggctgttgctttgcctattccgcttgctgctcctgttattagtgccaccttcccatcaagcctgttattttcaatgagtgaagaaattgtctgagtctcaggctataagtagaaagaaggtaaagaaagcaatataaacttaactcccattaattaataactttatccggttttgactacagaaattgtgtaaattaataactcggtagtgtgttattcacacactccaagtggataacaataaataatgaaaaaaattgcatattgtaaccaatgacaataaatcaaagagaaatgctaaaaggacggcataacactcgtaataaaacaacaaatgtaaaccgacaataatgagcgaataacgctacagaatcaattttcaaggaa

SEQ ID NO: 77696 - DNA, 517 bp, Cannabis sativa
atgctaaattattcaatgaaattgatatttcatctcaaaaaaatagttcatcttacttacactgcaatttttctttacaattaacagagaacattttccatcagcaggtaccgaaaaatggtctcgagttcaacatcgagagccctttcaaccaaaaccattcaattcagaattgccacaagctgatgatgagcaatagttcaccattttgaactaataatgcttagaaaaaaaatacaccattgctgatatgaatgatatattcttaaccaaatggcttctgcttcaaataacatggctaaaaatcgattttaagtaagtctgctatatgattactgtttagaactctattgtcatattcacaatatatacatatatatttgagtaaaataacactcacaacaaaacattaccaactaaactagagactaaactagagagagagagagagagagagatgtagtgtgattcaggtgagtccttgatattgggaaaacccatggccattatcgtcgct

SEQ ID NO: 77697 - DNA, 520 bp, Cannabis sativa
actttctccattaacacacctcaataaagaagaaaatggaataattaaaggttaccatttttctttttaaattaagtttcaaagactaatttatgatgtgatcatacctttacttaagctttgacatgaggcttctatgattatttatgaaaattaaaatggagtttttggtgatgaatattattaataagaaaataaaataattaaagtttatttatcttatatagttatttaacaaaaattgttggtttaacgattttttttcttcgttaaagttaatggttaaaactaaaaccattaaattaattaattaattattttttataaaaaaattagttttaaatatttaaatttaatttaaaaatattataaaaattagacaattatttttttatatatataaatattaatttaaaattgaaatagacaataattcaattaattaattatacttataacaaatttattagttatattattttaaatatctgaacatatttatctattttattatttaata

SEQ ID NO: 77698 - DNA, 801 bp, Cannabis sativa
aaagtgactcataaatttctcataaaccaaaaattttagtcacattttatatagaatagatacatgtatttttttgtttggctggagtaggtattcacctaatatcatagaataatttatttacgttattgtctctctatatataattttccaagaaagacaaacgtcatagcatgatcatccaacttttatattaaaaaaccaaattatcttatttttgtcactagtgactttttagccataataaaaattatttgtgactaaaatataatatttagttacaagttgtctttaatttaattttaatcacaacaaattataatttttgtaattagtttcaaatcttttagtaataacataagaatgatagtttttcttttgttttcttattctcaccccgcggtatatgacgtcacgcatgagtcaacctttttcttaaaagtatccaggaaactcatctcgaacgtcttgagctccctctgcaaaagaaaaccaaaaaaaggttagcaactcaaaaataatgaaaaatgcatatcaacaaacagaaagcagcaataagagacttcagtctaaattcaaccctcaacattgacattgttgtactctaaattttccaaatgcaaattgtgtaatgtctttgcgacctataagagtacgtacatactggaagaaacttggataatgcatcagggtaaatggatctatctagtgttttgtgaaagcagaatgaaatgggaaggaatctctaaaatttcatctaccctaaatttgttagattttgtgccctaaataaaacttatt

SEQ ID NO: 77699 - DNA, 961 bp, Cannabis sativa
cagccatgaagtcaggcttcagcaattctctgctaatgctctcagcaatgttcaagcaaacattgcgaatatttctatcaacaatcaaggccgtggacgtggattcagaggtggctatagaggaggtaggggatctacaccaaatcgaggaggacgaggcaacaaactggtgtgtcagctgtgtggccgtgctggacacacagctcagaagtgttatcaccgcttcgatatcacattcactggacctcaagccccaggtgcttcatcttctacatcaacacaagaaaacccccaagcaaacatctctgattccattataactgaagaagcactaggaatgtggtatcttgacacaggagcaacaaatcacatgtcaacagacacatccaatctcaccaacaccaccgactacaaaggaaaagccaaagttacagtaggtaatggagcctctatccctatactgcatgttggttcaaattctattcccaccatttcaccgaacaagtctttattacttaaagatatcttgcatgtcccaaatatcaccaagaatctgttaagcatctctaaattcactgctgataatagtgtcactcttgaatttaactctgtgtgttgtcttataaaggacaagaacacgaagcaagttcttctaaggggttctcttcataatggactctatcaacttcaagtccctacacccactgttgctgccacatccaagttacatttgaattactcttcttttccttgtaattctgctgctttcaattgtaccacaactagtaaccctatgcaagataaaaataaagttgattctgtatggcattgtcggttgggacacccagccaagccagtttttgctaaagttttagctaaagtttgtccttctgtcaaatgtaaagaaaatttcttttgtgatgcatgtcaaattggcaaaatgcaccaattcagctttaaa

SEQ ID NO: 77700 - DNA, 1181 bp, Cannabis sativa
atattttctgtggaaaggaagaatatctgggaatttgttttttatttccttctcagtactctcaactaggatccaccagcattccatatccaagcattggatttcgaaatggcgttggctagcgatgaatcatttgagtttaatccgacgtatgcatgtttgataggaaaagacaacccagccgagtgaacttgtttacgacactatcaaatcaaatgactcaactgtccacgttactcatttaatgaagttgtttctaaatttatatatacaaatataataatattaatgtgagataatgattagagcacataacacttaccattctcactacgggactttgattattataataaaatgaatcggtagaaggttcctttccaaaaaaaaaaaatgaatgaaggttgtgttgtggttccttaacatgaaaactaaatatgtaggtagagaaaaggttgtgaaagctttggtggagatatatattgaacctaattaaattggacaccttcaattttgagtaaataatatgctttgagtacgtgattatatatttgctctagtgcttcagattagatcaaattatgtagcttcgattatatatatctattgtttgtcttaatatgaactgaagacaagtaactattattggctattctgtctcacatgttcatgacttgaaaaaaagtaaaaaaagatggaaatttatcatgggaaaaaactaccatcaataaaaagaaaaacaagaagaagaggaagacaatgagtttgaaattgatagagaccagattcgtaggaatatgggatagtgtactgcagagataaatatagttaattaaatgactaagatatgggaattttctagtgagggcaacccaagtcaatagagacaaagagggagatggtgtatagtgaaccattaaggcatggggctcatggtatcacatggaatgtccaacagtagataggtttcccacgaggcaatatttattccaaaatcgtctcataaaacttatggaagctgacagctttgatttaacgttttaactccaagtaaaattatatacatctttcccaacagagttaaaatgaatgaccacacgtttgttaacatgcaagagaaatatgcagagtttgttaacatgttttgaccacagaaaataagaaaaatctgcattactcga

SEQ ID NO: 77701 - DNA, 1008 bp, Cannabis sativa
ttcaaaatttttaaaattttgattctcaattaaaaagtgaaaagtaaaaataattttataaaatatgtttttggaaaatatttttgcttttctaatttattttttgaagtggtgaacaaagtcaaacatgatttacaatgcagcaaatcacaatcggcggtgggacctcctcaaaccaggataactcatcgtctaaccgaagagcatgttttgtcaaaccatgagctgcagaaatcttatcgcgagccacttgggacaaaactgtacttttctaactaaaataaaagaaaatttattaaaaagtgttatcaaatacatccttaattacatacaataacgtgataatttcttttaactaattatatttattttatatgagattaagtttagttaagtttagcttctataagtttttgtttagcttttaagattgaaaaaaatggaagatatatatattttttttttgcatcttatttataataatattaacgttactattattacttactattattattgacataccatttttttttttaaattttcttgtatttttaaaattaacattttggctactaagtgtgttgagaagaaactaaatagttatctttacataaaaaactatatttttacaaggataccattttggttacttctaaaatttatttgtatatatctacttaatttattagtatttttattttaagttaagttatttatattatattatagtagattataatttaaaatatatttaggaagctttaaaaattattttcgaaactaatgagttgccaagtaatataacaagcaaccatttttatataccatttttttatatacctttttgttattttgaaaattaattagttatcgcataatataatataatttaattatgaaaattctaaaataaatgttagttaagatttaaaaaaattataaaacactaattaatcattatattagtaattaaatggtttattttttggaaatagcaaaaaaaaa

SEQ ID NO: 77702 - DNA, 1797 bp, Cannabis sativa
gaggtagtaattacatatgaattcctaatatcttatttaaaaataattaagtaattacaccgaaaaataaattttttttagtagttaatatttaaaatagaaactttttagtaattacactcaattctcatgagagccatgaaaattggtgagtgtaattggaactcctcaagtacctccaatgacactcttacaatgtaattacacagtcaaacaaacatgtcaaattgtgtaattacctccaattacacataaatccaattacactgtaactttctaaacacaccctaaatctatttatttatttttttttgaatggaaatatggcaactttatttaaattgaatcagccattacaatacttaacaactcatcaggagagttattgttatgaaaaatacgaactggcgagaaataagcactacgcgcaaggaaatgcgcagccttgttagtagaacgcttaacaaactttaaggaaatgctacccaaatcagataatagattcttacaatcccaagcaaccatcccaaaggcagatggcatttgtgaactgctattaatgccttgtacagccagcaatgaatcagtttcaagaatcacatcatcccaagccttgttctttatccaacttaggacctccttgataccacaaatttcaggaagttcaggagcaacattgccaatattgcatttggagccagcttctatgatccgtccattacagtcccttgcaatgaaaccgatcccaaacgaattgattgttgcaaatatagctccatccacattaaccttaatcgaattaactccgggtttagtccaatgctcaacatccaaacctagattactttgaacaaggatcggttccaaacgatttttttgagcatacaaccattgattaagataagattttgcttcaagaacaatattagcagcagttttgaccttcccattccatagcacatcattccttgcactccatatttgccaagcaatcatgagaacatcagcagaaaggctactggtactgctacgggtaacagaataataccagtctcagaatgttgcagtagttgttggtgtgatgtcaattgcagacctgttccagcacgagttggcaaaagagcagaggacaagaatgtggataatggaactcttctgcattgttgcaaaccggacacgagttgctgacataaacatgcttggtttggagttgtgtacgcgtgggaagactccctgaaatagctctccaaccgaagtgtaagacttttggtggggcttttatcttccagtaatttttccaaaaatctccagcctgagacgtgtcctgatcagcttgtgttaagtgtctataggcactcttcacagagtagtaacccgagctttcgaagttccaactccatcgatcattcaagtttgtatcaggaaggagaattcccaatatgagtacacgatcccggtcattgaataaatcatgaactacatcttcatcccaccttaaatgatttacttgcattaggcttgcaaccttattatcacctatagcagaatgtgaagaagttatatacggctggttcatatcaggcaaccaagggctgttactgatataggtgtttaaaccatttccaatccgaactcttgtaccagcaacgatcaggtcttttgattcatagatgctcttccagatgaaagaaggattatgcccaagtgatgcatttaggaatgagccattagagaaataccttgctttataaactttgcaaactaaggaatctacctcagttaacaatctccaagctt

SEQ ID NO: 77703 - DNA, 2367 bp, Cannabis sativa
tattattattatcattattattaggccttagcaaacttcatagttgagtgtactaggatgaatgatgatctggacaaaccagtttcgaaactgcagctttggaaagtttatgttgatagagcctcgaatgaaaagggcattggagcgagaataatcttggtctccccacatggatactagcttcagagtgcccttcacttcaaattcctattctccaacaatgaagtggaacacagagccatgataactggcctacaattagcaaaggaagtaggggcttatcatatcaaagtgtacaatgactctcagcttgtagtgaatcaaatattcggagagtatcagaccaaaggtgaaagaatggttgcctacgtgtctcaatctagagaactataacaacatttcaagagatacaacatctatcaagtcctaagggatcagaactcatttgtagatatgtttgcaaagttggaaatagatccagatgctgtgcaatatagaatagtgtccattgaccatctagaagccccaagcattggaatgtaaagggtaaaggtcattgatcattcgaactcctagataggcccaatcttccaattttttaagtttggagagcttccagccgataggtttgctgctcagacgattcaatattaagctcccagatacgtcatcctggatggaagattttattgcagggggctatacttgagatggatagccataatagagataagagctgtcattcatgaagttcacgaaggtttctgcgaataccatacatccaaattgatcttgtcaaagaaaattcttaggtaagggtatttttaacccaccatgaaaaagggtttcatcaagtatgtctggaaatgtgaacaatgtcagcgctgcgctaggttttgcaagctccaccaacagaaatcacccttatgaacaataaatgaccttttgttgtttggggaattgacttagtaggctctcttccaattggaaaaggaggagttaaatatgtcatagttactgtggattgcttcaccaagtgggtggaggcagaacccatgaccacggtcacctccaagaaggccttaaactttgtcatcaaaaatatagtatgtcgtttcagccttccacacaaaatcatagcaaacaatgggaaacaatttgatagcgatcacttcattgacttttgtgttaagtacgggatcatcaaaagtttctcagctatggccagaccataggcaaacgaacaagtggaagccgtcaataaaatcctgaagaacacgttgaagaacaaattgtaaacttgtaaagatcattggccaaaagaacttcctagagttctttgggcatacaagaccaccgagagaatttcaacaaggcacactccttatttgatggtgtacggagcaaagcagtcatcacagttgaaaacactattccatctcatagaatagaaacttatgaccctacccgaaaccatgctctacttcaggaatctttggatttgattgaagagtcccaagtctagctaaaaatgtactagggcaaaatttccaggaactttaattccaaagtcaagagtcagacatttgaagttggcaatctcatcttgagaagagtgttcccagcctctcaggagtcgaaagtgggggttctaggacccaactgggaaggaccttacaaaatccagcacaaagtgcgtaatgggacatatcaattgaaaacactggacatattagagattccacgagcttggaatgcagaccacatgtgttgatactatcagtaaattaggggtgtccaaatccaaccatcttttcctttaaattcattttttacttttcccttttcatgtacgcctctcggctaaccacaaattaaatgaaagaaaatgagctattccaaaaaagtgttttctttaaaattttgagctgcatttcaaaaagtgacaaggaatttggagacattccaattcccaactcacttggtgggtaggatatgcaactatgtacctctaaaaatgtagaaattttataatcttttgttctttaatttctggccatttaattttctgaaaaaattaattaagtatggaagtaagaggcctcgccttaaattacagcttaagggaaccaaaagtaagttgaccccttatcacataaaaaaattaattattttcataccttaaatatgggagtagaaaactttgcctgaatttggaatatttccaattgttttcttaccatactttaaaaggacattttacattttatcacttcgcatttttaattggaagtggaagtagaaaacatcgcctgagcttgggaccagagggaacctagaattagttattttcttaccaggttcaaa

SEQ ID NO: 77704 - DNA, 569 bp, Cannabis sativa
tcatgtctaatacatacattcaaggtcaaaaattcttaaaattcacataatcaaagcctataatccaaatataaattcatgttcaattcatcattttaagagcaactaacacaacttaaatgttcaaaatacatgctaaaaaatacaaccgaaaaatgacctaaaattgagattttgctaaactcaagcaacacaacattactagcttaatatccatagcgaaaatactttacatccaagtctagaagaccatgacaaaagcatgtaagctccaaaacaaagagtgaaattcaaaaagtagatcaataaaaatgagattaaagctacctcaaatgatccttccaaagtaaacacaacccacaaccaaaaacctcttcaaaatgctacgcttccttatcaagagggtttcaaagcctgtatgaacaaagttttgagattcatttttcagaaataacaagcatacctcaaattattaactttttggtcaaatgcattttgcccatagggccaaagttcatcatatttagtaatcaagggcataaatatcattcacatcacacataaatcaa

SEQ ID NO: 77705 - DNA, 657 bp, Cannabis sativa
agctcgtttattgaacataacagtaatgtatttaaaattttggtgtctaaactgaattctaattacaatgaatgacctaaagctatttatagctttgtcctaggtgtctatactagtcactaaccgaccataactaacaatctctaccttggttgaaattctgttaaagctattatagattacaaacaatagacacaaaagaaaacattaaactagattacagacactgtcaaggattactgtgattcatttgtaatcctgagaagatttagacaacgtttgaactttgcagttggaagggccttagtcaggatgaatagaacaatccttgatagggttaggtgcatgttgatttatgctggtttgcctaaaaacttttggataaaagttatattatctacttgctacttaattaaccactacccttcctcagtaataacctttaaaactccaattgagatgtggttaggaaagcgagcaaggtatgatcacctaaggacttttggatgcattgcatatgctcacctgagacaaaaaagttagaacccagggctagaaagtgtgttcattgggtatccaccatgtgttaaaagatacaaactttttggagcattgaaccagaaaatcattaaaaatacttatcagtagagatgtgat

SEQ ID NO: 77706 - DNA, 5424 bp, Cannabis sativa
ccaaaaaataatttgtaatactacaaatcctaattttttatattcatttttctaatcctcactttaaaaagtcggctctctttaaaatccatttagataatttaatttagtcacttttaaaaaatttgctaaataattccaagttaatgacaatatctataataattagactttttaatttaatttaatttttaagagagagaaactgaaagaagtgattggattataattaaatgagagagagagaagggatatatgtaattgtaaatgacaagggagaaatgacaccaaccaaggcacactgtccgtagaagcttaggtgggaatgaccaaacgaaacaaataaccccaaatctcatccagaaacaaacacccatctctctctttgtaccctccatcactctggaccgtctggtagagcacactctttctctctctctctctggtctggatgagagaggaggagtcgtgttttgattgaggtgtgtttgggttgagcattctttctcgattcttcgaaatttttgttcttgtgtgaagctgtagccgtgaaaatgaggagaatggtgctgagcttcaccacttctgttgaagctctcaattggtgggatgagatcaatgaatcggttcagtggcaagacggcatcttctactttctctgcgctgcttatgcgctagtttccaccgttgctctggtcactctctctctctctctctagaattttcacttgtgtgtttggtaaaatagctctatagttcactttcctgctctgtattattagctcattattaattttggatcccagttgtgaaagtggtaagcttggaaagtctccccttagttcttttctatttgtataatttttcaaaaaaaaaaaaacactgtaatcactcagttttagcgcgcgattagggtgttttagaaactgcactcgtcaacttctgtttagtataacaaagctagttacttgttcatttaaaaaataaatagttaaaaatgaaacttttatagaaagtttgaaagtattggggctaattactagtaaatagtaatatatgttgctataataattttgttctcacaagaagaagaagaaaattgtggctgaagatctgtgcttatggtgtgcaggttcaattgataaggattgaattgagagtgcctgaatatggttggacaacccagaaggttttccatcttatgaatttcattgttaatggaggttagtgttgcagcctttctaaaataattttgagttttttcactttatgtcatctaattgttggattaccctttttttatttttggtgttgggggcagtacgtgcaattgtgtttggatttcacaagcaagtatttcttttgaatccaaaggttagtcatttcattctgtagaaatgattagtagcttttgcaaagtaagtaataagtcactctattttttctctactttacaaaagaagggcatttcagaatacgctacctttctctttgccgtgctttatcacatgcttccttagatttaactgtcattagaatatattgagttagtgtacatcgccaaattaacttttttctttgctctagcatcattaacaatcttgactgctataaattaatcatttctcttggttttttttatatttttaagcaaaactacaatctgtactcaagaaatgaattctgctactttatgtctaacattaatggagaaataaaattgcctttcatgatgaatatactaagtatggtagctgtatctcaaatcaggtgctaacgttggtggtattggatcttccgggactgctcttcttcactacttacactcttcttgtcctgttttgggcagagatatatcaccaggcaagtgcatgttctaagctctttattccttacttgtgtgttgatagtgaaggtgttaattgtcattttgtcatgtgtgaagcctgagtcctggtgatatataactaatgtttttattttcctttgtattccaaccaacgaacaggcaagaagtttaccaacagataagctcaggattttttatgttgcagtcaattgtttgatgtatgttatacaggtcagttccatctctatgttctttcagaatgcataatttttattaatttagtaattagttggttctttggttcttcatttaaatttgttctttaagtatatactgttttcaattatccataagtacattagatagcattttcaaatggtttttggagattatgagaggcaaggtttgaaggttataatacaagttgtccatgtcatccgaaattatacatacaacagctggctccctcgtacatactaatttcttttgatcgcatatttctttatccttgtaaatgacatgctttatcttcatgttctttaatgaataaaaaagagatgaaggataatgggggaaactaagaattctctgatagtgctagcagttttataagatgactggtatatatatgtttgttaatccttgtggctgaaagaagagtaaaaaaaaatgtggttgcccaaacaaccgctgatggaacctttctgggatgtccctttgtggtagtttattattgaatcttatttttttttgtgtgtgtggattgtagagtttgcaattagctcaatattatagctgagctgttcacacaccgatcctctttccaaccacaaactaaagtttttcttccgctgtttagaaacatctttttaccctattactctagaatcatatctaaatgaaggcaaactccaggtgggcatttggataatcatctggtttaatgacaacaatactgtggaatttgtgggaaagatttttattgcaggtcagaaattgaatctatttatttgtgaattattttcagaaattacattcctggtattgagatttcacatttccattaattagtaagaacattattatacccattgttggtatctgacttttttctttctttctttctcttcatccagttatatcctttttagctgcattagggttcttgctttatggaggaaggtgagtgttcttcattagatttcacaattgtttattttgcgcgtttcttcatcttctcaccgcttattgtacatcacctccagattatttttcatgttaagacgcttccccatagaatccaaagggagaagaaagaagcttcacgaggtttgtgccttccctttactatttaactgacatttttttgggcgtggttgcttgctatttcctcataaggtttttgcttaatgtcacaggtcggttctgtcacagccatatgtttcacctgcttcctcataagatgtgttgtggtaatgattatactgttatctgcattcattactaaaaaacgaaacattttgtctgtgactttcttgtcattgttacttttgtttgtttgcgtccttgggcggtgctgccttttccaatgatgcataggattacataattattatttttgacttgattctaaattttaggttgtattgtctgcctttgatgttgatgcctcacttgatgttttggatcatccagttttaaatttgatctactacgtggtatatttttctcccaaccttggaatgttaccacatgtttttcagctgtttataaaaaatctaatcatgttgttttgtcctaactgaacattggaaatgtctgattgatccaataacagctggttgagatcttcccttcagctctagtcctttacatcttgcgtaaattgcccccgaagcgagtgtcagcccagtatcactcaatccagtaggcaagtgtatcaacttctgttctgaaccttattcatgctcccccgaatatcattttttgttttggtgtgggagttgagaactttctaagagaagcaatagacaggtttgagaaatgaggtgtcgtattcgggtatgactcgctttgccagaaaagttttctgagaagtttaatgcacagcttgcgagagtgagaatgacatttatttatttgattcgattaaggattataagcagtgtatttttgaacgtgttacaaaatgaaattttcctgtaaactaggtgacttttctgtccatctcgagtctttcttaaaacccatcgattgatataatacataatatgtactaagcctctttaggcttttctattgtaaatatttgttcttatagcactctcaaatctcacatggggttaaaatagttcaataacaaaatctataaatgtagaactacattaccaactatgtagttctaaaagatttaaaattatgaataagctctaaagaatttaaactgtaaacatcaactagaggatgaaatttgtaaaacaaagttttaggcaagaataaggtactattgcaataaaaacaactaccactgacgacaaataacaaatatttatacaaaagatgaaactgtttacaaactcttaacaaaaacaacgaaacaagaaaacccaaaccataagaaaaaccattaacaataacatattatcaaaactggaactaaattgtaaaagatgaggatagattattatttattcaagcttgcaaataatactgcatttcataaatgctgtcatttcacacgttccaaactgtgtaactcaatgttccaaaccaaccttcataatttctccatttcaacggtaagttatatttctatatgaacttgaagactaggaacagataatatatagggagcattgatattagtaatttattattggatgcttaccaatgcaccctaatcagttttagtatttaaaagaatttttagtctaattttttgtatgatattttaagttgtagttatttaaaacattctataaaattttaaaaaattcggaaaaatttaacacactgaaaacaaagttcaaataatatcactaaccaatcgtagggtatcacctatcaaaaatgttaggcatcactgatacccaatagcaatgctctaataaccaccaaacatttatcaaacctgtaaattttttaaaaactcttgatagtttgtagtatcaataacagaattcttaatatttcaatttagtgcttgttcaaaaaatgtgtttttaacaaaataaattatacaaaattttttaaaaatttacaaaattaatattataactataacgaatatttcaacatacattttttaagtaacactcctttgtataaaacacattaattgaaattgactggctggcttatttgcatgaatcctcatgattcactgacttaggtctaatatttaagaaaagagaaatgttaaaagtcagccatgcttagcaccctctaacatgtggatattattattgatacaattaaacatcgaatcttataaaatttaatgtaataatttttatcgaatatccctaaccaatcacaaagcactgccacatagcaatgctaaacagattataatt

SEQ ID NO: 77707 - DNA, 1394 bp, Cannabis sativa
  modified_base (1335)..(1339): a, c, t, g, unknown or other
catattcaataaaacacaaaatatatacatatatattatatatcaagttagtaaatatttaccttataaacgcaattcggcgacaaattgcgataaaaatcctgccacctagcacacacacaacataattaataaaatagaaatattccaaaacaaatttataaaaacaaaaatataacaatgtacattaataaaatgaatagaatcatatttatactttaatggacattgagattcaacgttttttccgctaaaatcggtggccggagttataccaccaccttttattttaatagtttcggttatagatatagagggggaaaaaccaaacttttttacagtataagtttagatattgaaaatagaagattttaaaataaaaattgggtaaaatggtgaagaaatgagggagaattgtgggtttttaatggtagttggcgagggttttggcgtgggtattggctctactatggctgtgctggttattgtgtgtttgaggaagatggttgaagtgaaaaagatgaagtggcaatttatagactctatggtgtcagttattaggaaatagccgaccccataagtgcacggttatttgacacgtgtgcacctatggcgtcagttatttccataataaccgacgccatgggtataataaaataagctaaaaattttcaacctccaaccgacggtataaatattattaatttttataccttcggtttttatcaaaaaactacctttaaatgtcaattttgaactaggtggatattttcacttcctttaacttcccttttataaatttggttgaaaaaatagcctctaaaggcccacattgtagtagtgtacgaactctgagcctctaaatcatcattctcatctgattcatcttcttcagtagaaacattgctgctctttctaatcgaagacgaagaagaagaagaataaggacaacatgcagctttcgcaacggctccaccttcttccatcgtcgaaccagacgactccaaatcgagcctccttactttcaatagcgattgacatgagaaaaaaaaaagaagtaaaaaatattgatcaaatcaaagaaaaaacaaaatgagatctcgtcaaaatttaagaacaacaatcaaaaagagagagagcaaattgttcttatctttgggtctcaccgagagaggggatggagcgagagaaggtggttcatggtcggcctttgggtcttgtcgaaggaggaggtggcagtggttgtgggttgctcaccatttgaacgatatagtcaagaggatgaggtgacggaggaggtgattgcgtcgttcgaatgagagagagagagagagnnnnngagagagagagagagagattgtatgaaatgagatctgaaatttggacttttatat

SEQ ID NO: 77708 - DNA, 2415 bp, Cannabis sativa
  modified_base (1882)..(1896): a, c, t, g, unknown or other
atgtacattaataaaatgaatagaaatcatatttatataccttaatgaacgttgagattcaacgttttctccaccaaaattggtgcccagagttatatcaccaccttttttttaaagatccggttatagtgatagaggagaaaaagaccaaacttttttacagtataggtttaggtattgaaaatagttaaaataaaaatagagtaaaatgctaaagaaatgaaggagaatgatggttttttatgggtggttggtgagagttttggcgtgagttagggtgtcgctatgactgtcggttatcgtgtatgaggaagaaggtcgaagtggggaagatgaagtttgatagtatatatatcacctacggtgtcagttattaggaaaaaactaaagccataggtgcacggtttactgacacgtgtgcacctatggcgtcgataatttcccttataaccgacgccatatgtgtaataatgtaagctgaaaaattctgaacccccaaccgacaaaagtattattaatttctatacctactgtttttttttaaaaaaaatacctctaaatgtcaatttcgaattaagcgggtatcttcacaccctttagcttcccttttaataaatttagttgaaaaaacagcctctaaaagtccacattgtagtagtgaactaatacactgtcgttttggttttgaaccgagtgttgacaagtcagctaggttgggaaaggtcttaaatgactttattgtaaaactgatataagttttgttggtgtaggattttttgtacagatataaatttagtgttatttctcactaaaatcaattcaaatcgatattaaaagctatgctatatatgaaattgtctacaatattccactattattagttcattggtcacactaaaattatttattattttttttaaagtttatttatatataaataatggttaaataaaattaatataatatatatatgtattatttgtatttatgtataataataaattattttttagtatattttttatgttgtggttggaataaaaagatagtgctaaaattatcttttcagtgttggaataaaaaaataatgctaaaattatattgtggtttaacactaaatttaacttttattattagagctaatctcatgtatgaaaagaagttagcacaattcttagtcattcatgtcctttttggttataacttagacttttttttttaatcttatacatagatttttgaattgaaataaaaacggaaatttacatggtatactaatttttgtcatttttttacaaaaatactgtcaagcggaattttttacttttttactgtatttttgtataagtttcatactgcagtatattgtgttaagtttcactggtgttctactggtgttttttagttgttctactgttattttgagttgttatgttttgtgttttactggtgttttataaaaacacagtatttttaaaaacttttccgtgtgacagtatttttgtaaaagttaattcaaattctaatatttttgtaagtttcccaataaaaatggccaaagctgataaagatgataattaataattaaaactgtacacgttattttttctagtaatataataatattaacaagaagctcaaaaattcaactggaaagctagctagttatatgaacaagatgctcaaaaattcaactgggaaattaatgcaaccagcctaccaccactctaatatcttcttaaaaatgataataataagcctatggtacactatataaaattaatttaggtgttaacctacactttcattttaatatacgtaattgattggtctagataaggcattttatttatttcaaataataataataaatataataatnnnnnnnnnnnnnnntaattaattaattaattaatatggcattgtatttaatattaggaatacaattattgttattggtgcaattatattatattataaattttatattatttaaattacattaattttatatattcactagtataaagtatttaaaattttagagtgctctttatattgggatacactcaaattacacacacttcttacataaaataatatgtaaattaaaaataatataatcttgcttaagaatataaatacgtaattaataatgcataataaatgtatacaatttaaatgtgtatagcattaaatatttaatcttcttatgtgattataagtaggatataaaattctttcttcttttttttcatagaatacgtacaaacaattgtacaagtgaaactcaaagagtcccacaaataacaagagaattttgattttatatacttaaaaaattaaaaaaatttattattaaaccaaaaatttaaactctaaaaaaactatcatttttttttcaaaaccccaaaa

SEQ ID NO: 77709 - DNA, 4168 bp, Cannabis sativa
aatcacttctcgcttgaatcataaaattcttcgattatctctggtttagttatcacatcttggattaaagggagatcctcctcagctccattgcccatcatgattgcattgactggctttcagataatcctcttcttctttgccatgggagaagcaagggaaacacgcatgcctttctaaataagtaagttttactcttgtttggtgcaattttatgctttttggtagctattattttgcaggtttaaaatagaagaaaaatagaaaaataatgaagtaatatggaaaaatggtcaaacagttcaactcttacggcaagagcactttgaaattaatttgagaaaaaaatctaaaagttttggtgcgattagagctcttgaggcgaagcaaatacaaaatttggtactaaacccatgccagggcctgaaagacctaaaaattagcagagaaggtcgaattagacaaaggcatgggcgtgccaaggcattggatctttatgcctaggcagaaattcgtaaatgctcactacccaaatgaagggggttctgcttaggcataggaattgaatgcataggcccatgtctacaagcacccaaaggatgtggattttgggaacatgggccgcgacataggatttaagtgtcgcggcccgcccctttaaatttcaaataatgatatttgttagatcttttttttttaatctttttttggctataaaaagagtgtgacttcgatattttccagcaagcattctgacagtacaaaaatttgagagctgaagcaactaagaaggctttttttgatggagttttccatattctcttcttttctattttcttcttttgttcttaattgatatgtgtgaagttgttacgatgaaaaagagtagctaaataatttattagggtattgatagatattgtttgtcatcgatttatgattttaatgtgatttaattttctaccaattttctatgtactttatttcattcgtacttaattacttatacttgcatgatcaccaattaaatatttatgattttgacgcgagatttgagaattgagtgtcaattatgctatagtgaaataagaacaaattttaatataagaagagagtacctatgtggtttggatagcttataagatttctgtatttaatgcctatatttaatttatcacgaaaatagaaagtttgaatataattgagacttatatatctgaaaagactataaattacttgagtaaataagctattgcatagaattcagtaataagaattgaatcatgttagaccataatagatagatacaattaaaatcaataaacctaaccttcaatgatcattaatttatatatcaatttacttgcttgtttttattattttattttttagttctaatttcttcttaaattgtaataactaaatagaataataaatatagttttaaagtacttaactacaatccttgtgggatagacctcactctttgtgagtctataatgctaacaatacgtatacttgcgtgttaaaaatgctacaataaccagatagttttaaaccgttggggatacttaatgaaaaatcctgcccaactttttgtgactatattaaaccatcatggattctttacgactatttagaactgtcaagaagacccaattatagacaatagttttaaattgtcacatatttttaatagtgacgatttttaaaaaattacaaattttaaactgaagagaattttgctccttgtagtagttgtttcatgaattaataagcaccctacgaggttcatacaccaataagaatcctgagcaatctatacaccaataagaactccttcaggttcatggatcaatacgaaccccgaatgtttcatgtgtctataagaaccccgagaggttcacacaccgataagaactcagtgaggttcgtgcattgatacaaaccccgagaggttcacgtgacaataaggatcccaagaggttcacgcatcaataagaaccccacaatattcatgcatcaataagaatcctaagaggctcatgcatttataagaacctcccgaggttcacaaaattactattatgccatgttcttataagaaacctgtaaagttaaaaaacaacaaaggcgggctcgaactactttttagttctccaacgcaaaacaagctatactgaagaactagggacatgtgttgttgggataaatctctcctcccccgtgagaaggactacactaaagagaactcatggtatcgaaatggcctcacaatattaggtaaaagagatatcttacagtatcaagaaagacaccttacacatttagtaaaactgcgatgtcaaccagaaaatgtgtaaatacacaccaatcaataaaaataacagtcaatgattcaagtgtcattaaagcaagtgttacatttactttataactattgtaatcaatgtaattaataggcctatcaatatttgtaatggtctatcataataaccacaatttgttcgcttaccacctataagtaggtgcctccattcaaaggaatttgggctaatcataatagaatatacagagcaagagtactcttttaaaagtggactaggcaggctgagagttcgatgctcctactgaaccactatgatttacgtgtttttttagtgtattattatatacattctttggggtactcgctagagtactcacatgatttagtgttgtctaaattcttccaacaacagggaaaaagagaaaatcgtctgatgtgttttgctctaatttcaagcaccatacagaggtggttttcgaccactcggttggggacaccattgtttagagtgtggacttgttcttgaagcgcactctaacgatgtaaaggagtatgtttgaagctaatcacaatgattttttagggatttttagatatgatattttaggtatttttcactaggtagagaagggaggaggctatgagattcgggattttcttgggcttgattttttttttaggaacatatttttgttgtgataataatgatatgatttttatgatttcttggacttgtcgtcctttaggaggttggggccgcttgccgttgttaaagcttgggttgtgccatcgtttgaggttggggtaaccatcagccaacgttgagagggtccaagattggaggttggctctctcagtgtttaaagaagaagaaaaagacggaggaaaagaaactaaagaaaaaaaaaagtttttaattttgtaattttatttttgaattatttttatagtattaaataattaaatcatataaaaaataaatatgctctgtgtacaattgtgtcgacataaataatttaccttaacacttaaatatgaaattctaacataatagtaaaaaagcattctaacagaatagtaaaaaagcaaaacgaaatgtaaattagaaaattttaccataaaaaatgagtttatgcatggaataattaagtattaccaattatatagctatcatataattttgccctcaataccccttattataattttctatacaattttatttatacatgcagtattaatatttctttgactacgaactatttacacctatggtattcagatcgaatattgattaaaaaatcatttgcatggtactagtgagtcaaaaagacaagaaataagatatataaatgtgtctatatatgaatatatgcatttttttttatatatatttatataaaaggttcttggccacggcggacacagattgaatcgctttgtagttttatcactaggccgccttgtgcatttgcgaattttatatgcgggtgcttacgtgagagaatatgtataaacatttgtatatggtctctctgctgttatatattgatgtagttattatatataaacaattattatatatatatactatgtataatttttttaatttcttaaaaagagacattaatatatagataaatatatatatatacatcaccacaagtcatatgtataacctttatttttaaatagtggaacagttgacttgttattttttgttatctattatgtatattgtagtataaaagcattgtgtgataggtggaacgtacaaaattagtttgcagaaggaaaaaaaagagttgtattaggcattctatatcaaggctgttgtac

SEQ ID NO: 77710 - DNA, 516 bp, Cannabis sativa
tttaactttctgtggtatttttaattgccacaatttcacccaaaaaccagagttgcttgcaccagtcctcacctctctttgttcctgaagaatattataggcactactcacagaaaattctcctgagctttcacctttccaagaccaaaagtctccctcagcagtgaaactaacaggtatgctaagtatcaaactaacatccctttggttaaatatatcctttatgagatcaacatcccaacacctactatcaaccatgaagagagaagccacgggttgattaataaggtcaggattaattgaagtaacataaggattctcattattaggaagccaagaatgagataaaatatcaacatgcaaaccagtacccacaatacgtctgaccccttgtcgaactaaggattgagaagaccaaacactacgccaaacaaaactcggattggccccaagatcagcagaaataaaatcaccatttggaaagtatctagccttatagattcggccaacaaggga

SEQ ID NO: 77711 - DNA, 670 bp, Cannabis sativa
aagaaactaatggtggaaaggaaatgatttgctcaatttacagcaataattacagctttgagaggtatcaattaatatgttcctgtaatcaactttctcagcacttgtttctaaagtaaattaataaagctttctttgcactatagttcacttgtatgtaattcgaatacgattaagaatcggattttttttttgacgtagtgaatagaatcactcatgaatttacgatgcagacattcgtaatcaacacaggaatctccttgaacctgcatagctcattgtttacccgaagggcgtgctttgtcaaaccatgaactgctaaagtcaacaagcaatataataaaattataacttttttcaaacagtacacctcaagtgcaagagctttaactgaatagtacgcgccaactcaataacatatcaagaatgttccaaaaatatctacaaaataaaataagataataatgaattaatcccctagcgatgatattaaaatctaaaaaagaaattctcaatagttagaagataacaactcccaaacaaataatataaatttattgacaaaaactctgtaacagttgatcctcttcaaaactgacctacagattaacaaaacgtaaaactctattagtatacaatataatgaaaaaaatagttagtgtgaacaaaa

SEQ ID NO: 77712 - DNA, 1568 bp, Cannabis sativa
tatgaggcattagatgtgtgtaacaaacgtagccacgtgtcccatcctaatatttttctaaattattagaatactagcagagtaactaaatcgcaactaaaaattctatagcaaccgtacaaattattggagaaactactttagaaacccaaaccgtaaattaaaaaaaaagttaaaaaatagtacatgggatcatttccctttgttgtttaaaaaaataaaaatcaattaaatttaaaacatattttaataataaataattataacatgaatttaacataataaaaatttgaatcacaaaatcaaaaaaataaaaaataaaaaaaaatcaccaatgcatcatatataatatacaatatatataacaattaaataaataatgcatcatgctttaatttaatattttaataataaaaaaatatatatgtcaagtaatattttaacctaattattttattaattcaatataagtattactttaataaaattttgatataaatatttataataatttaaagaaatatattgtatagtactatattagattcattagaataaaaatatttattttataagtaatgtcttaaaattttaatagcttatctatgataactatatatttgataataaatctataaataattttttcattcttccctttaattttttttaaatataaaatgtatttacaaaataaaaaaaagaaatcctgctaacagggattatcccactgttggatgcgataaataatcctacacaaatagaattagctggattagttattcaagcctccaacatggccaaacattggactcgttaattatccaatctaatccagtctaatcatgtgtgtcaaacgaacccttggcgtaaaaggttctatgaattaaagagtgcattttcgattctatagtagagtcacaaaaaattaataaactaatgagattgtttaaaaataaactcacgtaacttactggagcttgagttcatggatcaaaatgaacttaacaatcttaaataattaatttaattattaattataaaaatatcatagaaatatataatgctaaattatttatttgatattacactgagaaaagaaataagagaaattttgaagacttaattgcaaagtctcaaagagagtaatatagtaaattgggtcaattttgttaataattggtattgatattaatgaaaaacgtaactacacttattttatcacctagtattttcctatatatatatttattaagtgatttatgaagagaaaacctaaggttttgtgactaaggcacaaaaaaaaagaattatattaagctagccactatctttatcatctctcgctttctctttgaatatctagctttcatcaaagacaaaaggtggagtcattatttccgctatgtatttgtaagtaaaataaatctacattttggtttaaaggaatccttaactatgtatatatgtattatgctttctattatatgtttatatattgtattaggaatcatgcaaatagattataatgtgttggatccaacagccactagtataaaaggagatat

SEQ ID NO: 77713 - DNA, 1039 bp, Cannabis sativa
gaagctttattatgaaaaaatttagtatttctatcacccaatgctaaccaatcagctcgggatcattgcttcctataacactcttttcgtgacaaaagatctgtcaattggacttcaagtctcttaacctcatccattcagatcaaaggagcatccacactaagtagatcatcaattttttttgtgtcttcctaaccaacataggaatagaaccattcttattcttgttccaaaccccaacttagaagcacatgacctaaaacctcgataataccctcctggttgtccaatagaatattaggagacaaccatacattagctgcaatctctcaacattcaacatcccacaaccaatgaggttcaaaacgaaaacctcttttcttctcattcgaccttctttttataacattctctataacaaccacaataggtcgatggtctgattcatgaaactctctgttaatcacaccttaacggtagggaatatctcgtgccatttttggttacaaacatatcgatcaagtctttcctggatgtgcgcatctcccaatctcttgttatttcaagtaaagcattgaccctcaaaacctaaattcaccaacaggcattcaatagcatgttagaaagcattcattgctgaaatatatcaatcactaccccctttcatttcactagggagggtctcattaaaatcacccaagaaaatccaaagaacattaaacatcccatcaagacgacttaataaacaccacaattcaacacgaagattggattttaggctcccataaaatcctgtgaacctcaacatatccctccctagaaattttaccaaagcaactatatgacctgtcgtatacgacttcacaaacacctcccaatcatcattccataacaatagcagcccaccacttttaatttccaacacaatcaacatgaaatctatttgcaaaataaattttccttctcaccccctccacccaacaaccataaaatttatttcaaacaaaaaaactaaacttggggagtacttacaaacaac

SEQ ID NO: 77714 - DNA, 644 bp, Cannabis sativa
tataaatgtttaaataaaaaaaataaccaaataagaagagtacatgtggaatcatatttgagtttgggaaaggacaatcaatatttcagagatcacactttcgatgaccattctactggctagtctactaataatgattacatttaaaaaatataattatatccacagaataattcaacactaaaaaccaaaattaaattaattttaatgtatatattttttaatttcaatcatttttttttcatatacatatgttttataattcatatctcaactttgattgggtgtcacgaaaatccttcgtcacgttcataatctctactacctggatcgaagggagctcctgctccggctccccatacccgatgatctcttaagtttcagatgttccttctttctctaaaaaaaattcagcttgtttacaaatctttaattaatgttttttttaacttgcacatatattagtttattttttatttttttcgaaaatgctatggtatacataatttataaatcatcacttaaagagtttaggaaaatttgcagcaaaagtccctaaaaagttcaatttgatacagataagtctccaacctccaaaaatagcggcaatagtcctcaaggtcagattttttatttgtccgttg

SEQ ID NO: 77715 - DNA, 924 bp, Cannabis sativa
tcgatttctacgtgcttcgttcgttcatggaagacaggattctctgatatatggacagcagcagtgttgtcacaaaacaagttggccgggagtgatatgttgatctggaagtccttgagcagtgcaatgagccaagttaattcacatgttgcattcgccattgctcggtattctgcttcagcagaagaacgagaaacggtttgctgtttttttgatttccacgatatgagggagtgaccgaagaacacacaatatcctgaaattgattttcttgtatcggggcatgcaccccaatctgcatcagcgaaagcttgtaatgttaattttgttggggctgtggcatgaaagaaaagaccttgtcctggggaatttttgagatattgcagaattctacaggctgcatcaaggtgtggttgtcgtggattttgaatgtattggctaagtttattaacagcatagctgatgtcgggtcttgtgatggtgaggtaggtgagtttacctatgagacttcgatattgggttggattgaggagggccgtgcctgtgtctttgttgagtttgatgtttggctccattggtgttgaggcaggctttgtacctaattggccagtttcttttaggagttgaagtgtaaatggcctttgagaaactgaaatgccttgttcacagcgagctatttccaaacccaagaagaatcttaagttgccaaggtcttttaatttgaattgagcatcaagagattgtttgaaggtagtgagttcattcaaattattcgtggcaacaattatatcatcaacgtaaataagcaaggcaagaaaagtgtcagatttgtgtctgataaagagtgagtgatcagattgtgagtgatgaaagccttgtgtaattagatggttgcttaactttgcataccattgtcttgatgct

SEQ ID NO: 77716 - DNA, 5281 bp, Cannabis sativa
aaaaaaaaaaaaaaaccactactgccatatgtgaatagtgcaatttggtgtatatatctgatcgcacttgtgttaatttaaaatttattatatatgaatactcaccaactattaatgtatgtcgaatagtaatatctttttcttattagctttagagttagagtttaggaaattataagttttatgggtttttatacttttttttttttttttgcataaaaatttggcttatttaaaaaatattattttatgagaaaattaaagaaaaaattgaaaaatatgagaaaatgagctaagggtaaccatgtacctttatggtaagacggataatcagttaccataaaggagtaataatgtaccttatgttgttttttctataattttaaattttttctatatttttcctaaaatatattttttttcgagaaaaaatcatatttttactaaacttatactttaaaaattataataaaaattttccattaaagaatcaatatagttatattccaattacaattgactatccaacattcaatctattataggaatagttctgcataggcctaataaaatatttagatgatatttggttgaaggtaatgaaataaaatagaattgaaatgaagaaatttaattctatttttttgtttagttgtattttaaaatattaaaatttcattcattctaacgcaatgaattttttatcattttagtagaattactattccattttaaaatggatggaaagaccattccaatacaagaaaaaaaaaattaataatttttcatcaatgttctatgtatcttcaatttgattccattctattcatattcctattcttatatattatcatttcttctaaccaaatgccaccttattgtgaaccattgaacaactattaggaattgattctcagttataactgttagtagttagttattctgtttcttagtttcagttggctttcagttatagtttttgttaactggttttcaactctctttagctcaagttgttggggtatcaacccaagtcctaaaatggaagaatatgtaagagtttttttgaatataagtgttctacctactccattagtatgagactttataggaaggtgaccaaaaataaaatcttgagagtctactctaggtctaaaacggacaatatcatactattgtgagagtcaatgtgaggtagcggcctgacaagggggaagaataaggaccaacaagtggtatcagagccaaaggtttacgagccttgggattgtgagctacatttgcgatgtctaggagaagccctcaatgtgatgacctcgcgattgaagatctatatggtgctttgtatcaaaagtctaccagatattgaggtattcaagtggtgtgtcccgttgatgattacggcagtataagatggagatcggtgaccagtgtcgaaagtcttcctaacaaaggtgatggtcgggtagtgagtttcgttggtaatagcgtctgcataaggtagttttactggaggggaggccacgagtattttgtccttagtttgaggggaggattgttggggtatgaacctaagtcccgcattggaagaatagagatagagctgtcttgaatataagtgttccacgtaatctattagtatgaggccttttgggaatgtggctaaaaataaaaccgtgagggtctactctaggcccaaagcggacaatatcataataatgtagaagtcaagataaggtagcggcccaacaaggtagaagaacaggacttaacacaagcctatagctatatataattctttttttcactcaattcaatcaatgaaagctttttctctctttctctcttttctctattttcacaatatggtaccaactctctttttctatatatgttatccttccttctaaccaaacgcaacattaatgtgaaccattgaacaaccctaacattatgagcatccatgattattaacttgtatattaacttgtacgagtagttagtaaatttatatattaatatttaaattaaaatatataaaatttaatattgaattgaactatagtattattgatactaaaaattggccaacaccatctcactaaattggcaagaaaattaataaaagaatgaaaagaaagtaaaagagacactacaatttataatagttcactcccccatatcgcgatggtaatggagctacgtctacttcaattttttattgctctcgagaattgactaaggaaaaagctcagatttctagagagtgtattcggtaaaattagtatgcaagtatacgcaatcgaaacaagtaatatagtgatagatagagtatcgttcccatgagaattgattatcaattaccaatcaattaattctttagttctatttgatgaataaaaattgttggagataaagtaaataaatcaagacaatgattaaaatttaaagaaataataataataacaaggattattatgatctaagactatcattttttttaaatttcccagactatcctttatttactttttaatgaacccaatttctcttcttcctattcaattgacaagttgagaaaagaagtttataatctggttatgacttataaatccaatctatgtgaaaactccctatattcctatggtaaagtttaatcagaaatataacattaagcaaagcaactaataacatcatacaaacaacatatgaaatttcatcctaaatcaatttgcatccataacaatcggagcatattcaaatctcactttctagaattttgattcaattcatagttaacaattatagatgaccagtaaataattctaaaactaaaacaaatttttattgaattgacttaaaagaagaagaagaagaaactgaactattacattaatccataaaataaattcaagtggttcacataataatccttcagaaaattagcaactagaagtcattttaaaataatataaatttaactaaaaacataaaagatagagatggagaagatagaacactatttggtgtcctccaatggtctcttcttctccctgccctccttctacactcagaattttctaaaaattttgaatggtatgaaaacctagctccaaaaccttttataaatcaacagagaatgccaaggtattccaatcaaaattttcaaaacagttgcaattctgaaattatgttgcgacgcctaatagtattttggccataactcactcgatatatctcagaattagactattcaagatgcattagaaagataaaagaacgatctaaaactttcattgaggaatttttttttggaagtgaatgaatcatagtcaaaaattaacttgaagcttcagactttgttttcagttacaaacagaacgtgttcatcatccaaaacttagaattttttaatttatttttagaaagtgaaccacaatttttgaagctaaaaatgtgaactttgacgaattttaggcaataagaaccaactaaacattattgaagtttcttttttcctcaaaattaactatttttatttcaaaaaggcttgaagaacaccaaaataaacaaaaacagaaatctcccagtgtttcacctgaaaaatacacaaaaataaatactaagaataaatctgaacaagatataatataaaaaaaaaaaatacatacacacattaaaatagactctaaaaacacataaaaattaacctaatagagaaaaactggagagagagatgctctgaccttatggggacttagtagaatgtgaaaaatgagctagtgaagctctcattttatagggaaggaggtcaattaaaatattaataaaataatacaaaatatgaaaaaaaaaaattattattggttgaccatgatggtgatctaatggttaaatgacttctgatgataatcatcaatttttggaactcaaattgtgtctgttggattgttttaaggatttttgcaaagaaacatcacacttgacttggggataaatttttaacttaatatctttagaattgcgtatatgagtgagtgacatgtctagaaagagcttgagaagtgcttttaaaaaaactagaatcgcataaattagagtaatgttgagtgagttatagctgttttactgaagattgttcaataactggcacccaggttgcacgttgacatccagcgcccacgttgacatctaacgcccaggttgacattctgacgtcaacctagatgttgtatgagtgggaaaatgtgttgcacttgtattttttgaggcctaagttatatctgatatcacttagtcaatttcatagttatggtgacctcagtcaccagttctttgagatattgtatttttatagaatcgtgagactcaaaactacccaatttgttaccgatatttcactttgaagaaaatggtgaaatataaaagtgtgaatttgacttgtcacacttcgtagctctctttcactaagaaaaaatagttagatgctcgagacagaattggaatcgaataaagagaacccaatgtactaggctatacgtcaacctagtgttgggtgctccttggtgagctttccgagacttgttttgttacttctatcgcatttgagattacaaacgaggtctcttacctcatttttgaccaagataagaagaatgctcatatcagaatttgcgtttgagaagcaaaaacatgcgaactagattgaacatcaacctgggtgtaggacacagcaccagtgtcaacttgggcgttgggtcaatgtttcagccatcagacagtcttgtttacttcccgagaacattggtatcttcgtttaaaaacaaaaaaaaattcttgtgggacttcctggaaaaaatacttagaactggcctaggttgacaaaatgtcaacttggatgctgggatttagcaccacatcatcttcggcgctgggtctctctcttggccaccagatggctatgtttgacacctcaaagcactcttaaattaattgttgatgaaaacagaaatatctaaaaaagactttaaaatgtcaacctaggcgttggatgtcaacgtgggcgctagtgaccaggcccattgtcaacctgggcgttgattcaccactttggcctcgaagttatttgtgtatttctcgaaatcacttgtttccttattttggaggaaaacaaagaaatattcgagaaacatctttagaaaagtggttggaggctccccaaattgacaacatgtcaacgtgggcgctagtgaacagacccattgtcaacctgggcgttgat

SEQ ID NO: 77717 - DNA, 501 bp, Cannabis sativa
tccaactataccatcactccttttagcacaaagtttaaacctacctgtaatattcataacaaaatagtgttaacaagatgtacactaaaatttagttttttacagaaacaaaagaaaacaaaccaaacctgttttcttggcaggctcaaataataagtctgaatcttctttgttcagttcttgctcatcggatgtgtgctcatcagatgtgtattcatcactgccacaacaactactactactactactactatcactagaaataagattgttttcactatttgtcatttttctctttagattctgcacagagtggttccccaattcatttagatcctgatcagcctcttcttcttgtgcttcttcttcttcatattttaagggtgaagagaagaatgatcaagacaatattattattactattattagtataggataatagagttcttgtttacctgttaacacaggggaatttgctacaccatcgccatgaaaaataac

SEQ ID NO: 77718 - DNA, 768 bp, Cannabis sativa
tattggtccaattaagtattgggtcccatataatttaatataataaattttaaaaaatatcgttaattaatcgcaacgcaacatgtcaagaagatgctaagcattacgggtactaatagcaatgctcattattaacttctctttttaatgtgaacacttgagttgtacacggcaagcaataagtatcttctggtcaaattttatctttattgaacgaagacgcagaccaattcaaacacaaataaggggccaaacgggtaaccccacgtatgtgaatgacttaaaactttgactaagcgatattttcaaatataaattaatagaaggaagaatagtaagactcacgagtcacattctcatactatttctttattttttttttttttagcaagggctcgttttttttcttaattcatttttttttggtaatgtcatacaatacaaccgccaaaatgtcatatgccatatctcaaaagtgctacagaaaattaaaatgtcattatgttagtttgaaattattagaggaatttttttatttgatacaaaaatattttttttttttggtttgattcaaaagaaaattgaacaaaagcttagaaggtttataaacaaaagttcaaaaatttacgtacaaaagcttatatacaatcaaaaaagcttacatatagtcaatagaactaagcttagcacaaaagcttaaaaggttacgtacaaataatattcccttaacatttctctactaatttgttaggagtattagttagagtt

SEQ ID NO: 77719 - DNA, 569 bp, Cannabis sativa
actttcaatgagttggaatatcctcacttgacctctgggaaaggtagtgtgtctccgtgtaatgcaggaaaaatagaaaataagaacattaattgcgtggaagtggattaaagctactagaagaaggttcacatacgaaagctagtgtggaactgaaaggtagtgcgtagatgaaagctgatgctgagctagaagataacaaagaaaaaaatagaggttttaaaaggatttggacatacagttttaggagcttataagttggcgcgtgatagaacttagagagagattcaccctccggcaaggttcgtggaagtaaactcaatagcatttgcactggcggcagtacaacaaactagaattaaagaacccggaatcaagtcgaacaaagtcaaaatggctttaggccatggatgaggagatggattcactttggaagaagaagacttgggttgttgtaccaaagcagacaagaaaattgtgaagtgcaaatagattctcaaggtgaaagagggaatcaacgaaaataaaccagtaaggttcaaagccaggttagtggctaagggctttac

SEQ ID NO: 77720 - DNA, 1043 bp, Cannabis sativa
ggcttagttccctagtaagcaataaatgtaatcgttgacaattttcatggatataatttagtgtgaggataatttaaatatatataccagaacattttttaataactattattaattgatggatactaaataaatttaactataaatattaattttaaaaatattgagtcattagattttgatccggataataaaagagaaattcaaatttatatacttaatttaactacttaattaaagaaaacatcaaaaaatatcttttttttacactatatcgaaaatatgtttatatgaaaaatatttaagtcaaacttaatatttttttttatcattttttgttgaatttttgtttattcttttttttttttcatccgatggaacaatcccagcccatataatgtaaaaatgaaaggtttttctaattaaataaaaaaattaaacataaaaacttaaattttattaatattattcatttatgagtaatactcattaaaagtgcatccatatatatgtttatataaaatgaaaatatacatctcaacattgtcaatttattactttttatgaatgatattgaaaataattattattgttaaaaaaattatattttacgctaagtaattagattcttttaaaaacaaatgcttgaatacctttaaaaaagacaaaaagaaaaagaaaagaaagtagagagctttatttttccaaacatgacttagtggataataaatataaaaaattaaaaattatatggatttttatattttttgtccaaaaatatagccctttttatcaaaaagattattttatgagaaaattaaaaagaaagttaaaaaatatagaaaaataagataaaggtaaccaagtacctttaagaaaccacagggtaaccaattaacataaaagagtaaccaagtacctatgttatttattttttttattttttaaatttcccataaaataacattttttttttgaaaaaatttatatttttgtaaacttattcttcaaaaactataaaaataaaaatttcccattatttt

SEQ ID NO: 77721 - DNA, 727 bp, Cannabis sativa
tgactgggactctccacaatggcctgtatacttttgatcccacacacttcaagatcttaccctcctcttcaccctcctctgtcaagccagatttcaactcttccaatcaacagacagtctttcttctcaccaatgaaccagatgttcttgattcaaggtcatcttcttgtcatcactgtaataattcaggtgtttccttgtttgatctttggcacaacagacttggccatccttcacataaggtggtcaaatctgttatgcaatcttgtaatattacatgtaataaaacaccttacaatgtttgtcaagcctgctgtttaggcaaaattcataaaatgccttttccaaagttttcccaaactgtgtactctgagccattgcaactcattgtgtccgatttatggggcccttcacacacattatctcacattggttacaagtattatatgagttttgtagatgcctttagtaggtttacctggatttatttgctcaaaaccaaatctgaagcacttaagacctttctcaactttaaaactgaatctgagctacaattgggtaagaaaatcaaggtttttcaatccgattggggtggggaatatagaactttttccgaacctcttaaacaggctggtattgttcataggcacccatgtccaacaactcatgaacaaaatgggttagtggagagaaagcataggcaaattgttgaacatggattaagctt

SEQ ID NO: 77722 - DNA, 1347 bp, Cannabis sativa
aatcagattgtaaagggttttatttagggcacaaaacccaacatactactccattgtcggttggccaaatctgaggtcaatagttgctttccatatatttcttacatcatatattatttgcatgggatttatatggacttttagtaacttagggctagaaattttgaggttacacaatttgcaggtcttgggtttctatgctctgtatttcaagaatttttcgggattttcttttgtgaacaagacaatgtcccattctcatctagattatgaacacccagaccatattgaatctgattatccccaatttcaagccataacttttaaacctcaaagtcgtaaacctcaatccatacttaagataaatgatgaaagaattagggagcataccattaggaataatcaagaagagacatgcattcgttataggctattcttagatgaagttattgagggtagacgtcgttgtttatgagaagcagcttggcctgaattttctaatttagtaaaaatccccttagcaaaactattattttacctcgagccactgttgcttttccaccaagtgatctggaaattgagattatggcttctaaagctcaaaattctaagatgcctcagaatcctagtgtaactttcgaggcagagttgatcgaatctaaggtcagatcaattgctccttatgtaggagatttttttttgagataatgtaggagatgttttaagatcttacaacataaaaaatgaaaaagggtgttgcatacgctcagtcgcacctggcaaatttaaatgcttccccccaactggcatcttgaatgatgaaggttgcagcactagcgactcttcaaggataggagcttggagtgttgagcatattagagcaagggttatccttccccttaggcaatactttaaggacttttgtaattacctcggaattacacccttttaactcgctctcaattcttacagaattcttacatgcttgaagtcactttaccatatcttaggatgggattgcccaacccctttcgagattctgtgtttctactctactaaagcctgtcctatgaggaaatactatttaggaggcctctctactacttggagacccataccatcgaccacaaaattattgttaggcttcccaataaaaaggagtttaaggaggacttcttttaacaacaaggttccatccaataaacactacctgattcaaaattttacgtaagtataaatcattcctaaaatcttggttttgagttttagactttttatgactggattttcttactaattctttgtttttatcacattttcaaatgctatagagaccaattccaatac

SEQ ID NO: 77723 - DNA, 707 bp, Cannabis sativa
ttattttaatttattgttggagacataaaataataataatttattttattttgttactgttattatgtgaaaagaaatattttttcataaatattaagtaatttaatattgaaagtaaccaatccaaaataatcaattcaatctgcatttttacggagtggattagattgaatttgcactattaagcagattgatattgatccaaaatataaaatctgcagttagtgcgaatcggatgcactcagagcatgcagattggattggatgaataaccttattaacgacaaaaaattacctgaactctatgattagtgacacttaattaatgacataaaccgatattttggttgtaaaatcctccaaacctcattttgttagctatttacccctttcggccaaaagactctgttaagtgccatggtagacatgccacagtgtacacaagtatacacgtggcaaattttaattagttcacctaattttaattaattagatattttaaaatttataaaaaataattaaaaatatacttttttcttttttcttttttctcttttttcctcttttcttttttcttttatttctctcactgtaaccctaatttccactcgcactccctctctctttcgttctccttcttgcacagttccagaaagttaccttcggccaccttcaaactaaatgaaccccaaaactgacttcttaac

SEQ ID NO: 77724 - DNA, 1223 bp, Cannabis sativa
ttatcatcaccgcgtcaaaaaaaaaaaaacatattttctagcttttggaagaatatcctttatttaatttttaagaatattaatgagttagattaatcacaaaatatcatccaacctaacagatttttttatgaaagaagtgttacatgattcaatcccatgacccccacagaagcacctccaatatattttgttttgttctttttttttttggtagcgaaataacttatgagtcttgggttctaacttctaatttatgttctctttttttctcatctattattttactaaatttgataacctttttttcttataaattcatcagatgaatactccttgcgaaactaaaaaaacttgtactttatatccgaaaactttatataaaaatttttttaatatcaccaaacaaaattataataacaatacaacccctttgcccttgtgtcgcattgagagctgtcacgtctctctcttactttctaattcgtatgattgtttacgggacacgaattttgtgtttataggacgtttgctgctcattcgggcatttacacaaacgctttggctacattcggtcctgggaatcaatgaagtatgtcttggtcaccggtggcgtggtcagtggcctcggcaaaggcgttactgccagcagcataggcgtcctcctcaaggcctgcggccttcgtgtcacttccatcaaaattggttctttgctttgccttgctacttgttttttttttttgtttcgctttcttagctttcccgttccatgtttggtttgattatattataccttttggtaatatgggtatctgctgttaattgttaattgtggtcttttattggatttctatattcactgttattcaaggaacaaacggaggaaaatatttgagcttttatgcaaagtttttacttttctgttttttttttccctcctcaaggaaagggatgaaaattgtttgaatttctagactcgggttctcttagaatgtttgcattttggtacttgcatactagatagtgtgaccgtgatcatttcgggagtaaggcatcatctctgaactgtaattttgtgattttaatggtgggaattttctttgaacatctgcagatccttacttgaacacggacgctggtaccatgtctccgtttgaacatggggaggtgtttgttcttgatgatggtggagaggtatatcagtacttgtttttgcttgcaaa

SEQ ID NO: 77725 - DNA, 1753 bp, Cannabis sativa
ttttttatcaatttttgtatgcattttaaattttattgcattttattcctgttccaattcctattcctattctcattcttatatttttattcatttcaaccaaactccaccttaattaataaaacccttaataacatattccttcgtaggttatgcttgatttttctatcactaatctactcacccaatgatttcaacccatcaaatcttcataatggaaaagcaaataggaatacattcttaaaaataaaataaaatatttgttaaaaaaaaaaactcaacatgaataacaaaacaataaaggagtccttacaataatggaaaatcaaaaaacgcaatagattattagaacatattagaaatgatgtgagtaccttgtagggatccatattgaagagagcagaccgaattggcgaatctttatttctggtgtggaaaattttggagaaatgaaagaagggtgtgagggttttatactactttttttttccttttttctttttttataaatctcaatttcgagagacatgttattatcttattatatctgcgggcactgaaaaaagttgttagctgttttgtaaatgagtggttattacgagtacaaataaaatcaaagctacacctatatatatgcatgggaagattacatcatcttctaactggccaccaaaacacgtcaaagaatgaccgtttccaacttattctatatacagatttttacaaaataataatgactttatcgtaacaaaatgaataagattttttaggcacaatatacaattaaaaaataaacacaatatacaattaaaaaataaattcagtacccaaggttacttcaccaaaattataatacataaaaattgattacttcaattcttcattatatttataattattttaaaaatttacagttaaaatataaaaaaatattatttattttacactccaattctaatgtatgttttttttagtttatttattgataaaagtacaaaaacgttatattttcttgggtttcaataccaactctgttgtttcatactttgatacttttaccaccaaacacaaataataaataatgtttgaaaattcaacaatgcatctcctttaaatagatgtattgatgtatttttatctattttagcattcaaaataattttttagtcaaatttttttgcatagtcatgtacgttattattattcaagacatgcggcaaaattttaagaaattttagaaaaaaaaattaacacgccgaaaataggattcaataagtgtgttgcacacatgactattttattttatacgcatgtgaaatagattgtttgaacactactttttatattgtaaattattccgaatttctcaaagttttgtatgatattttaataaataaatataacgtaaacgaatatgaaaaaaaaaataaactaattctttttttcagatgctgaaataggtaagggcatcagtgcatcccttttaagaaagtgcattgtagaatcacacagtaatattttggtattttagttgaaagtaaatttaaaatgtaagtatttaaaatataaaaaaatttaagtagcatttttttcatttttaaatcaactcaaaaattaattatattctctcttttaaatagattaattataaacgatgatagaaattgtttcctgagattttcgaaaaccgaatataataaagattaaaataaaaaagaaagattaaagcgaaaatgagacgaggtttttatgt

SEQ ID NO: 77726 - DNA, 849 bp, Cannabis sativa
attaaaataataattaatagtaaatatttaaagtccatgtggtatgtatataaaatatattattggattagttttttagaaaaaagctagcgttggcgtacaggtaggttcctggaatatagatcattaaattaaaattaaagtttaattatattattctacaaactaagataaacaatgttacttattagttatatcatcaatcgattatcatgacataaattttaataagtcttagaaagtatcacaagacctgaaggggcaaggggcaaaatagcttagttttatatacatattttagtacatccatatatgttttagtgtactcggcaacattatgacacttgaattttttttgccgtttaaaattttccttgaactattgacattgttagatttaaggacttttgtttaattttattcaattttactatttgagtgattatttatatactacaccatgctccccaaactttgatatctactaaatcatgctcctcaaactttgacatatagtactaaatatcatgcttcttgaactttcatccatgttagactttttttttttactaaaattagacaaaagttcttaaattcaacaatctcaatagttcatgagacatttttaacgactttaaaaattcaaggggcataatttggtacacgttaaagttcgggggataaaaatccttattagccattaaattatgtccaatggctatacatatatatatgacacttctatggtagggatccttgttttgtccctatgggtgaggacattttattgtacctagattaagaatctaaaggtgataagagagtagggtacataaaagtaaatgtaga

SEQ ID NO: 77727 - DNA, 550 bp, Cannabis sativa
tcaaggttgcaacccaaccaagaagggccaatcaaacaagcccttgcatcatcagatctttctgtgcaagcacatttggataaaataagagacatgatcaaggtgttggctagcccgaaaccatcagaacttgagctagataggttaaggggctcacctttctcggcatacattaatgccttccccttgcccaagttaaagataccaacttagacgatgtaaacagtgaatatcccctaatacacttaaaatactttgagatccaaacaggtctccaacaaatatctagagatgtgtgatgttgaatctttccagcaaccctaatgaaatcacccaagagtggtatttcaagctagcaccaggaagattcaattcttgggaagaattatcccaagaattctatattcgattctatgcctcaagacaaatactttcatgacttgtaaaaatgtgaagcaaagacaagatgagcatttttgaaaaactacattcaaaggttcattgctgaggcccccacggtcaaaggcctgacaaaagaaggctaatatac

SEQ ID NO: 77728 - DNA, 2556 bp, Cannabis sativa
tgttgttttgatattgtttttttttttgttactttcatgtagttttttattatttttataaaataccgtaaaaatgtaaaaaacgtaaatatataaaataatttacaaaaattaacatttaaagtaattattcctacaattaaatgagaataatggtaaagaaaataatgtggatccaaaaaaaacataaagatcaacaatagaaacaatatgacctaatgaaaccattagaagaaaaattttaaaacaaaaaacaaactagcaaataagagtaagtagaacaatcaacatcagttacagcttaattaaggcttctcaagaagcaacgttaactaagaaacgtgaatatgacttgttattatggaaaattatgaaagatatatttaatcgaattactattcaccatgttttatatattttgatctaaaataagaaatatatactttctcatataaaattacactaatcatattatatactactcaataatacactaatcaaatatatatatgattattataaaaaaaaactataaatattaactttaaaaatattaaaccattaaattttaattcaaccaccaatattaaaaattaaatttaaatttatatacttaatttaattatttaattaaaaatgataaaaaaaaaatatctatcttcaaacttaattcttatttatctcggatgcaacaacctaatattatatattctaaatatgtatttctttaattagataataaaattaaatataaaaatttattgtctgatggctattttttttctaatcctgattgttttttcattgtggagcctgtttcctattttgttgcctgattagtaatgaaattgattcaatttatttaaaaaaaatatataatttttttttttaatagtatctatttgcaagtaatactcattacacatattaaatattaaattataacaaatcacaaaattacaaattgatagtgtcgttttctttattttaatcactagttcacagtgcataaaaaaaaaaaaactctagttcactttactagggttttatttatttattttttaaaaaataacttttcaccaaattggggtgggttgaattatgcattagatttagatgggtggtgaggtacattgattttgattacttgtaatgaagacgtgtcaccacctaagctgtctgctataaactccaaaagaaacaaactttggtcaagaatctgactaggataagcattaccatactcagtttgttttagcccaatcaccctaactcaccgcccatcccacccccacctcccaacaaaaaaacacactcaacctcatccatccttagttattcaactataataaatcaacctacttaattcattttcttaccaactaatcctatatttaatgaaagccccaaaatagtattttcctatggtattggaccagttttaattggctaattacttcacctatattctcacggactctctagtattctcagggcatagcttgaatgagctctagtattttctatttcttccatatatatcataatgagttaaaccaggctattttaattctatctttttagccactataagtcagttaaggacaagtgggcatcaaaacgtagagcagtaaccaccctcatgaagccacgtggaggaacccacctgacgtggcagagccaagtagcataagcatctaatcctgatattgggaatcgtgatataggaacaaattaatggtagtaacaacatgatatatatcgatccatattaattaacttgagaggagctttatgaggccatgttttagacaagtgtaattgggttgggttgggttggctatatacatatgtctcgtcagtttaacgaaaacataagagcatatatgctctttggttaaaagcaaaccctttacaagaaggaatcaatcccactactagagtttgttattttataccaatcattctttctttatttttagctttcttttgcttatgaatattgtttttggttgattcttttccttttaaagatatatctcaccccataagacgtatttgctagctagaaagaatagcatagagagagagagagagataacaagtaacaacatcttaacatgtgttattcgggggtggctttggttaataatcttagggacttaacattgcaacgaagatggcatgctttgcaggccaccatggtgggcgtggcctcagccgaggctgctgaggtagcgggagaaggcagtagtggcccccgcgtgaagcaatactgcttgtgctcgcccacccaacatccggggtcgtttcggtgtaggcaacatcaggctgagtatagctgggctggtagaactgttagaaaacaagttattaaagctagctaattaggtctactgttgttttcgatcgtaataagttgtcgtacgtgtacaaaaactctttcatcaaacatgtaatatatttcttataattaaataaacgaaatagaagggaaggaaaagaaaagattataagaaaagagaaactagctacttcatctgtactttttcttta

SEQ ID NO: 77729 - DNA, 509 bp, Cannabis sativa
tatttgtatgtagactgtataaatgtttaatgggctggcccatagtatttttgaaattttttttccttttttgtatttttctgttttttcccttaattttagtatatttatatacaaaggtattatctgtgttaaccgtttgtgtagctggttagtttgtcacgtgattctcttgaagaaataaattaggtggtgtttggtagtatttttgtaatcaattttctatttttaaaattagaaaagtgaaaatattttttaaaaacatgttttataaaactgttttcacttttaaattttttaattaagaatcaaaattttgaaaacaaaaaaaaaaagtcattttcaatatttttttaaacagttttttttcttaatcaatattttagactccgaccggacccggacccaaatcccccccacgatactggcgctgaactcgatctctgactcgaattcaaatctgatcccggaactagaccagtctagaataaaatcaaaaaataaaaatg

SEQ ID NO: 77730 - DNA, 1041 bp, Cannabis sativa
cgggcttcaattcctaaaagagattgtatcaaaagaagcctaattttattttccttagtgaaacaaaaagtgataaaaataaaatggagagagtgggccgtgtgttgggatttgaaggtatctttattgttgaagcccaaaggaattcgggtggattagcttttctttggaagaatgagaatgatgggtacatattgggctattctaacaatcatatagattatttggtcaagtccactgagaaaggagattggagacttacgggcgtatatggtgaacccgtccgtactcgaagacatttaacatgggacctgcttcgtttccttgcaagagattcgactaccccctggtgcgtgatcggcgatttgaacaacatcgtaaggcatgaggataaaagaggcggccgacgatacccccagaatctcattgatggattccagcaagctctgaacgactgttgccttcaagatatggagcttatcggacaccctttcacctgggaaaagggcagaggcaccacgccctgggttgaagtccgactagacagagctttggttaatgctcagtgggctcaggtattctccttagcttccttatttaatttggaattgtcttcatctgaccactgccccctattactggaaccggttgttgtccataatggtatccctaatcgcaaattcaaaatggaaaatgcctggtttaaagaaccagtgtgcttggagataattcgagattgttggcagttagcaagggaagctaatttctctagaaaattgttactttgtgctgataaactaagtgtgtggggaaaagaagtgacagggaatttcaaggtcaaaatttggagatacaaatctgaattaaaaaacttgaagagcaaaagggactctgattctgttcagcgatacagtgagataaaaaaaagaacttttcaaagtgttagatcaaagagaggccttttggaaacaacgatcaaagcagctgtggttaaaggagggtgaccagaacagtagctattttcataagatggcaactact

SEQ ID NO: 77731 - DNA, 935 bp, Cannabis sativa
ttattcagagcttgaaaagaatcacatactttcatgggagatcatctttcaatggaagatcatgagtagttgttggtgaagaaatacgaaaatttgtatgcacattcgactcgattagcattaggacaacttcgcgcatagaaggccgatcaaatggggatagatttgtgcataacaaagcaatttttaatactgtcagcatatgactaacaatagctttgttctgaagattcaaccgattatcgagtatcccggatgttagtgaatggtttcgaatatattgccttacccaacttacaagatcgccgccttgttctagcggttgaacgggagcttttcctgttaccaactccaacaacaccactccatagctataaatatcacatttttcagtaaccttcatggtgtatgcatattctgcaatgaaaaaataagtcatgttatgaatcatgtctctttcaaaacttaaaatctaagctatttagaatttttactcctcgaattattataactaccaaatcgtgcctcgtgaacttttttactagttaaaaattccctctgaattattcacaatgctgaaatatagaacttttgttaagttttatcccacgtaactaactaaatgtttgatgtgacaaaatggatattgttatatcaacaacaaatgtaattttaattttgaaaaattaattttcttattatctatcaataaaaaaaaataaagtaattttaaaatttcttattaatagttcttaagaatatagatttttcaaatttcaaattaatttttatttaaattatacatgtgacgcttacgtgacatgttagcagtatataaacaaaagtcttatattttagcattgataataagtttaggaaacatttgtaaccgagacgaaaaagtttagaatacacaatttggtagtaggtttaat

SEQ ID NO: 77732 - DNA, 752 bp, Cannabis sativa
taaaataaatttccaacacttataacgttccttgcacgtggttgctaactagttataatatgaaccaagatggcattttaatgcattttatggagccccatctgcttaacaaagagttcaaacctggacacttttgcaaaaacttaaagatgtggcacccttgtctccttggcttgttgttggagactttaatgaaattttatccaattaaaacaaattagggggaggctttcaaaatgaatctcagatgaaactctttagaagaactcttgacaattgcaatttaaatgagcaatcttttaaaatggatccttccacttggattaagagtcgacacgcggtggtttctataaaaaaaaaaaaaaaaagactagattggtgttttattgatgatctatggggtttatcttttaataatatcattactcaccatctagattactatagtttggatcatacagtaattgttttcaatgtgtgctcttttaatgcccaaaaccaacagctaaaaagacaaaccagatttagatttgaaaagatttggctgcaacatgaggaagcaacctccattattcaacaacaatggacttctccacgaacaggggctgctatggattgttttccggacaatttgaaagcctgctctatatccttgcaatagtggcaaaactccaagttcagaaattttaggaaagaaatcactaaggtacaaaagcgagtttctactctctataatgaaaaaaaaaaaaaaa

SEQ ID NO: 77733 - DNA, 727 bp, Cannabis sativa
atacttagggagatgatggaatctagctggtaccctgactttggtgctacaaatcattacatgatctgcacaatatcccatgagtagcggtgaatacaatggccaagattgtatctatgtgggtaatggctcaagtctgtctatccaacatattgggcagattctcattgcctctaatagctgcttcttaataatctccttcatgtgccagaaatcactaagaatttattaagtatgtctgaattttctcttgataacaatctattttttgagtttcgtgttgatgtttgttatgtcaaggacaagacgaccaaagccatcaacctgactgggaaataccacaatggcatgtatacttttgatctaggtcaattcaaggtgttacccttccccgtcctcattcagtcaagcactcaacaccccagatatggaattaaactttactatcaccaataactcaagtaattcaggttcaagttcctcttcttgtactcattataatagtccctattattttcgattttgagcagtggcataataagctaagccatccatataaaaaagtgattcaaattgtcttgaattcatgtaataaagatcctttacagttttcaagcctgttgcttaagattcataaaatgccatttttaaatttttctactactgtctatactaagccattgcatcttcttaattctgatttatggggttcgtctcatattctatc

SEQ ID NO: 77734 - DNA, 2877 bp, Cannabis sativa
  modified_base (37)..(37): a, c, t, g, unknown or other
ggatgactgaaatcaattggatcggatcggatggtanaatctaacatccaatatataattggatcggatctggatgggcctaaaaatattggatgtgatccaatgaacacccctacgcttatatataaaaatagattgcagctataataatattattttccccttaattagatagcataatttgcggtctagatcttgaaaggaaaattcctactatgattaaataaataaataatatttagtaaactacacaattttttgttttctatatgaaaactcatactaaagcaacatgcttttttagcaataatgttgtttttttttctttgtttttaaagtactaatgtagcttctcagaaaaagttacaagtaactgtaaaggtaagcagttgaatagggtaccgattatatctgactgtcatgcatgattaattccatccgcacaacaatatggataagtcataactcataagtgcatcccctcttaacctcaacaaaacactttcatgggacacacatatttattggccacactcacacactacgctagtcgtaaaaatgtgcattatatttgtttttgttcttataagtgttcaacattattgaacagtcactttatgttttcggtcatgtttggccactgtcaactgtttcttctttttaaatccactggtacaatcaaaaggaattggtccttcttttctatagacttgtcacttatatatgtccctgcatttggatcgggtggttggttccgaaatcccaatccttctcctcaatctgttttttttactgtttgtacccttcctatatataactttatcttatttttatttatggtcgttgatacacgtctataaataacaattattggatcagaaatttgggtagttggttaatttcggttggttctctctttgagggggctccattgttcttgccctctatatatatatttaaacttcattaataattgcttctacaaagttcggtcatcataaattttattatccattattaattttcccctacttacatttcttattattagatacctacaactcattttttttttatgtgagacttcattatttaaattcattacagatttctaatttagagttacacttgcatcatcttgctagctaccactagttagttttctctagtctagtgtgttagctagttatgtacacacacatgtatatatactgaataattaaattgtgttagatcgacaaaattatttttggatggacccaaaaacgtttcacgactatagcctagcttgctaactgctttattttcatggtcgtaaaagatccttattgatcatattataaatagtactaaaatgttcaatttgaatcataagctttaggctggatagaaaggttaggtattgattttatttttcgaaaaaatttcctcttacgtgtatcgtctcttgaactttgaaaccgtctataggtgttattgtactctgtaaaatttaatattatcaaccactagcactagcataatattacgtatatagataagaagaagcttcacactacaactacaacaatgacaaaagaaattaattgatttcatgtgcttgactgatccacatccacgttagatcaattgggaatcttggccccccaaaataatacatttctttcaaaaaattttatattatatttttgtaatttatttctttaaaaatttatcaaacacccctcattaacttttttttacaatttagtccctcttcttaccatattatcattcttccctccctttgcagctgcggttggttcaggattcttagcaagagatataactttccaaaacacagcgggtccctcaaagcaccaagccgttgccctccgggtcgggtcggatctatccgcattctacaagtgtgacatgcttgcataccaagacactctctacgtccactccaaccgacaattctacatcaactgcctcgtagccggcaccgtagatttcatcttcggtaacgccgcggcggtgctccaagactgtgacatccacgcgcggcgacctaactcgggtcagaagaacatggttaccgcccagggtcggactgacccgaaccagaacacgggtatagtgatccaaaaatgccggatcggatccacatccgacttgacctcagtcaagagcagcttccctacttacttgggtaggccttggaaggagtattccaggacagttgtcatgcaatcggacataactgacgtcattgtccccgccggttggcacgagtggagtgggagctttgctttgaatactttggtgtatagggagtaccagaacagaggagccgggtcgggtacctcgagtagggtgacgtggaaggggtttgaggtaattacaagtgccacggaggcacagcagtacacagctggcaatttcattggtggagggagctggttgagagctacgggattcccattctctcttggtttgtagattatttgttttaataatttgatctcgtctacgtttttattaattaaattgtccccgttaattaatttattatttgccttgtgtggacaatttattaaggttttcttaagatgcaagtatagtatgtttataattgttcattttgttgggtatcggtattaatgtactttaatattatttatgttattattttcaaagtttgattagattgatgggggtttagagtactttttttttggattataggaggaaattaaggaatgaaatgaaaaaaggcacaaaatttattatgaacagaggtactaatcatgggtttttagttggtaatagagctccatgcttcttcaaacattgactacgtgtgtcggtgtgtggaccgataactaccgtgga

SEQ ID NO: 77735 - DNA, 509 bp, Cannabis sativa
atatccgcactttgcggattagattggattggatcgtccggattagattggatcggctattttatgaacacccctagacaaaagcttgatttgagtattctaagactcacaaggcctatgtgtcattgttagctcaaaaagctaatttatctttgttagaaaataaaaataaacccaaaatataaattcgtatataatctaaaacataattataatagataataattaagtatgtacatgtacctgattgatccatagaaatcattgcaatttgatagtgcaatactatcaactaagtcttccttcctaggtctctaaatcagaagcaattttatttatctgattatcaaaagtatacaattatggtgagacaatatgtattaaagagatagggaggagacctagctacataactctaattagattgagcctgctcatcaaaagctttagttaacaagaaaagtccacacttctatttcaactaaactttacacacacagatgctaagc

SEQ ID NO: 77736 - DNA, 778 bp, Cannabis sativa
aaattattataatgtgaatgttctatatgatatgatgtatgctatcactattatatgtaagaagctctgagctcgaacccgtcatgatctactccacaagtccacatatttcattcacatttattaataataaaaaaaaaatacgaagtccacagaaaaaataatacaaaataaaaatattaatcataaaaaaaattccaaaatgctgacattattcaatctcactcatctatcttatttggagacgtcaacaaattcagtcagtcctttttcacaaaccaccatggatattgatatcgtgaatcataaaggaaaaaggaaaaaagaaactatggattttgatatgaagaaatcaaacaagcaacaaaagtggaatgaaagagatgaaaaagattacttgaaaaaaaaaatagttagaaatgaagaaaggcataataacaaatactaaagtagattttactacaaaatgagaaattccaacttcatttcgataatttttttacataaatctttttaagcagaagataattacgatatggggtttggtttcatggaggcagagattcagagagacaatccagattcctcatcttcatcaagagtggaagtgtagataaagtagttagcccagatgagaccaaacacaccaagaaggatccaaccaagaaggttgttgctcagcccaaacggaagcccagtaccttctgtgctcaatctctcatccaccaaagccatcgctggactagacaccgttgccgccatagctgcagccattaaa

SEQ ID NO: 77737 - DNA, 1478 bp, Cannabis sativa
tattaagatctttagttgttagttccagctgtgcacatgtaccctttgttaagtcagttgtgacagttaattcctaactgtatttcctattttctctcaacagaattctcttgaatatccagctgtactcttccctgtaattgatatataaactcttctctataacattttacattcaatgaagatatagcttttcttttcattcttttccatttccgcattaccacccaaccaaagactcttcaattgggatgacaataagatatttaggatggtcaaaggacccacaaactgattatattcaagatttagaattttaaactagggatttggaacaaaattgatggaatttgaccattaaagttgttgtcacctacgtcaagagatgagagacatgataaatttttaagtgaagatggaatggttagtgggcctgtaaattgattctctctaagacctagaaattgtaaactaggcattatgaataaagttgatggaatagtccctgaaaatgcacaaccagagagatctaaattacttaagaacatgagattactaatggaatgggttagtcttccagagaaactactggaatgaagattcaatgactttagtttactataagaactaaaattaatgggaagaaaaccacggaggttatcattggatgacacatcaatgacttgaatatttcgtagatgaaaaatattttgtggaaattcaccatacagattagaatgtttaagagatagagatatcaaggaggatagatttgcaatggatttaggtagtggtgaagaaagatctacactacccaagtgaagttcttctaacttggtcatgttttggacaagttttattgtcatactatatgaaagactgagactcatctcattaccagagagatcaagagaaatcatattggacaataaagtaattttagaagggaccttaccaataaaattggagtaagagaggtttagatgggttaacctcgaaagaagagcaaagcttgatgtaatcttggaataactgaagtagttgtttgcaaggttgagtctcacaagtcgacgtaaggtgaagaggctgctattggaacgcaaaggcccttgaagtcaactttaattgagatcaaggcctataagttgcccagttttggtgctgcacctgacaccatcccactcacagcaatcttctccttccctccaaaactccatcttcaggtaagaatttggatcatcaacaaaacttttttcaaagacaaactcttactttagttgcaacaaagcagagtttatgtgagggatgttaaaattactatacaatgagcatactattatctataataatgaacacaataatactcaaaaaacatccaagatcaatcattttatttagggcattgaataataataaacataccttaatattgtgcattctttaattgtgagtctccttgattcaccacaacatcttct

SEQ ID NO: 77738 - DNA, 853 bp, Cannabis sativa
catatatttttgtgctagttaacacacaatagcttagcgtggctagctagtatccaattttcatagactatgtcaatttaagtaaataggacaagttactttaattatccactacttgatgatagaatgtaaattgagcattggcactagtaaagtctaatactatttaaaaatatctgtaattaatttataatatttaaaaaaaaatattatttaatatatatgaaacttatttaattgtaagtattagatattactagtctcttttaatattaatcaatgtaaatgtacaaatttttattcgaaagttattaatatatgagaattattaaaatgtattaatagtagttaatagtacttaaaatgtgtcatattattctgatttgtacaattaaatattaaaaaatcttgaaaataaaatatatcaataagtctcacataatttatataatatatataataactttaatgaattgtcacgaacagcaatatactcttaattatacatatatatatatatatttataaaatgtcttaactatttgaaaccctcacgaaccaaagaatttttaaaaaaaaattatttcatacattattatttttttaaaaaaatttaatttataatttgagttgcttcagtaattattctagtagtttctatatatgagttgctatgtagattttgattacaatttaagatactttgttagttgctatatgagttttaatatgaattttaataaaatacaaaaaaactactttgaaatataaaaataaaaaaaaaaaccaataaaaaaatataagataccagtagtagcgtggactgtcgatactacatattattaacattaac

SEQ ID NO: 77739 - DNA, 676 bp, Cannabis sativa
tccaaggtgaggtgagacgccttactgatgctcagataaaacaaaaaagggagagaggtttgtgttttcgctgtgatgataaataagctccgggttaccagtgcaagcaaagagaattcaatgtcttgatgataccaaaggccaccaacgaagcattgttggagcaaggctccgaacacctggaacaagacatgatagagccagagtcaacaggatgttaccaaaactgttgaaatattacaacaatcggtggttgggttgacttcaaataaaactacaaaactcaaaggccatattgaatcacaggatgtcgtgattctaatagaccccgagacgacccacaacttcatttccaaggaagtggtagagaaactcaaaatttcaaaggatttatggtgtgattatggacaatggagaatcaatgaataatgaaggactgtgcaaaaatgtccatgttcactttcaaggcgtcgatgtaagggacaattttttgccaattaaattgggaagtgctgatgtgattttagaatacagcggctgcccaccttgggtatgacccacaccgattggaagctccaaacaatggagttccaactgggaaaccagacagtcactatgaagggggatccagccctcaatcgacgcttgattacactgaaaaatgtgtaaaacactg

SEQ ID NO: 77740 - DNA, 738 bp, Cannabis sativa
taaatattaaataatttcttataccaaaaatataatttaactttgtatatttatactattaaagaaaataactataactaattaaaatataattagggcctatatatgtgcaccacacaattttccaatatacatcattagattttatgtatatacatacaaagtgatatatatagggtccaaaataagtgcactcactttccattatatttatatagctatgattttaattttataaattttaatttatattgtacactgtttatcaagttttttcggcaactaaatattttttaaagcttaagaaagtgataacataataaatagaacgataacaaatacgaaatttttacgtggtgcaggcgctaactatcttaagtctacgagtctattttattatgctcatcggtcggtaactgtttacacaagtagagatacaatagactaaaactccctttcaccgtgttcctcttgaagaagagaaagcttagtacgaatattctggagttgatagtagggttacaaaatgtgtttgcttgggatgatgaagaatgagtcttccatctgaaagaaaggtccccctctcttgtgctttttcaaggatatttataggccaacttctttgcatgtgatgcactggtaggtagcatatttcccacatggcatttaaaggtgttagatcgtacgagctaagcctctggcgcgtgtcaccttaggacttctcctttttgaatttcc

SEQ ID NO: 77741 - DNA, 802 bp, Cannabis sativa
tttgttttgtttttgtttttctcctgtttcatgtttggtaaatatcttgtattcttctttccttataaaggttagtttttagaacatgatttgtgtcttcatgtgaatatttttcattatctttgttggtctatgaagaactcatacttcaatttctttggtatatttagcagcttggattgttcaatatgtttcttttctacaattgttaatgtggtagatactcaagctaaagtaacttaactatgttttcaagtatatgtttttggaaaattcttcaatgcacttcggaaattttttttagtcgaatgtttaacacgcaaaaaataagattcaaacagtctgttgcacacgcgactcttattttatacgcgtgtgaaatagactatttgaacactgtattatatattgaaattattttgaatttttcaaaattttgcaagatgttttgaataactataatctacacgactataaaaaaaattaaactaaaaaattgtcatgaatgtcaaaacaaataggggtgcatcgatctctttttatagaggtgcattgtagaagcaccctatgttttttttggggggacctatatttacaccccataaaaatatagggtgcttctacaatgcatcccttttaatgggtgcaccgatgcacccctatctgtttcggcatttagaaaaacttttgagtcttttttttttcatagtcgtgtacattatagttgtttaagacattctgcaaaattttgagaaattcggaataatttataatatagaaagtaatgttcaaacagtctatt

SEQ ID NO: 77742 - DNA, 773 bp, Cannabis sativa
ccattgtagaccttagaaccaatcggaattgaacaaaaagcctaaaactcaaaacgaaactctcaaaacagagagactgccaaacgtatcaggtgatacgactaattttcaagtcttaataataaagtgttatatattttttttccataaaatatcatgtgaaaagcatgacaaatgaatctatcaaaatttgatattgaaatgtatataacaccaaaatgcttgttagtttccaaatatggtaggtgaagataatgtttgtccaaataagataagtatactttataatacgcatttaataattaaatattgttttaagtaatttgcggcataaatatttaagtttaattttcgcttataaataaatatttaagtttaatttttagtggtaataatacctaagttatatttttaaaactccgtaggtatctggccgttaaatgtcaagttattatccacgtgtcatttttttattggtattttttaaattaatttttttaagaaaaataaaaaattcattaattatctggaccaattagagaatttacttctgtcaggtacttacagagttccagaaatataacataactattattgccgctaaaaattaaacttaggtatttatttacaattagaagaaaaatttaaatatttatgccacaaattactctatttcatttttttaaaaaaaagtaatagttaaatatttctttcaaaaagtaatgattattcataatataaacatacagtacgatttcaaacacgcaagtaca

SEQ ID NO: 77743 - DNA, 5995 bp, Cannabis sativa
  modified_base (216)..(219): a, c, t, g, unknown or other
tgccttcttctccttcttcttaatcttcttcttctattctttgtactcttgtcctttcctttcttttttctgtacttagatttgaaatttcgtactccccctatttcagtgtgcagccaccattttcttatgtcttcctctcttctttgcccccgttagggtactaaagtttaccctaattggaaatccaagtcatggtccacttgcccttcattnnnnacatattagttgagtcattgtccatattttcgccacctaagcaccttttattcttcattaacgtcggctggactttctaccaaaatacacttactgggctggccaattgctacgcgatgattgctatagcaatgacagtcaggagcaagcctttttctactctttttccttcttgtcccaaatatttccaaatacccatttccgtattttttctgcttaatacacataaaaataacaatataagtctatttaacacttactgacacacacacttccatttactacaaagacacaacaaactaaacacaattacataatatagacactaattactctatttttagcttaaaattaaagtttaaagatataaaaaataaatctaaatcttagagttatcagaacgacatataaataatatataaataataaaaactaataacaaaataataagaatacaacataaaaataacatgaaaacatcaaaagattttagcttctgtaaataaaatctcaaaaatagtaaaagattaaaatgtcaaacaatcgtatttttttaaattttttttgttgtttatgtatatttgaaataattctatctaatattttttataaaattaatgggatacaattttatttaaaagttttttatatttggttattttaatatgaaaaataactttatggtatatttgaaaaaccaaaagaatcatattattagttggtcaacataaaatgtaattgaagttttttttgatgaataagaaattttattgctctaaaccaaacttcacatcactaatcttttacaatttactattgcttacaatcaactatcaacaaagtataatcatgtacaaactcacatcctcaaaatccaatctgtgtccttttcctttactttcttaggcaacagccctttgattctcagcttactcagttgccgagttttctgcactgtagtgtcgatgagccacacttttgattccataatacttcatttctagccttccatatgtgatatacaagacttgcaatgactgtgttcaccatacttttccttgttgtcgaaaaccttttcgtttgatggcaggattccagtagtttcttaatgtcagctgctagtgtgttccattgcaggaacaatttgatctcttgcacgcatttcctactgtactcgcaccgaaaaaacaagtgctcaattgattcatcttctttgccacacaacaaacatgttgaatccatgttgtgattgtatttgctttttctctcctttgtatttagtcttttcaaaacactagccaaagtataaatctatgtttagggataatgagcctatcccaaaccagattacaccaaggcactttagcatgttcagagaagagttcttgataaccctgtttgattctatatctctgtatcacaaatctgttcatgttccatttttgccgaaacttgttcttgatagctacaattttcttccatgtccagctgcaatctagtggagcaacataactccaacagtcttgatctttcaggtacaccatgtggatccatttgacaaagaggcagtccttcttgctggctatgtcccagacatatctccccaaggcttcaatgttccattgctagatattttgaaaccccaatccccaacagatttgggtttgcaaacatagtcccatgccactaaaccaggaccagctcgtttttgtgtgcctttcaaaagaaaggatctacaagttgcttcaatatctttcaagagcttcttgggcaaaacaaaaatctgggcccaatatgtatgtattgcaagcaagacaaaattaatcaaagtgaccctacccatataagataggtttcttgtactgcacattcgaattctactagtcattttttccaaaaagctttgacatttagttctcaatatcttccctgagaaaatcggtataccaaggtatcgaaatggtaaggaactcctcatgtaattagatgcctcgaggatcctggacacttcattatcaggcattcctgaacaatattttgctattttttgttcatttggcagtagaccagatgaagctgagaacagcttaagccctttgagaagaagcattacagagataaagtcaccactgcaaaagactaacaggtcatccgcaaaacacatgtgatttagctttaatggggcacatctatcatggaatttaaacccaggccattctccaacgttggtgaaaattctaggtagatattccattcctaatacaaagagaaggggagacattggatccccttgtcttaaccctctctttgcattaaagaatccacacataaagccatttaggagcaaggaaaacttagtggtacttatgcattccataataaaattaatgaacttaccaggagaacccagagctctcatcatctcttccagcatgtcccattctattgtgtcataagccttcctaaagtaaattttgatcatacaacttggcttgcaagttttccacccataaagcctcaccaagtctttgcatactaacacatagtgagcaatgaacctcccatgtacaaaccatcacttggttctctgcaataagatcaggaaggatccccctcaatccattacagatcaccttagtagaaatcttgtatattacattgcagcatgaaatgggtttaaaatcaactacaatcttagggcaagctatctttggaatgagtgtgattgtagtggtgttaatctctttaaaaatcttcccagagcttaaaaaagacagaacagcctctacaatatccttccccactaactcccagttatattggaagaaagcacttccatatccatcagggccaggtgctttagtcctatcaatagcaaacacagcttcttccacttctttccttgtgtaattagccagaaaatatctctgtgactacttgttattttaggaccaatatccactattgattggaatactttcctttttgcttgtgtgttagaccccagaagctttttgatagtattctaggaaaacttgttggaccttctatggtgaatcacaccaatttccgtgctcatcttcaatagagaagattctattttagattcttcttgattttagagaagcatggaagatgtgagagttctcatccccaaacttagcccaactaactttagctttttgagacatgaagctatcaaaggccttgcttatctaaacaaacttattccttaattcctgttcttgttccatcaactctgcattttttggctcctggttcagtttggcttgcagttcaatcaatgctactcttgttgtgattttgtcttttgtatctctgagaattctgcttgattaatgtgcttcagtattgtcttctaccttctcaatttctgaacaatactgaacatttttgaccccctgctttcctctttccaagccttggatgcaaactcatcatactcaggtgccagtttccacatgttaaagtacctaaaaggcttcctcccgtaacttctatcttcgtaaatagtcaccaagatagggctatggtcaaagcttacctcaggtaagaacacagcttcagaacaaggaaatatatttatccaatgcaaattgaccattgctcggtcaaatttggaaaaaattctctcctcaggcttttgcctgttgttccaagtgaaaaaggaccctgagaattctaagtctgccatattacaaggctccataaaatctcaaaatctctgagatggcaggctatgtgctcttttcctgattctttcatcaacattatctcattgaaatcacccattagtatccatggctcatctattttctttgccaattcttccaaatctacccactgatcatcctttttttttctcatcattaaaggcatatatatcagtgatacatgaaacttccctgcttgccactgtgattgaacatagcaatgcattatttggctagagcagtattgaatatcaacaaaatatacactaggttgccaagctacaataattcttcctttatctaaccaaggattattctttgttaaacaccaaccttgaaagagactagtatataaggttcccatattcttattttgaacctttttttctaggaggctaacaaacttagctttcttcgagtaaatcaattacttgatgtcattgtgtttatgctggttgttaatcccccttacattccaacacaagaacctatccatttgaggaagagggatctccctcccctcctgtattactctcattcctaggttcttctctaagagtctcaaacatgttcttgaatgttgtcccttccgaatccttccttagtagaattttcttgcccttattcactttctggaatccttcagcatcaatctgcttctgcttctctattactgtcttctttggcacccatacttgttttcctggttcctttttctcctttttcttcttgcaatctgtagaactatgccccattccagaacaattgtaacatactaagggtatccactcaaacttaacatctaattccacttcatggttaaattcatcaataaatgcaattttatcagggaaatcttgtgatagagttactagaattgaaatccttgggtactgcaatctatctttgttcttggttacattatcaacctgtaaaggttctcccagctcgcccatgattttgaacaatgaagtctcccctagtacttgatgtcaaggccctttaattgtatccatgttggtacatttgtaacctcctctttagtaaagtcaccaactcgattccagggtttcatgaccattggcttcgatcaaaaaaaaacatacccttgttgcatcaccttatctctctgctccaagctttgaaatttgataatgaaaatgcccttggcaagcagaccaacttaaacaacttcatccttccaccacctcgtaacaaaaccttctagtatgcttattggagggttagctttaataacatagcataccaaagaaggttgccagtagttcactttatatgcaatatccttaaaatctatcttgattatctttttcgagtttgaattctcagcatcagtactcgatttatcaaacgaaggctcgaagtttctcacgatgttagatctgagaataggaggagaaatcttcttcccagtacttatatcctcaatagcacgattcgcaatcgaaagctagtctgaaaaatcttgacgaatctcactctgcctaatgataagtgcctctgattcttcaggtgagaaaattttctcaacatactgttccattggatcttcagtttcttcaatctccagttcttgaatccctagcacgacatctatagatctagtcttgatgactctatcggaagatgatggaccaattttcttgccctttgatttccctttcccgacaattttcacactttttgccatagctccagtgagacaccgaaagagagagaaggagtgggaaaagtaaatgtaattgaagttaatatcatatttaatatatatatatatatatactcaaaaaaatatgatatcactactatacaaaaattactacttttagtaacaattttttagtcacaataaaaaagttaattgtgactaaatatagtatttagatacaaaatctcaccaattttagttttagtcacaacaagtattgtgactaaaaaacaaattttgtcacaacaaattgtgatttttgtgacaaatacttttaattctatttttggtatatttaattgacaaaaatatt

SEQ ID NO: 77744 - DNA, 823 bp, Cannabis sativa
  modified_base (780)..(792): a, c, t, g, unknown or other
tctctctcttgtacacgcccaaagagcccctctcacttcatctctcacaaaactctaagactattcctctctctcatcaaagatctaccaacttgatccatattttgtttccttatagagagctatattagatcccacctatagtgatctgaatagtattatctctaggtatcaatacaaccaaaagggagtaggtcattacccgctaactaagggggtcgaaccactataaaaattcttatctcatttactttatcgttcttattgtgtaacacgtggaaagcatcatatttatacgaccccgctgtcagttgatcacttttcgaggtcaacagtttggtactctcattgagagtgttgatatcgtatctgatcaaaccccatggttacataagaagaatcccagtcgcaccatttgcatcttcaagttcccctcaagacccgcggatggtagatcctgatggtcatgttctagccataactggaattcccatgaacacagcagatgtggtcaatcctgtcaccacaacaggggccacaagtctagccacagtatctgaccaaactaatataagaatcctggtggatctgagcaatcggcccctgccttcaagggaggacccttcacaggcacctccaactgaaggaagaatccttgggggccacccccaagaataacaaatgggtttcgtccccggttgtaataccctagaattatgaaatggattagcaaaaccctaattatataattaggtaatattgagaaattatattattatnnnnnnnnnnnnntgagaatttatatgatttatgacatgttaag

SEQ ID NO: 77745 - DNA, 737 bp, Cannabis sativa
agtaccgggactggtggaaattgatgtactgtgctgtttaatgggataataagctttaactcatcatcagcagggtcatcatatagagaggcctctttccaccaaactgatccttttccttctaagattccactcccttgaactgtaattcctcttagctttgagaataaaagccattggaagagaccttttccccatgctttggggtcttgtggagctatgattgtgccatccaactattgaaagaaagaattaaagagtaatgttaagtagtagttagactaaatcaaatgggattatgtcattttaatcattgtggattctcttttacctgaaatacgatgttgggctcacaatatgggccagaaaactcgatgggcccaacaaagaattggtatttagcaggaactagaagtgttgatgcctcaaccttacaagcagctgcccatgcagcttggaatgcctaaaaaagtgaaattaattaaagatcaagttaatcccaattattggtgttaattttacacaaaagacattaataatataactgtatacaattattgttggaatcattacccaactgctttaacgagaatcattttactgtgtgggtcccaataatggaggtaatattactatttgacatgttgtaactcaaaaaggaaaaaaaaagtgactcacgtaacatcaaaaaaaaaaaaactcaaatacttttgtatcatgaaaattacgtgcctaca

SEQ ID NO: 77746 - DNA, 578 bp, Cannabis sativa
  modified_base (138)..(151): a, c, t, g, unknown or other
gagctagccccaagtggttaaatacagtgtaattagtacaaccgacttatatcttcattaaaaataatagagatatagttaagtgttacggtggactgtccacgtgtacacacttgtacaagtggtaaatttttagtnnnnnnnnnnnnnntaattttaaaaaataattataaatgtttaaaaaattaaaaaatcaaaaaaaaaaaattatttttttttaactttttttaatttaaaaaattatttttttttacttttttttttttttcttcttctttcttctcctttttctgcagaaatcctcccaacccaataaacaaaccttattccttcaaaaaaaatcaacaaaccctaattctcatttgtgttcaacattaattggggttctttttgatttgattttctttaccctaagtttttgtgcaatcttgatatattccctctaaactattcccaaacaggtcaccctctggaccattccctgcaaactcaccaaccctttctctatactctcagatagctccaacaagctacccacaaaaatcccatttggtcactcagacgaattcgataccgaa

SEQ ID NO: 77747 - DNA, 573 bp, Cannabis sativa
ttttttttttgtaaaatcctttttagagtttggaattagaggtcggtgcattacatatgtaattactaacttggctggtgtattataaatgtaattagggtttatccgacccagtgtatcaccctggggagctccagttctgtttgtgaaaaagaaagatagttcccttagaatgtgtattgattatggggaattaaataagttgacgattaataacaagtacccgttgcccagaattgatgatttgtttgatcagcttcagggaaagactgtgttttcaaagattgatcggcgatccggttatcatcagcttagaattcaggaagaagatataccaaagactgcattttgaactagatatgggcactatgagttcatggtagtgtcattcggattgacaaatgctccagcgacctttatggatatcatgaacagagtattgaagaattttcttgataactacgttatagaatttatcgatgacatcctcatatactcttagttagaagaggagtatgagcatcatctccgaatgatattacagcgactcaaggatcataagttgtatgcaaa

SEQ ID NO: 77748 - DNA, 784 bp, Cannabis sativa
ttaatatttattacaataataataattgttatgtttggtaatatgtattaggtaccacatgaaagatgcagtacttgatggaggaatacctttcaacaaagcacatggaatgccaatatttgaatacactcaaagagatcaaaggttgaataagattgtcaacagagcaatgtctaccctctccaccattatcatgaaaaatatcctcgaaacttacaatggtttcaagggtcttaactcgattgtcgatgttggtggtggtactggagctactcttagcatgattatcgctaagtacccttctattaaaggcattaacttcgatttgcatcatgtcatcaaagatgcacctccattgcctggtacgcacaatcataagagtctcgcactttaaaaattaaaaataaaaatagaatatatgtatatatatatgcatggtaaattttgaattttttcccttgttttaaattcttataaattattacaactatcacattgtatcttttctatttaaaatttaaagaggacacgatttaataatggtaatattcgtttgaagcaagacaacttgtctattcaataataatttagcacaagtgtacaattctttaataataatagttcgagagtgtaaaataaatgccaacttctcaacttgccttaattctttcgaaaaaagtgatatgtgaaaaatttaagaagtacaattaaataataataataattatgattcgggataaaaattaatttatttattttaatatatattattaatattattgtt

SEQ ID NO: 77749 - DNA, 875 bp, Cannabis sativa
tgaatcttcattatttctgatgaaggaaaaaatgcccagaacactttttggtgaacttgattggaaaaagcccaagttgaaaatatgtcaacttaggccctgggcccagcaccaagtgtcaacatgtgtgttggactgtaatatcccaaaaacttaattatgaataattaggatttattatatattatgtgttaatttagtagtaataaataggattatgatcctgctaacttaatttagcataaattataaattttactataagtagataaataagcgtaatttattaattacggagatctaattaaaatatgtagatataatgtaagttatttgtaaaataaaaatattttcaagttcggtgaccctgaagacccgataagtggataaataagcgtaatttattaattacggagatttaattgaaatacgtggatataatgtaagttatttgtgaaattaaaaaaattccaagttcggcgacactggagatccaattcgaggccaaaaatgtcacattagttttagttttattgatagaactattgagatatcaagaagaataactttattaatcaagcaccaaacaaatacaaaacagccactaaggaactgaatcagttcctagtgaacaacaacaaacaaataaaaacctgttacatttgcaaattcaaaataaaagctctccttattctagtcattctcttattctttacacgttgtaatctattactgaactatgctatttacatcttcaacaattttgtttgctgaacaacccttaaatatacacatgtttctattagttcaaatgcagtagcaaacaattgctgaaatcacaacaagaatatgatgcacctaacttgacaagtcag

SEQ ID NO: 77750 - DNA, 1530 bp, Cannabis sativa
cttatcatctacttttgattttcattttttaagttgctttaatattctttacaacttaattaactttggcaatataagcccttagatttaattactttcctttccaaacaacacaccatgtaattaaaaaaattgtcccttgacctttatgatcatgaaattttcaaaacaaatcaacatgatgaatggagattattttctctttcaataacatttgttacaaccacatgattgaatatacattatgatcaaaagcattacagttgatatgattcacaattttacaagcaacagcatcaaaaatctttaaagaaaaaagtgcatattataaacacaattagcatacaacaaacaattgaatatcatcatattcaatccttcctaatctctatcttgtatcagattattgaccatgtttaccaaaggaacagttcccttagccatgatttctattctactagtattggaggcatgagaaaacagagaaagcccgaatagtaaaagctcgggaaggaatagtctagacgacaagaacccgtgccaataatgaggttctagatcgaaaaatgcatcaaaaaaccttcttgtggctggcaaatcaagtttaagaagaatatccataccgaaacagaagaactccctttgtctcctcctttctatcggccatagatctttccaaacttcggtggacaattgatgtcccgaaaggcctccatcagatcccaaataccgaactatggaattagcaacaataggagctgcagccaaggttcttgctaccatataaccggttgaagggtgaaccatcccagctgtaccaccgataccaacaactctttgaggaagcacgggaagtggcccgcccattggaatgacacaatgctcatcttcttcaatgctcttcacatttatccccaaatgctttaacctagccaccattctttcttgaatatccctcataggtaatccgggccgagctactaaagatgtttcttcaagaaatatcctgtttttcgaaaagggcattgcatatagaaaagtagggattttactattactctcttttaactccaaattgttgttgagatgagaatctctccaatccataaaaaccattttatctacatcaaatgggtgactatcaacctcagctaaaatcccataagcaacttggtaacctggattataaggcttatcatattgtacaagacatctagagaaaccagtggcatcaagaacaacagaagcttgaatagtaacaccatcattacaaatcaaaaatgatttagtttcctcatgtataaccttaataactttagcttgatgaaacttaacaccatttgatatacacttttggagcatttttgacttaagcaacttcctattgaccctcccataaggcctatctaaatccttcttggaattttcatttatatacacaacagcaccagaccaagtagtgtcaagacaatcaagcaaatccatggcctcaaattcatcaacccaaacaccataattgttaggccaaat

SEQ ID NO: 77751 - DNA, 936 bp, Cannabis sativa
  modified_base (255)..(260): a, c, t, g, unknown or other
tttgttattcaaatttcaaaacaaaatttattatttttgaataatatttttttaggttcagtcgtgagtcacctgtagatgatgctcttttcccaaaacctgcaaataattttagaataataatgaatatattatttaagttttttacttaaaactattataactattaaattgtgtattctaaatgtggtgtcattgtcacataaattttataggtataatttaaattaaaatttcttttttttttaaaaaaannnnnntaaaataaaattttaaaaaaattcaacaatcaataaaaaattgtataattatatagagccattcttttttgaaaaatttaataccttttaatcccacattttttttaagtaaaaagttggcaattcttaggctatatatatagagccatttgagttaagttttaattatataaaaaaatgttctttaataacaagtttataatataataactaaaaaagtgactattattacatttttattctattacatttttttttagacttctttatatttttataaattttattttcgactttaattatcagattacactagcaataggggtgtttatataattgtaatttgtggttttaaacctcaactaattcaaaccatattatttgaaatcgagttaaatgaattatttgtaaataatttggttaatttagaccgttaaaattctctaatttggtcacgaccaaatcattccatataattattttatatacttaatatatatttttttggacgaaatattgatgtatgagaataattttattaggttgaatattgatattgacttattgttatgataaatttttttaattattatttatgtatttatttgttatgttttgcatagtgttgaccgagattttcggcaaccagtaaaatatgattataataatgagctgt

SEQ ID NO: 77752 - DNA, 713 bp, Cannabis sativa
gttaggtttaatttaagttgttttgagtcacaacaataatatatgcttgtaaatatacaaaatatatctataaataattgtcaaaaaagtatatattatattgtatatacacatggtgtctagttattttactcaattaattttacattaataatttttttataatatatatataaatgatatttaaaatgtttgctatgaaatttatattattaatgtattttttttatttatttattttttttttttgcagcatcaagtgatcaacagtggagatctgatgatggggaagagtagcaaatatataatataattaagaataaaaattacttaaaaatatagtaattaattaagtctgatgtgtcttcacttttgttgagccagtactcattaattattatgatcagactatattatattttaatggactgtttttttaattttaattttagggtcagttttgtgttggtctgcaaacaattattgtgcagcagatttcagaaaattgttctaaatttgaatatttatatttatatatatatggtttttatattatatctttatcaagtaatttatttatatttccttttcagcactgttacattaattcatttcataattaataatcgtgatcaaattaaaattaaaattatataggtggattataattatgactcttcaaactacaaattaaataagattatataagtaaa

SEQ ID NO: 77753 - DNA, 621 bp, Cannabis sativa
catttcatgttggatcactcctttgcagcaaacagtgtcgagatcttttgttgaactcaaatatagagcaatgagtccatgaccaatactacatgtgagctaacttggttacattccatcttacacgattttaacatcaacatcaacatgccttcaactctcttttttgacaacattacatcaatacacatatttgagaaccctgtttatcatgagtgcaccaaacacgtcgaaattgactgtcttatagtacgagaaaaaaatcaacaatgacagcctcaagatgaaccatgtctcctcacacaataacttagtcaatatactcacaaagccactcttcccttctcagtttaacaatttataaccaagatgggtgtaaaaaatcttcacactccatcttaaaggatctattagagttattagagtcagttaatcgcgattaagttagttcattagtcatgttgtccatacaatattttagtctatataaaaggcatgtaatcctttgtataattctgttagatctcaataacagaaataattttctaattctctgttttaatattttcgatgttgtctattttcctccaacaacaatattataagaaatagagtgtagtt

SEQ ID NO: 77754 - DNA, 1645 bp, Cannabis sativa
actctgaatttttttgtactttaattagtaaaaatctaaatggccttattgcaatttccctgcataagatttcgagaccgaactaattgggtcaagtttttacgggctagttagatggtcttctataaattgggctgttttaggaaatttttaagatttcttgggcttttattcaaaaacgattgggtttcgaaagcccactatctttgtagggatatttaaagtagtaacttgtttagtactacacaaacatgagtaactcatcattacactatttattgtgtagttaacaaagtggaaggaccaaaaagatgaaagaaaaaagaagtggaaatgacaagtctatgtccttgtacaacataatagcaaagtttttatttgcttagaaaacaagtctcacaatcgaagaccaaaactagtagtagtatacaactaaatatataataagcaatacaaaacaaaggattacattacaaaattggtttaaaaattaaaaataaaataaaagcatatccattcacatataattttgtagtattgatctgacatcaatcatttgttggcctataccaaaccaaataaactatagtgatgtttctatttcaaccactggtttatggtattggaaattataattatataattatatatataagcccctaatctatagatatacagtaattaatcatttgctatatgtgaataataaatgtgatacataaatcatgagaagattgtaagaaacaaatatttgatattgtacttaattttcacatcagattagttattaattattatcaactaaaagactctaaagtgatttaaagtattggaaaaggttcatgctcaagttctcaacactaatttatataattaaactaataattatgagatctgtctctcctctcctctcctcttatttatgttttcttttaaataagttaaatgaaatattttatatggattaaatatgtagatgttggtcccattgaaagagaagacaaatttttaaaaaacatgtatgtatattatgtgtgtatatacatatataaagtttgttgattcaattgtatgtatatattcaaatatgcctaccatataatagttgggatcacgtggagagagatataaatacagcaagaccaaggctttatattcttcctatatactaattgttgagtctccatcttatacaataaaatacaagaataatatatatatttttggtgggagattcttgggttctgtcactgtatttatttaatcatcaaaaattcaaaattgttctagactttgtgtcaaaaaaaaaattattcttgaattgagttactagtgtgcaatatgacaagaaataagaaaacaatcactgtattaattttgacaaaaaagttgtcaattactactttaaggtgtaactactcaagacattgaaatttagaagtttttttaatcaatcatcattattattattattatttaaaaaagaaaaaaaaaacatgatgatacgagtttatattatagtaactaaaaaaagagagaggccaatcagaagaaaaaaggggctacaatggatggggggcttcgaaaattagtgggaaaagtatctgttggaactttgtatgaaatatgtaaaaatagaaaagtg

SEQ ID NO: 77755 - DNA, 1948 bp, Cannabis sativa
gcaaaaaccgcaccgcaccacacctttttttgcggtgctgtttttaagtttcgcggtgcgggtgcggtttgagaaattaaaaaaatcacatgtgtgtattagtttaaaaaataaccgaaaaccgcaccacccggatggcgaatacccctacctacctagcaatgcctttagttgtgaaggagattgaataaagtatttcaatagccgttttaatttgggcttgtatccaaacagtccggattgatgactccacccgtcaatcagtaaactgtaatttcattaagatattacttttttttttctttcgttctttcttcttttggttttctaaataaaaggacctgttttagttaaacaaccaagaacaaaaaccctagtacttttacacatatatatacccacgccctgcccttctctcttggcttctctccacatagcttttctccctgcgtctaaacccaaaccctggccatttctctccagtttggcgagggtttagattcggtttattgttgatcagtgttttggatcatttgttgtttcaatttcgagttttgactcctctagagttgggatatggatcttcaaagtctttctattgtgcttcaggccgctcttagccccaatcccgatgaacggaaagccgccgaacagagcctcaatcaggtgcttaccctttttattttatctggtttcttctattttttctcgtgccaccatatgggttttagcctgaacttgatgtagtgattgttttgtagattctgaattttgaattgagatgctttgttaattatgggtgtttgatacttctacttgtatatttttgttggtttttttattattctttttccctgccgagattgaaagagatggttagtttgtgtgcgcgcgctagctcgccttggtaacgtgaaagaagatgcagtttaatggttttatgttgtttatgtgaatagattacttttgtttcctaatagcttaattggatctttggtatttgggtaatatggaagaatttgaaagtaatattttttaatgcctagattgtttgcattcgagggaatactcttaagttgctgatccttatgaattttaatatttgttggtactaatagctttattgggattgtttttcctaatggtattgatgttaactgtccttgcagtttcagtacacgccacagcatttggtgagattgttgcagattattgtggacaataattgtgacatggctgtacggcaagtggccagcattcatttcaagaacttcattgctaagaactggtcgccccttgaaccaggtacattgttattttgtgttgtttaggtagtttccttattttaaagtattcatttgttcatcacttatctgttgatgcagacgagccccagaaaatttcactagaggataaagaattggtgagggttcacattcttgaatttgttgcaaaagttcccccattgttaaggtgatttttcactattactgattttctgttgtttcattcattatggttagtttgttttcctattaatgtccagtacataatacatattacatttgcatgggcatcttttagtgtggttcgttcttatcatttatgctttacttatggtaatggcttgttgtacagagttcagcttggcgagtgcctaaagacaattgtccatgctgattaccctgagcagtggccccgccttttggactgggtgaaggtcaatttattacaagatgactctcaagtctacgcatctttatttgtcttgaggatcctatcaaggaaatacgagtaagttgttgatttttatctgtttattattacttttccaaattatctagtaacttacatagcactttcattagctctctgtttgacaccaagttttagtattagtgtaaaatcttagtgttgcagtgggtatttcatataaaacctatcagct

SEQ ID NO: 77756 - DNA, 1159 bp, Cannabis sativa
aatattttaagtttaattctcggtcgtctggaataatacgagtattattattgggcattaggagtgtgcaacactttttatacatgacgttttaggattagttagcgatttttttaagttatacgagattcaatacttaattatactactagtggtatgacactaagaagagtattaggtaacaataatgtcttttagtaattctcgtaataatatttaagttataattttggaacggttaagtgtaagtaaatagtaattttaagttattaaatttttattttttgttgaaaaattaatttaaatatgcctataaaaaaataaaaggtggataatgacgagacatttaatgattagtacttatagagttttagaattatcacttaagtattattaccgcaaaaataaatttaaaaatttatttgcaacaaagaattaaatttggatattcacctacaaattacttgtagttttttgttggaggtaatgaaatagaaatgaaataatttttacggctaaactttctcaattatcattccacttgcacttatctctcttaaattttgatggtaaaacttttcaagctactgaaatgttagcaaatttaaagtgtcatctatttttttcaaagataactatcaagatgaattgcttatgaatttgttaacaatttagttgtttggaaagttttgaacttctacaatgcaccctttaaaagagattcactgatacacttgtatttgttttagataaatttaacacgccgaaagtaggattcaaagagttgatgcttttttattttatacgcttgtgaaatagattatttaaactttaaactatgagcaaaatagtgcggattagattggatgaatactcataatattagtattatcatgataaaagtaagtgcggatatccgtactttgcgaatagtattaaattgaattgaatcgtgcggattaaattggatcgactattttatcaacacccctgtactaaagtgttaaaagattttgtgggttgaatatgaccatttattcgagtagtcacattctatggtgccaaactcacaagagaaagagataacaaaggcatatttaagtataaagcaaaggcaaatttttactaaattttgttaagaaaatatattgcatcatat

SEQ ID NO: 77757 - DNA, 748 bp, Cannabis sativa
ccccaccccaccctccttattatcttaattcaagaaatttgtgcttctgttgatgaaacatgtttctccgaagcaatttgtgttgaagagagcagggtaagaggaaaatctattacaggttagccttagtagatgaagctctcgtgaaagtttaagaaaaactaaaaacgacatctgcacctgattagtagagtttctagcagttatgctatgcaagtagtctgagtgccccttataaaccattttcacttgaccagtgtcctacaatttttgaacacgtcgtacaggattagtgcagaaaggaaatcaaagcaataaaaatagaagtaatgtatatgtctgcccggaaaagtcataacatgagtagtacgttccccacaacaaatacataccacatcccaacaataagcacaagaatcccctgcagctgcatatatggacccactctgaaaaaaaaaagttttggttagaaatataatcattgcattgcaccatcattctgaaaggagagatgagaagacccgaagaattgaaattctggaagagcacacaccagagtattaacagcaatacaaggacctctacaaagcacaataacatgagatgaaaatgagaaaacagtaattaggaaataccaaatcaaaatgtagaatgccttaataagaacatacaaaaaataagcatcataaaaatattaaaaaaaaacctcaattctgataagaaaatcgaaacatcaaatcattgtttc

SEQ ID NO: 77758 - DNA, 597 bp, Cannabis sativa
aaccttagtatcctttctatcagagataatcctacaagcccctttttttagtatggttctagttttaacagcatttttccaaacccaagaatcaaaatttttaggtgagcattccatgaatggagagtctttcaggtacttggccttgagaactttacagtagtgacgtttgaaccagagtgtgagactccgtttctgttcatgggtataattcatggaccccaaatcctaaggatatcgacgctcaaggctagagacctattacgtgttatattatttattaaggaatacaatgtttaagattaaaactgtaatacattacatatttattatgaatataatatataatataatttgaaattatgtacatgtaataatcacaatataatgtgattaggagttacatatatgtaatagttgtaacataagaggaggattgctcatattttgtaacttccacatgatcactaattaagtgtgtaaagagtggttacacaaattaattttttaaaattttgaaaactataattcaaatgtagttgtttgggattgaattttatcatttataatgtgtataatgttggaaatattttacca

SEQ ID NO: 77759 - DNA, 738 bp, Cannabis sativa
tataaagaaatatttactttcattttaaatagtaaatatggtataaatcaataattgaagtcagcaaacaattttagaaatactttttgttttctcccatttcaagcataagattctcaacctacaaaaataaaaatttgaacaccaaaatatgttagaattgagaaaaaaaaaaaactatactcgattttttttaagtaaatatataatttttattaatttattaaattagtcaaaagataagattgcacttcaataagaatatcaccctttattgaatattcaatctagaaaaaaaaaacaagatgctatagtaagactatgagtaaccatgttagcatatcgtttaataaaaaataagaaaatattgtttaaagatgcaataatacaacaattttctataataactctaaaagaagaaagtataggtaatgaattttgaataactcgtgctgctaccaagcaatctaactccaactccactttctactatagctgagttttaatccagcttagcgctttctttatacaaattgcttcagtcaaatcctgagcttttatactaacaaaaatgtctaacttaactattattaattccacaattcaataaaccctaacactatatttaagtttagttttgaagttgtttgtactagaatgcttaaatggtcatgtcgggtcatagttactccttcaaattgagaaggatcataactaaaacttaaatcatatatactt

SEQ ID NO: 77760 - DNA, 1510 bp, Cannabis sativa
taagtaaacaaatgtaaaagaatgattaacttatcattgattcccactacttattagtaagcataccacataatatctcccaatgaaaagttatggtgagattcgaactctttcccaataaagaaagagactaataaaaatattcctaccactacactatagaataggtgatgatatcattattgagaattaaaattgtaatattcatacgtaccttagagagccattggagactgtaagatgagtggacaaaatgaagggtattgggagggaagagcctgccgtagaaggaaccagggacacccatgacgaaacacgggccgaaattggggcccatttgggttctgagattttcttgaaagcttggcagagtttcaaaaattgcattgaaatcattgctagtaaggtcattcaagtagagttgaaactcaggtgattcaaggtttagtttcttgcaaatcttgtgaactgattttatgagttcagtcaccacaaacaaactgtttggtcctgaagaacaacccaaatctgcaatagctaaggttgtagagaatttcccactaatgtagtgattgattatggcttcttcagtaattggcttcgtcatggatataacttttttctgcaaaataaaataaaatatcatgatcatctatataattatatattaataatgcataaaataaataaataaaggatcgagtaattacttgaactagagagttattggcataacttttttctccaactcctccattcatgtgaagaacttgaaatacttccataattttctcatgcattttgtatatgaaggattttttttttttgaagaaactaaatttgagagtgttatgtttgtttcgatagctagtttgctctggatatacatgagagatttacttctatttatagtattttttttaggaggagtggtagatcttgtaattttcactaacttaaaaattatactatactatactatactatactatactgtatagtttataatagaactagtgagaacacaacgttaatttccttatatttttttttccacgtgagaacactaattggttgctaggaaatgacgaaaccttaacaaccatagctttgtcacatgtgatatagctttctgttctagttaacttataacttatataagaaacatatatattatatatagaacaaataagatttatcttcatgaacaatactatgtttaattttttatttgcttgtaaaaaatctctcataattaattatttttcttactgagttatgttctttctattaactgcagttgctgccaacaaaattagtgggccaccctagatgatgtggcattaaaaagaaagataaaacatgtggtctaaaacaaagcacctgtgatccttactattttaatttttaattaagaaaatttctataattgactaaaaatttaaaagttagtgaagtgggtacatttgaacaacaaaaacattgacccgttgagatgaaaagaatctcc

SEQ ID NO: 77761 - DNA, 590 bp, Cannabis sativa
aaacaaggagcgtttgaatttgggatccattcaccaatgttcgtgacattaacaacagttgcaataatcaacttggccgcactaatttggggcctcaaacttgccatttcggggagcaaatatggtttcgagcaatttttcatgcaagtgatattagcggcttttgtggtggtgaattgtcaacctatttatggtgccatatttttggagactaataaaggaggtattcctaccaaaactactttggtttcaatagtgttagccacttctctcctcatagttggttttcttgctttgagatgagttgaatagttggttttaatagttattttttcttttgttgttgttgttgtttttttttttttggaaataataattgaggagatgtatgaaatggtttcatttggataattatttattattggacatatcacatatgcatttgtattatttcttagttaaagtcaaaattttcagtgtaaataattattatatgatatcattgagatttgagggttgtattataatgataaatgccactttttgtcaggcgaattggagtaacaagaagattacttatcctttttttt

SEQ ID NO: 77762 - DNA, 1382 bp, Cannabis sativa
aaggtaaaagttgtgttacttagcaaacgaagttaacctgtacgacaagaaacagtcaacacctcatggatttgactagagtaaaacatgagaaataaatctatataagctagtttcctgttctatatttaagggattcccacgtgtaattatcataatttgggaaagttactaatttactaatttatgtcttaataacttttgggaaagtattttcattgtaattattccctacaaataataaaatcactcaaaacacttcgagagatcttctaacaaattcaagagattctctaacaaattccagagatcctctaacaaatatttgaagaacacttctcgtgaaattgggaccactccaatcactcagaacactagaacaaccaatacccatggggaaactaggtcgggcattggagagccattaattagcgagcctcaggtgaccattgataatgatatcgagttgcgtaatttgagggttgcagtgtctccaattcaaaatcacacgaacactcttcatcacggccagacaaatactcgagcagccatgaacgaagcattcacacaacaaaagaagcattttcaagaatacatggatagacagactaaaaatttaagaagagttgacgaaatattatctctctaacaaaaatattatctctctaaacagaagagttgacgaaattttttcaacatggtgtacattttaaaggatacaattttatagtattgtaagttcaaaagacaaaatattaattatttctttaaatagctatacatattttttttgtaggagccactcacgtgcttcgcacgtgctacctcactagttgattaaatataattagatattaattgatctatatagtcctaagagataatttcaaaaaatataaaaattacaaaaatacagtttgcatggtattttcaatattcttacgattttttagattttatttatataaaatacagtcttttggtgtatttttatgttatatttttgttattcttattctgttgttgttgttaattttttgttgtttatatattattttttatgttgttttgttgttattttgatgttgttttcttgttacattcatgtggttttcttgttattttttgtgtttatataaaatactgtaaaaaatataaaaatatataaaaataaaaactttaaacataaaaatgtaaaaaatttataaaaattattgttttgtataattacccattttcctaatgaggtaatctttgtcaatgactcgtaaataagctatgatttttatttactcaattagatattaatttatctattttcttaagggcattttacaattttgtatacattattttaattaattacaaaatatgtgcaaaaa

SEQ ID NO: 77763 - DNA, 880 bp, Cannabis sativa
attaaaatagaaccagttctataatagtatcaagttatctgctatttgtgttccctgttgtattatattattagctaccttactgtcctgactgttatggtcattttctctttgtcagtagttagttataagttaaggttaagtcggttgtttgttagtctgatgtgtatatatacctttctgtttccctttgtaattcattcaattcacttttcaagattaataaagttttctttctcatccgcattatggtatcagagcgggaaagaaatactttccctgtccgatcctaatccccttctccggtgacggtatcgcgtctatccttcttctccgatactcaatctgctgcgtactctctctgttctctgtcatgtcgagcgaaaaccaggctgaaactcagatggaaggtgaagatcaaacaccaagaactgctcgaagtccttcaacatccatcggacatggtaatcaggatctgcaattcatcagctcaaagaatcctcttggagatccaactaacccgtattacatacaccacggcgacaatccaggtaacattcttgtctctcaactccttactgggcaagacaattatgcttcttggagtagagctatgcagctctccatctctgtcaaaaataaattgggatttcttgatggatccataccaaaaccatctccctccgattatgttctgcataatgcttggggtcagaaacaacaatatcgttatttcctggatattgaattcagtttccaaagaaatctcctccagcatcttgtacgatgaatctgctgctaatatctgggaagatcttaaagttcgatttcatcagaggaatggacctcgcatctataatctgagaaagaacttaatgaa

SEQ ID NO: 77764 - DNA, 1523 bp, Cannabis sativa
actttaaaaggttgttagatattagatttatttgaacaatttattcaacgggagagttttctatttcaggttcttcctcaaagatactcagttaatatttaaatgcttgattaggattttttttcttctaaatttttacatgtatcaaaatatttcttttgaactattgcgattgttatatttaagaacttttgtctaattttatttaattttattaattcagtgattgcttatgtactaaatcatactccagactttgatatttgccgaattacgtctctcgaactttgacatgtaccaaatcaaaccttctaaactttcatctatgttagaattttcttactaaaattggacaaacgtttataaatccaacaatctcaataattcaagggacagtctgtaagggtactgctactggtactggtgtttggcaggttgcttaggaataggaggaacaatcttgacatggctagagtcaaacgaatacagaccattcttctgcttccccatcatcaagatagtatgagtcaaattgtccttaacacaacacatatcagcatgaaattcaaaaataacattattgtcacgagctagtttagacacactgataaggtttttagtgatttcaggttcatgtaataaattgttaagaacaagggatgtagaagaatttttagagaaaatatgagattgaccaacatgtttaatatacaaacctgatccatctcccatgtatagctgatctgaaccaccatattcaacactattgccaagattttgagcttgattggagcaatgattcgtagcacctgaatctggataccaacttgtatcattgtaggtgctattggctgcaagatttgcttgagcttgaacttgagattgagactgagttggggcttgagagatgctgctgccattggctaaaggtggttttgagaaagacttgtcaaaacgaaagggacagtcttgcacaacatgaccaaacctaaaacagagttggcactgaggccggttaggaaaattaaagccaaacctattatttctgataggattgaaattaaaattacctcttcctatgatattctgattgggattgggagaaaaattattgaacctgatattaggattgggaatcctattaaactgagcagaagcattgctgagttgggaattgccacggccaaattgcttgaatctttgaaaattaagcaagattggcttcagcagtagaatctagatcattggtcaccagattggcacttagatcaatttctttattggatttttcgattcttgactcagatgcaagaagcaaagcttctatttctcccacagtataattttcaacccttgtgttagatgaaatcacaaatgtatcgtactcacttggaagccccttgaagatggcagcaacatggtctcgatcactaagaacttcaccatttgaggccaaaacatccacggttttcttgaccttaagtagatactcattgaggctcattgatcctttcttcaagttc

SEQ ID NO: 77765 - DNA, 1412 bp, Cannabis sativa
gtgtatatgtgtattgtttaaaaaaaaaattaagttttttaagtatagaaaatcaaatttccctattgtaattactatattattaactacatgacttaataaacatgatcacaaacttgtttaaataataatgaatactctatttatgaagttcataaaaattgttggggcattttcttttaataaaagctatatattagggaaaaaaaaaagtagtctgacctcatggtcattacaaaagataacattcgaaatagtagaaacttctaccataccagaagcattgttaacaaaagctcatttggctacattataggctgcaaaattacagtttctagtaataaaataaaaattacagctagtcataaaagtagagagatgcttgcattgtcttgtatagttctcaatcccctaaaaagattcgacaccttttgggttcttgttagggcattggtgagtctaaaaaagataacaaaaaattcataatagtcatatctattaatacaagttaatatcaaatataatgttgtattaaataatactaatacaatataatacgacataccaaacaagccgtaattgtgagatttaatacaagtgtcacgcagctaaacccatatatttattatttgaaatatatgtataacaattgtcccctaagaaatgtttttaaatttgaaaagaatttttactcattaccttggagaatgtatcgttctttacgggctcgtttggtacgccgtataaggtctgtattgtattaaataataaattacactatgtttggataaaacaatgtattgtattaattattacgatcaaaatttttaatacaatataatttgtattatttaatacataataaatggttcgtattagtttgtattataatatttataaaggatttggggtcaatctcaatctccgacccggactcggaccatacccacgacctggacccagacccgggaccggagcctagacctaaacctaaattcggacctggactagacacggacccgacatagactgaaccgaatccgaactcataacccaaactcggaccaggactcgggacccttactctgaagcggactcagactggacccacaacctggacctagacccagacccgggaccgaacccgaacccagatttggactcggactagacacggaccagacatagactgaaccagatccgaactcagaacccagactcgaaccaggaatcgggacccttactctgacccgtacctggacccgtactctgactgacccaaacctggacccagacccgacccatagttggtgttgcgatcaaatttattgaaaatatattataactttgcacaatctattaatacaagccaatatcaaatataatattgtattaaataatactactacaat

SEQ ID NO: 77766 - DNA, 754 bp, Cannabis sativa
ttctgtactatatttgtttaatttggtgggagcttcattatcaaattaatatatacactaaaattgtagtttttatttaaagtaagggcaaatatttttttttattatgataaataaacacctacaaattaaaatttttggtacgtcacaaatcaaataattaaaattgggagtgtcaatctgacaagtaactagaaaaagatatgggtatggggatatttatattatgtatttgtagagatcccttgatagtgtgggaatcaaaaagtggcaaaacatgacaagcaagttgagttggtttgaaggtgattcttaagttttgtattggaatgagatggtatggttgtcaattcataaaaatatcccaattttaatatcttcaactttaatttcaatggagtatttgatttttttttttctaaggatattttcaatttttagttttaatacgaatttttcttttttcataaaactataaaaaaattatatataaaaaagaattaacaattttgtctcttaaacttttaattatattattctgtcacataaaatatatagtttattaaatattcttcctaaatttttacatttacaaaaatttactcattttgttccgtttcttcacattattacgtttaaatgctaacatatctttgtaaaaattagtaatattgtttcataaattttgacaactatcaaatcctactcctcaaaagaaaaataaaaaagattcaattttttttttaataaattt

SEQ ID NO: 77767 - DNA, 739 bp, Cannabis sativa
  modified_base (168)..(200): a, c, t, g, unknown or other
ttgcaatgaaaattaaatgatgtatttacggacaaatgaaacattttattaattttattagtaatcaatacagaaggatgaccaaggcgtgaatgccattggtttttattacaagagacattacaaagaaactgatttgtggcagctgtctcttgttggatgtagtannnnnnnnnnnnnnnnnnnnnnnnnnnnnnnnncaatgtctgagaagacccctgaatgaaacaattgttagttgtgaaaaccattttgctggaacaatgctataacaaggaacttactaataacaaatagaaacaaaattgagacattaaagtacattagctattgtgatttctagattaataataacagtaccaattttttctatttgaacagaagtgccatcaggaaatgtgacacaagtagcatgttgttttgattgaaaagaactaaagcatctatgatcaaaacagacatggtgggtcgccccagtgttgataatccaaaaattatagggaaaatctaatttgttacaagagaagttggttgaagcaggggtgttgtttgaagttgtgggagtggattgaatctgttgtgccagtattgatatcagttgttggcattgatcactggtaagttgtgatgggtttatctcagtagaggagccagagacttgagaagcctgagagagactcttgttggtgtcagatttttttgttgaagagtcttaggatcgccttttaccatagcctgg

SEQ ID NO: 77768 - DNA, 836 bp, Cannabis sativa
gtgcgtatggcacctaatctatcatccgtttttctcaattgttttaatcatcaatggtatattttaatttggaatgcattaacttattaaaaagaaaggaaagaaataattacaaagcttaaaaagttataaaaaaaagaagagaaggacaacaaaaaaaaaatcactaatttaacatgtaattataatttgtacaaataaaacaaaacatatacctgcaaacatcacaaacaaaaaaacatacaaattattaaggcaataagtttgagagaaatataaaagaaaaataaagactataaggaaaaaaatacaaattaataagatataatcttcgtttgagaaaaatattaaaatagtaagaaatataagaaaaaaaatatataaattattaagataattttatataatctgagaaaatataaataagcattgactataagatatctcgccatacagccatttttagataaatgatgtcctaagtatattttttctattgatgacagaaactcttactccaccaccttcgtaaatgataaatatttatttggatcttctagtttatttttatttaagataaaaattgtattatatttagtaaaaagaaaaaattttgtgatatatttaaattaatttttagcgctatattctattcaatatacaatgataaacttttaatgtaaaatttaatatttttattaaaaatataaaaggtaataaattatcattagttttatgtaagtcaataaaaaataatataaataattaataattaatgctatagttaatattaataaaatataaaaaatgatataaaaataaataataaaattgta

SEQ ID NO: 77769 - DNA, 713 bp, Cannabis sativa
agcccaacttcagtataactttttcaatgaaacaacattcaactctattgtaagcctttgtcatatctaacttcaaagcgagcttcttctcatttctaaaactatttttcttcatacaatgtagcccttcgaagccattgatggtgttatcatgtataaacatccctgtaacaaacacaatctgacttttagaaataatatctcccaaagtactttgaattttgtcagccaaatactttgagataatttttttttttaaaacattacacaaacttaataaagttttcaattttattaagtttgtcaatcttgggaatatgagcaatgagcatatcattgagtttccattcatgttaagagcattcaaacaaactaagatagtatcatttttagcagtctaccagaatttttggtaagaaatggaaggaaggccattcgaacttggtgcctctgttgggttcatactcatgacaattttgatcacctcctccttcgagaaatttttcatcaacacctcgtttatttcctcagtaattattgtattaatacaatgggtagctattgaaatatcattttcagatggtctattagaggtgaagagattattaaaacaacctctaataattttcaacaataatggatcatcatctttgccaacatccctgagtctttgaggcccaatttaggattcttcttccttctgaccgaagctt

SEQ ID NO: 77770 - DNA, 898 bp, Cannabis sativa
gctaatttagtcaactttcaacaagaaagatgaaatgattctgtgatcttacgctgtaatgtgtaatgaacagcataggtatgaatgttgtatgctcgaatcaaaccatcggcataagccacatactgaagaaaggaagaaacaaaatttgatagaagtgtaagaatgaagtttattccatatgagatgctaaattaacaaatttcttcaaccaaaaaaaaaacaaaagttagtctgtctttataacaaaccaaactgcaataccagagccgggaggcgaggatggcaagcaagattgacaataggcttctttaagtctgtctttatttttgttggagccttacccccttcaacggttcccacaacttcattgacataaatatttaattattagaatagcaattagatttaagcaccaatattcatataaaaaatgggattaacaaacaaataaaacctgtgacactcatccttcgatggaatccgaaaaaaaccacaggttggagaggagtcaaggcaagatggacttctgaatctgaagaaatatgttccattctcttttctggtgaatgcaaaacgcaggtttgctcggtgtcaaaatcacatgaacgaatggtacaatcctatgaaaggttgaaagaaataataataagccttgagtgagaaaagccccttttgtttccaaaccttaaatatataacaattgatgtaaaaggagtatatcaataacaaataggaaaaccatttgggaacatccaatataaaataagaagaaattctaaccatatccatatttactaaattaccaattgacagagatgtaacatatcttaatttcttaatcttctagaccaaaaaggaaacaagaaaacttttagaccaattgaagaactccatg

SEQ ID NO: 77771 - DNA, 1513 bp, Cannabis sativa
aatattacctctcacttgtgaatagagattggacaatcccatgaggaaagacatgatgtattccatgttgtgatgttcttgcaacttcttgactcccccacatgtacaggcattacatgtgcaactagatctgaagtttgacaattgttcccacactattttgagcttggtgaaatacatactaacggactgagtttcttgtttaagtttcatcaaaattttcctgagattgtagatatgtgcaccattcctttgctgaaatcttaccctgagatcattccatattgcagcagctgactcgttgtagagaatgctggaagaaatctcctcagaaaccgagttgattatccaagaaatcactatattgttgttgcgaatccaagcattatagactgtttgatcagacatgggaggtttaggtatggaaccgttcaagaaccccaattttttcttgactgaaatggccaattccattgctcgacaccaagcaatgtaattgtcctacccagtgagcaattgggatactaggacgtttccaggattgtctccgtggtgtagataataaggatcagagggatcctcaataggatttctagatcttgttatttgtgtattcgttccaatatcaggtgcttgaatttgattatcgccattgttgatctaggcaggagcttcattgtcatgctctctttcttggttatttgacatggtgggatcggaatgatgagatttgtgcgtctaatagaacttagagagaagagtgtaaaagaagaagaatgtcgattgaagaaatgaattcttcaactgcaaacatcgaacgtcaccggggaagatgaacaaagaacatggcgagaaagagcagggggaattaggatcgaaaggaagtatatcttccttgctctgataccatattgcggaagaaatagaaaacagtaaagtgtctttattgaatgaaattgcattaattgtacaagaggaattaagcctttatataggctagcagtagagaatgaaaacaggattccacaaaacaaggaacaccataaaaccaggaacaacaaaaaacggaaataactaattaaagacaacaactcaacaaccataacagaacactaactggtatatacactaactggtataatcttgttacttaaccacgttctcagatctgaggactgaggactgaggagtactggaggagtaactgacattcctttagataatgaactcgagcatttgttattagctttcatatataaaaaaaagcgaagtctgatcgaatatcttctttcaggattgacttctttgtgaactgttttttttttttttttttttgttattttgctgaagaattgtgtgaaatgttaagttcatattgaatttaattcttaaattaaattacctgtccataaaaaaaaacacaaactagtttactaattagtctttttcaaatataaattattgtagaaaagtttactaattagtcttcttcaaatataaattattgtagaaa

SEQ ID NO: 77772 - DNA, 3703 bp, Cannabis sativa
aataaattaatatatatataattaattttgatgggcaatgcaggacctggttgttcttcactagcctatggagcaatgcaagagttgggaccattcagagttcatagtgatggcaaatcactttactccaacagatattcttggaattatggtatttatatatatatatatatattcatatacatttaattttgttgtgtttgagtgatcatattataatatttgttaatttgtgatcagctgcaaatgtattgttccttgaatcaccagctggggtaggattttcatactcaaacacaacatctgattatgacaaaagtggagatgctaacacagcagctgataattatttatttttagtcaaatggttggaaagatttccagaatacaaacacagagatttttacatttctggagaaagctatgctggtcattatgtccctcaattggctcatacaattctctaccacaacaacaacaataataataataccaacaacaccattatcaacctcaaaggaatccttgtatgtcttcttcttcttttaattatatatattattattgaaaaactacaaaataattagttatatatagtcatcatatattattctgtggaccaatatatgtatacctaagctagctagaatcctaaactatatgtcacttgattggggcccatatatataattataaattgcaacctcataattattaactataaatatataaatattaattaatatagtatttgtatatgctatatatttagagttgctaattaatttcagtttacctaattaattttctaaagaaaatatttaattaattgcgataatttagcaaactaagactttgatagtttattatgaaataattattaattagttaatttatagcattcatatatggtaattaatgatgaaaattcttctttatatatattttcctttttttttcttcactaattctaagatattaatagaaagtcatgatcatgaatattacccaagtagttagagagattcattatatgatttatgtattaaaagagggtaacatgcaagtgggtagggtagattgcatagttgtaaaggtactacatattcttagataattggcttctatataatataatacacacatgtatattacataaatatattattataattaataataagaatttttagtataaatacttaggtttaacttcgattagataaatatttaaatttaatttttaaagttataattttagaacttttatagatacttgattgttaaataattaagtaaattgtcacgtaatagtctttatttggtttagattattaaaattttgttatttattttaagattaatttaaatatactaataaaaaagtgaatgtgcagaataatttaactattaaatatagtttcaaaaatataaattaagtattattactgtcaaaatttaaacttaaaatatttatccgcaataattaattaggattttgaagctccacaagtactagtggtggaaaaataattcataatcaatttgaagtcatgataatttttggtaattagtattgatcaattaatgggtcctatatattttttctaatcataacaattttgtgttataatttctttgttagatgattaaaattgaacaccaaaacctttttctctctatataataatatgatatgatatattttgacttttgttgttgtcgttgttgttgattagattggaaatgcagtgattaatgatgaaagtgatgaaagaggaatgtatgagtacatgggatcacatgctttgatatcagataaatcagccaataccattaaaaatcactgtgacttctcacctaaggcagctcagtcaagtgagtgtgatattgccatggaagaggtcaataaagacacttattatcttgatatttataatatctatgctcctctttgtacttccacaaatctcacttcaaagcccaaatcagcttcggtaagtatatatattacttataattatatatataaactatatatatatatatatatgtatttggataattggacatatatatatgcatgcatgcaatggtgaacattgaaactttttatcatatagttaaaattcccaattaattaacttggatattttgtgattaattttataaaacttatttataaattaactctcacatgatatatttgataattaactctaaatattaatagaattttgttattttattcatgcatgtaaaaatttataaatatatatggtgttgatctagggtactcctaaaaaaattcaaaaagtagaatttatgctatttcgcatttttactttaattttaaattaagcagggacaaagtaaaattatatatataaattattttattttattttttacatataattttaaaaacattaaaactatttaggagaccatgacactttcctgcccctagctccgttattgtgtatatatatgttaaattattttgaatttttcaaaaatttacacataatttctcataaacaacaatggatatatttccattttaaggtaatgcattgtggaatttctgtgtataatattctttttaatcattaattttctcatatatatagatatttgtttatatataggtgatgaattttgatccatgtagcgattactacgtgcatgcatacttgaacagaagagatgttcaaatagccatgcatgcaaacgtaacaaagcttccatatgattgggagccatgcagtgatgtgatccaaggatgggctgacagtccacacactgtcttaccacttctacgtgagttcatgtctaatggtcttcgagtttggatttttagtggtgacatagatggaagagtgcctgttacttcaaccattaactcactcaaactcatgaacctcactgttaagactcaatggcatccttggtacttcgatggagaggtacacaaatataatcacattatgatgatatatctttattatctgctactttaaggcgttcaacattatattaattgacgaaacactttataattagttagcgagttttcatattgaatagggtttaggccttagatgaaataaaatttttggacccttaataaaagaataggtggtatatttttaaaaattactaaaaaaatatgtgtatttccaaaggttttgaggcccttcaatactatattgacgaaacatcttgtaattgattagcgggatttcatattaaataggatctcgcttgaaaattgtaggtggttgttccaaacgttttttttttttgggtttttgggctgcgtgggccttaggtctagttcgataagatctaaatacaccaatagcgatatgtaacttcttgtggtgctttaattgaattattaggcaacatttcacacaaacaaaaatatcttacttttggtaatattattcatttgtaaaaaagtcactttcggttatatacggtgaaatatttttacataataacatacatttgcaaaaatatcatttaattagtatttacaagttgttattaataagtttatttttaatcctaattattgttactaactttaaacatatattttggagatttttacacttggtgtccttttttatcctttttttacttttttgtcaatgctgggttatttaaacttttatacaagttttatttttca

SEQ ID NO: 77773 - DNA, 741 bp, Cannabis sativa
cgagtaggcatcaacaaatctagaggcaagagccttcacttctctaaactactggttaataatttgactcacataggcggcgtgtgagtgataccattataaaacttacagtttctagactaccaaagcgatctgcaaacggtaactccaaaaatagtatactcattccaagagaaatgttaaaagatatagcagtgtgtagtaatcgcatcatattgctattagtgtaatttattatcgaattccacatatttttattaactacttttaacgtgctagagtatggtattgtgcaccttaaaatgcttaatagcaatgctcaaatatttcttaagtgagaacattatttttactcactcttttgattttaaatcaaatttataataagattagttgtatttgattattctcttttgtgtattttaaattttaattataaagacccacgtgtcttgttaaagacaatccattttataatgtagttttttttttttatttgggtcttccaaatttgagtggaagccttttcaaaaaaaaatatatatttgagtggaagtaaattaaccatttgttaaatacttttttaacaaaaaaataaataaaaaaataaatatcagatattatataacaaaataataataaaaaaggctaattaagatttttgctcgtgaacttttacatttatcaaattatactccctgaatttttaaaatcgttaaaaatgtcccctaaactattaag

SEQ ID NO: 77774 - DNA, 990 bp, Cannabis sativa
tctctgcatggtgagctttctaatatcgttcttgtcgttattatcgatgcaccatgaagttctccctagttagttggctttgtggaaacatgaattttagttagtgatcatttcatgaccccatgcaatgagaacatattatgaagagacatgtttttgtttgttgtataagtttgatacacattataatgatagggttggaaactaaggcttagcttaaatccattaccctttctcttcttttgatagactattaagaactccaatctgtgacttccaaacttatccaaaatccgagatatgcttgcttgcttgctgctcctgaaattgaggtgctctcttagaacatattcttagcatgataagcagacaatgtttctcatgatttataagattttcccaattctcataatcgggtatacacagtaaaatagacgatagtaaaaccgtttgaactaagaagtagaactaactaacatggttgggatttgttgcaggggattgtgtacagcttacttgataaaaaggaagaggctgcagagcagtttgagacataccggtctctcgtgccagaagaatttccagaaaggggatttctcgatgatgttgtgttggctgcaaaatccaaatcaagagaacagttacagaaggagtttgagaatgaatacacaaagttgaagtaaaaacatcttttttgtcaagtaagtagaatcaggcttattcatcagcaacaaaaaaagtagaatcaggctcagcttaagtggtgtttttatttggtctttgaaagttaattttctgtaaggaaataattatagattaatactttcaagttcaaatttcttgacattttattcaagctagaggagtagagcactcagatagtttgctaaagcttgaattgtgcaccaacatagaacctgaattttgtcaaatattgagaaataaaatgggaaacctttacatattatgaaataaatgtttattacgtca

SEQ ID NO: 77775 - DNA, 1051 bp, Cannabis sativa
agagagagagagagagagagagagagagagaggtgtctggctctctccatgtgcctttgtcttgtccttaagtagaaaaacatctaaatcaaacaatcttttacttattattatttccctcccaaagtcctatatatccctagctctcccccctacactacacaccattcttgggtactaatttcttttcactacaagacatagaatacacctcttattttggttacaagaccaaattgccgttttttgaaattatgtctcgattctatatggtatatatatatatatataccctagttatgtacaagagcacccctcgggacccaatatattattgtcattaagtaggcaattttagcctttcggtttccattgtcataaatttattaagtacgctgtttgggaacatatggctacaagggtaattccgtctttctgcattaatatatatatatattttttatttatagtgtatagttatagaatatacatgcttttcacttgcaaatatatttggtcatttcgatgaaaagtagtaaagtttattttggtattttccggttagatttatagttttttgtcctcatatatgaaccctagctagctagtgggctacttaaattataaaaccacacaacacacactgcactctttctatatgtacaattaataataattctagggcatgtccccaacacattaccaaatgggtcttctttgttcctttgataacttatatatataaaaatggcctaattataatatatcgacacatatatatatagtacgttgataataattaattaacgatatgtactaaacctttttcttttttgtggtctccattttcactcaacaaatcgatcgtgacgtgttgttaaaaataaaaacacaaattgtgacgtgatatgtatatgtaggtttagacttttcagttcagatttttattcctttattaaaaatattagctgataaatagttatttttcggtgccgttcggtaacacttttattttttgattttttaatcaaaaaataaaagatcggaagag

SEQ ID NO: 77776 - DNA, 509 bp, Cannabis sativa
gttcaaaccatctcaattttggaatatgtttgtgtctaatttctcatacttaaattcatttcaagttttttttcctggtgacatttaatgtgttaaaataacatgtaaatcatggcatggaaattgaacgattagttcagtatagttcagtatgtgatatactcatcttcctttctatttaactgttcgttgagtgtcttttacatgtaacatttgcaggttctggcaggtcttctggacttggcaaagagagctgattggaggaattgtacttgcagcaaagaagaagagacgaagatggcaagcgacttcaaggctcaattccaagaatttgatccgaacgagtgatttctaacggaaaatctagtttttggcaatctttagttaacaattcagtctttctaccattctgtgttccatgttgctcaagtgtgtgataacgatgtgaaaatgcaggtgtatgtgatctagaagagaagagacagactagttttttagatggcagccat

SEQ ID NO: 77777 - DNA, 959 bp, Cannabis sativa
aggcccatgagcatgtctcgtattcgattctactgtgcttgcacagaagggtctgttgctgcaggggcctagtggattgaccttctttaattgagttgaagtctcagattggagagagcctggccagccataccttgggagagggtatactcaaggtcggccagccctgagtctggtgctcatacatggtcatctagccctaagcttggtagggccttactgcccacacttctttgcctagctggtggagcttgtgcaattacatagggtagatcacaccaattactggagtttggtggatcgaactgtctgaagtgatgaacttaacttctcaaattgttgttttgggtatttccacccactgccagtcctcatcaatttaaaattgaccttcgggtgactcgctccccttggggagggagtcctcttctctaaccggccatggggactatttgaagagtctagtcagccaaggcaactgttggaggagtctggccgaccatggagactgttggaggagtttggccggccatggggactcctgttggtggttggcctgctacaggatggatagagggagttgttgctaagccaaagaaccctagctggccccatgccgctggttgtcgagattttatagttttgctgtttcacctttgaggaaaggtctgtcctccatgtggcaagggaagatctattatcctagttcctgaggaacttggttgatctacacatgtcgatagaccctccctgatctatcaacaagtcttccttgaagtggatctctaatgagattctcgtctcttctatcggtactttggttgaattgccttattagatcattagcctctctgttgtggtgatctaactctttttggtgagatcaaaggatgtgctcttggtcatccatccatgtcaagaatttgcatctctactaagtgagtacatcgcaatcagta

SEQ ID NO: 77778 - DNA, 637 bp, Cannabis sativa
atgtccctgattgatggttgcttgactcgtccaaacacgtcagaatggaccagttccaatggtgctttcactttgaactttgaatcttcgaggataattgatgcaccttaatatcgtattggcagccagcctatatggtgtctgttttgatctcgagtttagaaagacccttcagcatagtcttcttcatcatcacctttagtttatgatagctgacatgtccttatcttgcatgccacaaatctattgtttcgttattttgaatcttgcctacataagctgattctgctaacattacatagacagactctaaatgtcgtctttccatcatcggtgttccagagatttcaagatcttggtagatcttgacatcttgaggaccaaaaataacatggtggcttgatgtcgtaagttgtgccactgatagtaagtttttcttcatcctagtacatggtagacatcctgaagtgaaacttctattgggttgaatctcagcgtgattgttattttactgatttgagcgatcgataatctttgttggttgtcaccactatacaaccacttttgtactcgatcacgttttgtagcttctcttcgtcttctcgatcatatgatttgagcaattagagtcaacaat

SEQ ID NO: 77779 - DNA, 525 bp, Cannabis sativa
gtctcatctgaattgagtgaaacactaataaatttgtatttattatactacaatttttttttatgaaaaaatgactttttgggggcctctgcaaatagaggccctaaccatggacctactctacctatctttaaaagttaaaagcaatcttgagcttagtacaaaatttgttgtttttaaaaaaatcaaggacccttttatatgtaaaaaaaaaatagtatttaaaaatttgagggcttcgtagtggaggtcgtaggtatgggcttgatccactcgtgcctatagtctagttgtcgatagagcgatacccataacatcagtggtgctcaatatatatgatagattctcgtaacattagattatcacaatgtcttcatttgtattaatatggtgttgaacattattagtacctcttagtatcattgtattcaatcgaatatctactaagaactcgaaaattatggtgtaaacttctcaaaacaaagtctcacattatgcgtcatcatgtatctatcccataccaaa

SEQ ID NO: 77780 - DNA, 521 bp, Cannabis sativa
  modified_base (475)..(485): a, c, t, g, unknown or other
ttcaacggcattccctattggaatcttaccaagcctataatatttccattgttctgtgttcggccattcttctagcaacaatagatccccattaaaaaaccatggttgcttggataacaccactttagcatcattcctggatttaaaagagaaccctacaatataactatccccactcttatcatataacttaacttcccactgagtaatttcattccacatccttccaaacatattcaatagcaatcattcattgatatctctttttgtatgactttctgtaaaggaatagttaaaccaattgacatgtcatctgctgagtcataccctattcctgaatattcagagctcacctaatcattggcacaattcatcacgttttcattgcagtacaagattcaccagctgtctctatcttcaagaaatctttccgttattccttatgcaattgttgttagaaatattttaccaggannnnnnnnnnntaccatgtatgtttcattaacatcctaatatcaatt

SEQ ID NO: 77781 - DNA, 783 bp, Cannabis sativa
tatattctttatgattgtatgaccctggttgctgattttgatgttgtttcttttaattttgctaagcggtctgctaataagtttgcacataccttggcgcgatcttctctttttgaggctgaccgtacttttagtaaggactccctaccttttgtaattgcatccttagtcttggatgatttagtttaatgaaatttaatcattatttaaaaaaaaaaatcaattattgaatttattcatttgtttttatgttcctgtgctcaaagttatttcattttttcttcgagctaagatacgcatcttagtcttttagattattccatccactgttattgccctaattccacttgttttgactgagaaagacctgatttccctccacaaaattcgaatccatcgccgatcgtttcagcttctttctatttcccgcgagagccctactgccctaggtattgcttacattctcttttctttgtctatgttttgttcttgtattttttgtttttgttgttttgaggcggcgagtttgaattgacaatgccctgcatattgtgcgacgaagtgcttcatcgagagacttgtgtaattgcttatgtaacatgtagagtctgtaaacgtggttttttaaaagtttcctgcctaatgtttcatgaaatgcgtttatatgaattggtttttgacgtgatagtcattacttccctaatttgagattcgagatgtagaagaaagtgtggttaaggtcttcggagaacactttcgaataatatttgactcgcttcctat

SEQ ID NO: 77782 - DNA, 652 bp, Cannabis sativa
ccttgagtgaaactatcttgtacttccactactaccaacgaaactcactgcctgaccatcaacattgtcaaggagactttcgatactaggtactaaacacagatctccatttcatactattctaatcacaaacaagacacaccacttgaccactacaatatcttcggatacaaagtaccatacaattcttcaatcacaagatcacattgagggcttctttcacacaacgcaaatgcagcccattatcccaacttctgaacctttagccttcataccacttgttgggctccgttcatccatcttgttgggtcacaagctcaccttaactcccacattagtatactattgtccgctttgagcctattctacatggatttatttttaggtaccttctcaaatgacctcatactaatttaattggtggaacatttatattcaaggcaattcctatctattcatttgatgtggaacttaagttaataccccaacattcaagtgtgagatgaaatgtggagaaatgagagaataaccaagttttgagtgtttcagtactttgtcatcttcatatgagttgaattttttctctaaaagaattaagtgtttctccatgtaagcctttccaagagagattagtcttttttccacgtgagtt

SEQ ID NO: 77783 - DNA, 940 bp, Cannabis sativa
acaagacgaaaacactaaaatcatgtcacagctgagacaagactaattgcagcagtaaaaatcaaattgcattaacaaaatacaatccccaccaagttgcacctaaacccaaagaaggcggcggacctgacaaaagataaaagataacctccgatagttatagatatgagaacgagaaaccttaatctttttccacattattaacccttgagtgacataaatactaatttcatataacatatattctaatcagggccagtcctaggcataagtgagcttggcccgcacttaggacccacattattgatgaccacgtaaatatgtgcatgtacaattataatattgccctacggtgttattccatgctcgtttcgtttaacattcgagaatagaaaattatctatgtctctaccccatctctctcatacaaaaaaattgtctatcatttgtctgtaccaaatatatttgctatgatacatatacaaaaatactggaatcgagttaagaagatggtgcgattttgtaaaagtggctgcagctgcctgtaaagggagtcgttgatgcgggagtggattccaattcgggggtatgtaggttttcgtgttctgattgttctatgtcggtgactatgttgaataggcccgccaaaggattgtaatcgtagattaataattttttttttcattttaataccaagcatctcaattgtaaaactctagtttttttatatagagtacctaaaataactttttcattttgccttaaaaagcaaattttaattagaatattctcaaaaaattaatattaaaattaaaaaagttattttcataatttcatcattttatatgatgaaattatataataatttttttctaaaaaaattcaatcaaaattaatgccattatatagatgagatggaaataaggtaaaactacaggga

SEQ ID NO: 77784 - DNA, 734 bp, Cannabis sativa
tgaacacccctagttatgcatatttaattgagagaaatcaaagtagaaaaataaattgtggtcgcggcgagccaatggttggtcgtgactaattattgtcacgacgagaagtattgcgatcgcgacgaggagctttggcagaatcaaagttttagactcactacagtggttgcgactagactatatgtggtcgcagcgatgtcttcgtacaagacatgggcaactttgtcttttcttaattttgggctgaaaaactctaaaaggggtcgcgaattttagaagggattgacagaatagaacactaaaaatacaagaagaagaagcttggagtgaacgtgggtaatccatgataattctccgtctagttttcttctcttctcttgattttttatatttttatccatgcctagtttaattatagatttgattatgagttaaactcctaatttcgggatttgatggatgttgtctgagattatttcatgagttaatattagttaatttcattgattgtgtgatttattcatctttgtatttattacatgttaaacatgatcttaatgtgaaatgtgaaaattaaatgataggaatactctaaatgaataaatataagttttgatgtgaaacgaaaatatttaccagtgagaatggttctgatatgttgacaaagactttgcctaaagaaaagcttaaagcttgtagacgaagaacgaatttagttgatcccactaact

SEQ ID NO: 77785 - DNA, 760 bp, Cannabis sativa
ttagaaaatatatcgttaatgtaaagtcaaaaaagataaagtataaaaatggaaaagaataattaaagtcgtaaaaggagaaatattttgaaaaaaatatacacggtgattttccttcaaaatttagtaaaataagatattaatggtatttttttttttttttgaataaaggtaaaacttttactaaaccgaaacatcatttgttacaataacacgtaattcaagaggtaaagtatgctcctgacaaatacaacctatgaaaaaacaagagctacgagtcaaatagtggacagctttgtttgcaaatcgttcaataaactgaataataacattactcaaagataataaaataacattgtaatcatcaattaagagtccaaactcaaaaaggataataaaataagacattaatggttaatttttttttttaaaagaagaataataagaaatatttgtgtaacgttacataataaatataaaaaaataaatagaaattttaaagaaccaaaaaaagaaacaaagttaaatataaataaccaaataaaattaaagtgtacaatggaatttttagttatccacaaatagaagaaaatccaaaccctatatctaataggatgaaatactatcttttttggccatttttattacattatattatcagttacaagactataacaggaataaatggatatctttattaatatttatttatataagactttcctaaataataataattaattatttggctaaagacttt

SEQ ID NO: 77786 - DNA, 1075 bp, Cannabis sativa
tactagagactatatcactatgttaggtggctactacaattatgggtacaatgatgttcttgtaattttatgtatgaaaatattatgtgctacaataagtttccaacacttggcttcatatatataatatatgctcaagattatataaatatataaatatatatataataatatatatttatataaatgctgtaagtcaaatcttctactccaagtataagaatttttggggctactgctcataattatattcctatgatatatatatatcttcttcatttttctttttcatatatataagaaaaaatatcttgaattattcctatgatatcattgatactataacacacatgtatacatatatatatagtgttactgttaaatgttaattatatatttgcttttggtttggacttataggcacatgtgtgtatgtatataattataaaattagcacaaaagaaaaaaatccataactcattaaaaataaaaaagatattaactttttcctttagtatgttttgcacttaaaaaaaaaaagtgaacctttatcttttatccatatatatctattttgtcttgaaattttttgactacaatttaattaattatatatattagtgtcaaccataaaaagttttataatccataatgaatggataatatattttttcaaacaatttaaacatatataacattgataaatagaaaatttttacaaaatacataatttaaaagagttctaccgatacactatttatttattttagtatttaaaaattattatttacattgtaaaattttaatacgtcaaatataaaattttcaaaccgtctattttcacatataaaataaaaaaaaaatctcacatacaataattactgattgaatgttattttttagtgtacttaattttttgagactctcaaaattttaaaaaataacttaaacaactataatatataaacaaacataaattaattaagataataactataatacaaatgtgtatatatatatatatatttttctttttttgaaaaataatacttatgttaaaataaggttaagccaa

SEQ ID NO: 77787 - DNA, 513 bp, Cannabis sativa
tttattacaagttttcatcaatttgttgaacggaatattctcccatggatactcgtagaagaagttcaagtcctccaccactctaatcataaatggaggaacgattgtcttctcatcacaaccagtcaaaatgccagtaacaaacatagaaagcctcaacttgtaaacatcatccactatcggacaactttcaaacactctacatagttgaccataagcgatggatgaattaccgttgaagtactcaactatcaatcggtttgaggttgctttctcttggatctccttcttagttggcacaggtaagaaatttaactcaatcaccaaagaaaactcagcacgactgaatctgcattatttccttacaatgtagaaatggatttcgtttgccttatctgattagatcttgtgcaggaacaattgatagatcaatgtacccgatatatttaatggatccctctcgaagaaatatttgaaaggggattcattcaccctttccaataaaccgaactc

SEQ ID NO: 77788 - DNA, 666 bp, Cannabis sativa
gctatgccgaattatgccatgtctactttcaaaatcccgctcacaacttgtcgggatcttgatgcggtggtgcgaagattttggtggactggttcacctgaaattaagagattttgggctgctaaatcttgggattccttatgccaacccaaatcggttggtggtttgggattcagacgtttcgaagacataaaccatgctctcttatctaaactagcttggcagttggctagtaagatggacagcccctggtgcaaggcattcaaaagcaagtactttccgagacagtccttttggagtattactgagaaaaattctgacagttttatttggcggggtattttgagtgctcagagaactatctgtgaaggggtgtgtactattacttcatcgggggaggaagtggatgtatggtggcaaccttggatcccttggatgaattatgaggactttcgagctttgatggagaatgtcagacaaaaagcgcccagtttgttatgtgttgcggatctaatgtatagaagaacgaggtcctggaatgtgggctatttgaggtatctctttggttcagatttgggttctcgaatcagcactattcagattgacaagaatggtgatcatgacatccttatttggaaagattcggatgttgggcggttcagtgtt

SEQ ID NO: 77789 - DNA, 578 bp, Cannabis sativa
aaaatgtgtggattggtattgaggattatttttggagtcgattcaggtttccaacaccaaagagctcattttctagtgtcttgaagcttttgacatttttgttttgcactctcttggaaatttgggataaaagaaatatggttttgttccgaggtaaccgaaagtagattgcaagcaaacttttaccgagatttctaaaagggtagctcagcaccaaagaaaatgttcacaaattgccgcagcataggcttgcggtatgtgtggatggttccttggtggatcaatcaggcggcgttggagtggctttcatcgaaggaggtgtcggccttgtcacctctccatgttgaagccatgacagttctttcttttgccttggaccaaaactggtatcatttaactgttttttcagattgcaaagttcttaattgacactattattgaatgtcttagggattagtcccaatgctcaatcgcatttgggtgttaaaaagctcgttttgagtcttgttttttcaaatttattgttacatctttgcttgttttgattatggggagctgtcccctttgtagtggctttg

SEQ ID NO: 77790 - DNA, 1561 bp, Cannabis sativa
tctggctcttaacctcagcctcaagttcctcctccctggtctttttttccttaagctcatcttccaacctgcgaagaagagactggagaccttctcttttgtcttggagacgagtaccatcctgagataatgaagcattatctaccttaagttgcttagttgacggcacctcctgcagttccctagtcagctcggcaactctagtctcagcaacaagaatttttttattgacctttccaagtttcgttcgcacagtctcaatccgggcctgcgcatctttggcgtcctttttggccatgtctactttccttcgcattgtgttggaagtggcaaggttcttgacatcagccgatttagctcgggaagaggcataagccatcttcaaactagtatctgcgaaagagaaaaggattaaaattcaaactagtgtctgcgaaagagaaaaggattaaaatccaaactagccaaagagaaccaaaagaaaaagtgttagggccccaactaactgttcattcaccgccgggactaaccgggtcacatagtggttaagcatgtctttgcctctcttggtcaccgtgcacaataccaatggtggggtaggggcccaaacttgctcatatcctcccctgaccagctcggatccaatctttgcctgctcaggtccatctaaactctctctccgggaacctttggacttggcaaccttcaaggtggaaggatccagagcaggttgctcctcgaaaagatcaatgacctcttcaactggtgccttctctttggatggtgtctcgccgcctttagacttctcgactggaggggacaagcacgatctccccccctactctcttcttcagagcctcaatcatcttccgagacatttctgcacagaaaaaacaatacagttagaagaagacataaaatatatggaggcataaaaattaagaaaaataagtgcaatttaaagtattttacacgctggcaagagcatctgcccaaacaagcacaaatggagcgtcatcatccgaagagtcttcctactcctccaggacggcctttccctttccctctacaggggttgatggccgagcagctaaaccaggctccctgattcagatagtatgttctactggcctctgctcggtctagagggttttcttcatcttgagtggcctctttgctctaaatattcttgagcctccttctcttgctcagaatcctgagcatacttcttgggtccaacatcacccttcaacttagcctcacgcttaagttgaatgagctccttgtcttgctcagctccctcagcccgaccaaacctggacttctttttcctccccttcagaggctggggtataaactttgctggataaagcttgtatttcacaaagttttccactgaggtcaacaaagttatattctgagcagcatccgacagctggagaattttctaggccctttccctatgtgccaatgtgaagggtggacgacaatacacatggatctattgaaactgagtataggtgcctctatgccttccacaaagtaatactcatcaacaaaa

SEQ ID NO: 77791 - DNA, 1434 bp, Cannabis sativa
atgttgtgactacagtgcacgacatatatgttgtgctgcacagtagataaaactacaaaatgctgcatgatatgcagcctccttggaacatatatacatgccatacctcttatttgctgtctccttggagctgctctaagcataaattttgacagtataaccgtccaaattaatgaactgatagtataaatttaaggtgcatctatttttcacagttaactgccaatataaattgcttatgtttatatttttttacatgtgtcacatttatacggtacacctaatattagtatttaaaaaatataacaattatttcaaaatttataacatttttaatttttatatttgattttttatttttatgattttatttattttaaaagtaatttttaaatgataatattaggtgtatcaagtaatgtctacaagagtgtatacataagcagtctagagtgacacttaactggatgacgtcttaaatttactaccaattcaataatttggaggttttaccgctaaaatttgagcttaaaaagttaaatacaaatataacaacaattaggaggatttaatcctaaaaaaaaatcttaaaattatgaatagtataattattaatacaatcttttaacctttcaagaaagaaatgaaatctaggcttttttgacaatctatgagaccgtgagtcatatctaaaatgtttcaagtatgtatttgtaattgtagtcatgggagatgaaatatgtatgtctatagccaatttgaaaagaaaggctgtattagaatagcagtatatattacataggggtagccaactacgttggaaagacaggttaaagaagattgtatttgtattaatgtatgtatattgtatgtgtgtgaagtatcctaggagatctaaaattccagattgtgtgtgagagacaggttgggcagagattctgttggaactcgatctacgagccccctggaccgctctggcccactcaccagcggcaattggttaacccacctgaactgtcgctttcacctctctccctcccctaaccacaccaccgcaaaatggatattgtctccagtttatcttattgtcctgtcatatatttaaaataaaaaacgtaaaggatatgttatgggaaatttaattttttatgcatgatttaagggttgatcttaaaattacccctcttaaaatctcacacccattctctctccttccctctattctctctgttcatcccaacccagccatcccaacccagccctcccaactccagccgaaaccccaaataccggccacacacgcacagaggagacccatcgatccgcgacgctcccccactgatccacagcgcaccaccatcgaagcatcaccaccgaccaacgatacccacggcgcaccaccactgaagcatcaccaccgttttttattttttt

SEQ ID NO: 77792 - DNA, 1519 bp, Cannabis sativa
attattattattattttaaataacaaaaagaaaacaactaataaaacacgcatttttaatattaaatattgaattttgaagacataagagaagcacatgaaaaatagagataacttcagcaactggaggggtaaaagtcctaatgccaggagtaattgccgaagccatgcagacacccacatgatcatgaataacaaccccataccccatgcgacaagacacctcgtgcagtccagcatccacattcagtttgacatgaccaaaagaaggtggaatccatgggatgattgaaaggatagaagccatagagagagaccaaatcaaggaattatagttgtattcacctcaaaaaaagtattgagcaacttatggttatgaatccatttattacgacgataccaaatgcatcacagaaggaccaataatttgcccatatcaaccttggagagatacacctcttgttccttaaggaaagtgtaaagagtgacacaagccacagaagaagatgacctgataaaatcaacgtacttcgtaatggattggagactcgaacacccctaaagagcatataaagaagtctcaatctcaaccctatacataggacacaaggaatcggacagaaccttatgaagcttcaaattatgagaactgggaaaccaatcgagacaaactttgcaaataaaaaccttaatcttagaagggatgaaaagattccataaatatttccactaagaagagggacctgaagaagatccatcttgacctctacctaataaacgaatagtattccaatatccaactgtgtaccctccagaattgttgtaatgccatattaatctatctaaaggttagaaagatttgggaatgatcaaaatctttctagcctcgtcagacaaaaaaagctcctcaataagaacaatattccaatcaccaatggaaaacttaagatcactgaccctcgaaataagaggatggcctttgaaggagtatgagagtgaagccgtaagtttaggaatccatacttgagaacgaatatccatagaatgaccttccctaataagccaccacccaccctccacaaacagttgcctaccccaaggaatactcttccaaatgtaagaccttttgtaagtttcatccacttgtaaaaactcaccataagaaaagtacaaacctttcatcaccatagcaacgagagacccaggaacataaagaagtctctaagcttgtttggcctggagagctttattgaagatgaaaaaatcccaaaaaatcatatccccatccatcttgtgccaacataatctctcccaagtacaccaatgcatctttctatcatcatcatctcctccccaccaaaatcgagcacaaagtcagtgaagctcatcaattaacttttcttatgtcttcgcattagctataaagagctggaagtggaaacggactgcgaaaaggtggctttgctccttgaaaagaatgaactttgctttgcagaatttggaatggtgttgcaagatat

SEQ ID NO: 77793 - DNA, 1258 bp, Cannabis sativa
ttttttttttttttttggtttagataaaagccccaaagaaccacctttcaagcaaaaaaacttaagagaaaatgggggatagtgattaaattaattataattcataactaatgagctttcaaaataacaaaaagatataaaataattattataaaaataataaataattatattacatgacaacttattaatttcaaaaataatatttaagattaactaaatgtatattaaattatataataatattatttaatatttaaggttacaatttttgcatctaatttacaataatattattactactattactaacatgccatatcagctaacctgaagttttttatttttttttatttttctttatttttaaaagtaattttttagttactaatagtgttgataagaaactaattagttatatttacataaaaaactttatttttatattatgtaatttgatatacattttagttacctctaaaatttatttatatacattttagtaattagttatttttaagatatattattataaatttctcttaattatttacaaatactgttttgatatccaaaatataagaagttaaaaaattaaacacattcatgttagcatttccatcagcttctctactctatcttttaaaatacttcacaaaaatttcacttttgcttctttatatttttctctacatcatttaaatattatacttttatatatattttattaattaaaacaatatataagattcattgagctaagtgaagaaaagtggtgagttaaggtataatacctcatgatgtagtgttattttgaacatttttgctaaatttataccttttagctatttttttttttttttttgtgataaatcagttatgttgtattaattcaatcaaattttagtctcttacaatatatttcagcatcaaagaggcttgatttaattctatgtacattctagattgccaaactattctttatcagcatgaataatctttttaattcttacaaaagttccttgcttgatactatatttaactatgggtgcactcaatgagtattactcgtgaatgagtaatattaaataatttgagttcttatgattaatttttatatttaattagaaaaaattttcatttttacattatgtgggctggaattggtccatcagctggaaaaaaaaattaataaaataaaagtttttcgacaaaaaaataataaaaaaaattgaatttgacttaaatatttttcata

SEQ ID NO: 77794 - DNA, 520 bp, Cannabis sativa
tattgaaatcatctaagtactttcgcaattcactggttttatccatttaaaaagtgtggaatctcttattgagatataacttattagctaaggatttcttcatatagatggaaggcaatttattccataatccaagttcctttttctcatttgacacttccctcaacacttcatccccaagaataaaaagaatggcaatgccttggcttcaatctctagtttcttcttcttgtcttcaataaggttcatgactttcttatctaaagcttcatagatttcatgatgcactagggatgctttcatcttaatcctctatagactgaagccattggtgccactaaacttgtccacctcgaatcttggagatgccatctggttcttgagttcttaattgttcataatgaatcttaagggtttgaatgtggatcttaaaacctcttcttggagcctaaagctctaataccatttatagtgaattaatcactatgaatatgaattttatgtcaactaacagtgtaca

SEQ ID NO: 77795 - DNA, 802 bp, Cannabis sativa
gaatatatgcaaagacattttcagagaaaatatacatacgaggacaaaaatatttgagtaccttaacttgccacttattctactcgtggaatatagttcaaaggagaaaaagaaatatctctgactttatgcattgttgatttatttttattttttatttctattatatatatatacacttaaattaaattttaagatcgacttagttataccttttaaataatttaaaataataaataagtatagaatgatagtttagtaacatcctcttattataataactataagtttgaacctaatttaaatcttatacttcatttatttatttttatacataaaaagtagatatacataaaaaaaataagtaatagaattcaaaatatggtctctcatgtaaatttaaagtatcttaatcaattattctattttactactatctatatattcaaataaaaattatatattaatgtatttttaaattttaggatagacttcagccctccctcagcatccctagttcgtctatgtacccaatcttatacgtaaatttataaaataaaatttcagcctactccatctaaaaagaatatcaatccttgaaaatatatgggagtctctaaacatttatgcatatgagtcaatatatatatcttattttttctttcaaaactaagattaaaggaaatttatctcttaggtgccgtttactttaaaagaataaaatataaaaataaaaatgcaaacgaaattaattaggaatatgaataagagtgagattgaatcaaatttaaaatatataaaa

SEQ ID NO: 77796 - DNA, 1001 bp, Cannabis sativa
tgtgtcaaataaaaagaatcagacctaaaagtacttaaatcagcagcagattattaaaaatgtaagtgaataattctaaaaagaaaaatgtatttcttttttttatatatatataaaaaaaaaaacctgatgtgttgggaattccagccttgtagattagctgccgttgtcagagcatgtctccattttgcgaccatatccagtttgtctgcgaatcgttgttcatggttcacaaatgcatctccatagcttccatcctgatttcgaatatgtaatggatctacgtcgtaaaaaataggcacaacaatctgattgatttcgctttgacattttagaatatgcacaagttcactcaggcaccacgaagaagaagcatagttctccgagaaaacgattaatgaaatcttagaattttcgattgcgtcaagaagcgcaggtgatatttcatgccctctctcaagacttttctcgtcgatgtaagtcttgattttctttcgttctaaaccagtataaagatggcttgtgaatttcgtacgggtatcttcacctctaaagctgaggaatacatcatatttcttcgaaaaatttccagaagaagaagctcccaacgccatatgattctcgaatctctcaaatacccttccttgatcactagtgaccactatgagatagagtatttcttcttcgattataaacaaacaaaaaatgataatgaaactcttatcttcacgcgtttcctggtttccttgttattttgaatggaaattcagctctaaaaaacgtgttcactttctttatatgccaaacagccaaagtcaacactttttggaatcatgcacgatcgatatatgcttgctaatatcaatccaagtttgcccttattaataaattataagttgtcacttaggtcggtagtatgatgtgtgtgccgttatgcttaggtgggaagtatattgagtctttccctctaaagcagagtgtggagacccatgatttgggtt

SEQ ID NO: 77797 - DNA, 1424 bp, Cannabis sativa
acagttatagccggctggatataaatatatataattatattataaggtaatattgatatatatgaagtactgcagagtagctcatcttcctagcaataaacatttgtatagttgaatctcagacatgggaaacattattaattttttgaatatttatatatatatacctgggcacatgtattttgtctgaaagattttgatcaatattttcatgacatatatatcatttttattaagtgatatttttttggtactgtttattaattgatctagtataattaattttgtagatcacctaataatttttacacgtcattttcaaacttaaaatttaaattaaaaaaaatttattagaattaacaaatcactttaattcttattccacacatcaagaaagcatattcaagcattagatcccacaaataagctagggctctgcattaaaccaggtagaggagtgtttgtgaggctatttattatttttatatatattataattatatgagccacattattcattgctgagtatatataaattaataataatattcattttatatagggttaatagtgtttaatttacaaaaaattataaactagattctctgttttattaaataacaaaatagaagttgtattttttaaaattgtataaatacgactttgaactaagtagtttttgacaattttctttttaataaaaacaacttgaggacgatttttgacacgaacagatgcacaaaatataattaattttgctatagtacttctacattgtgttatattaagttttattttgataaaaattaattgatcagagtactatttagtactattttaataaatataagatgtgatttattatttagtaaaatagaaaattcaattaataatttttataagatactagatttaaaatagtattaagggatgtatttattatattatgcattatttatatcttgacttaattgatgaaggaacagaataaaacccggattccatggactcgcttgatcttcatggagttgagaagaaaattcagaactgtgtactatattcccattattatgattatattctattctattcatacatatatattataaattgagttattaattatatgatcattattttatgtggataatggctttgcacaattgaagatcctctttcagattcttttattgtgaagggactgttttgttgtgagtaaatgtttgacaacaacccaaaaaaatgttgttgttattatatcatatatttatgtagtaatcccttcatcatttttcataattaatttaatggtgatattcatggcaaaaaaattacttttattttgtcttttttgtgtgtgacccctataagagcatttgcaacaagtcacttatattatatattgataaaattagagatacact

SEQ ID NO: 77798 - DNA, 759 bp, Cannabis sativa
ttttttttttttgcttactgttgataattgctataataatattctttatttcaatttcttttagggaggagagcttgatgctaacgacggtatgaatccactagatgtggttgttagaattttaaacaatcagctaagttctttaatgtggattgacgaaaaggttagagttaatgttcaacaaatattcttgctgattttgttgattccccagtaattttaagcatttatgagatgattctccatttggataactcttgaacgtgtatgatctcttttagaagaaattgttactatttgatatttgaagatgtgcttcccatagttctttgtacagatctaaaataccgattctttactctcttatcaggctgaagaattctcctcgcggattcagaagctagccagccagggctctactgctgatcgccaattggcaggcccaaaactttggatgtcctgattttttgtaaggctgtatagccaaagaatatgaaccttttatagattactgagatgtttttacttgattatttcagcttaaattgtaacattttgattatgtccagttattgcaggatgtggattaatttcttactgccataacatgttagtaaaattattacggtgacttctgttaagcaacaccaagatgttaatacaaaagtgatagattcggcttataaacttttgggattcaatttcacgacaaattatgcctactgtacaattgaattgttatgacagtaaaattgtgta

SEQ ID NO: 77799 - DNA, 602 bp, Cannabis sativa
ttgtgatccgtgagctcatcaaattgtcgttactctaaaaatatgagcttaaaaatagttgtttgtaattcattgtgagccaatagtattacttatgatcaagtaatctaaaatcggtaagcaaaaactaaccaccatattttgagaaaatattagactcacacattactaaggtaaaaaaatataacaatatatataaaatttataaactatactatcctagctagcgttgcccaataacattactcatagacaaatgtaaagggcatctgtttaatttatagtgtcattatagtatgagaaatgttaaagggcattagtggtgcctagcatcctactacatgtcaatatcgctattggttcgactaagtatcggatcccatataatttaatatagaattaattgcatgaaaatacgttgaccgtattttatttacaaatatatgacaacttgtttaatttaagcatatacccaaatatcagtttcctagattggtatgcggtataccgtatacattcggattgcaatctcacattttatttcctttttcttccgtatgtctggtgtgtcatccaatattaacttctgttttttttttttt

SEQ ID NO: 77800 - DNA, 583 bp, Cannabis sativa
atatatgatttattaattccgcactttattcataatcatgtatgttttagtctatacaaataaatgtctaacaaataggacatcacttttgactcaaattaaatagaaacacaacctactgatgtagataaaaagaaacacaaaactactgatgaaaattctgatgaagatgaaaagaaacacaaatctactaatgaagatcaaatgcagtagaaaagttggagccaatacaaatattacattttatgtgctccactcgtaaatataggcttaaacttttgaaagttccattactattaaagatgcaaaggatatgtaaataggccgtaactttgcaaatttttttctcttcctggaagtagccacagctttggaacatgtaaacatgcaagctatactttttaaagttatataaagttccattactaccatagatggaatgaatatgtaagtaggccacaaatttagcacacttttaaataggcttatatttttgaaagtttcattacctactaaagttggaacaagtatctaaatagccacaacttgaaagttcctattgtcactttaaattattataatg

SEQ ID NO: 77801 - DNA, 597 bp, Cannabis sativa
tgctttgatccgaagcattagcaagtccaaaagaagcaagttccagcagcatgtcctctcggctgtcattgctggtttggtgtactttatttggctgtaacgaaatgaagtcttgtggcagccgaacctgaaaactctacaaattcaggagcttaaatggcaaatcaaaacaagaatttcttgtgtgttaccaaagaaaaacaaacaagaagataggatgtggtttgatagtttgtaaacattgtttgtatagatattttacatcctttcataggagtgcttagattgtaaaaagaagtttgtgcaatgaaattattgattcataaaaaaaaaattaattaattaaaaaaatattttaattaattttgtggcttgcgacaatcctacaaaattacaataatgctattgcagtgatggggattaattttgtaattcaatttctaattttttaagggttgtaaaattaaaaatacctaattattactcgattcatcatcattgtctatttattacttataaataaatattcattaacagttgattaataacatactcatgtagtgaataacatgtcatatatagaaataccacatagtt

SEQ ID NO: 77802 - DNA, 596 bp, Cannabis sativa
taaataaatggaaaaaatccaaacccttaggcccatgaggatttcagccgaaggagaggattttaggatcattatcctttccccaaagcccattatattctaaccctaaacttagagagaaaccctataaaaagagcctaaagactttgattcagtgaacagtttttttggccaaaaatctagaaaaactaaatcagaaaaagctttctttttcctttataattttcgagttttctttctctctccctttcactctcaaatttcaagttttgtagtattgagtaattgtccacacaattcaagacaatatttagatctgtgtggaagagtgtgtagaagaaactgttcatcatattaaggaaagttatctaggttcagtacttgttattactctgtgacagaaaggaacaagggttagagtactcaataaaaggagtcacattatattttgctgccattaatgtaaatgatcctaaaatttgaggtgtttatttatcattttaggatattagattatatattgtaaattaagatacatgactagtaaattaagatacttgtaaaacaagtttcaacaattggccttagagtcatgg

SEQ ID NO: 77803 - DNA, 1106 bp, Cannabis sativa
aagacaaaatcgtttgtgtgatagtataagctgacattgcttttatgctttctaaaggttttcaagaatcacggtgcttcggcaggagcatcgatgagtcactctcatagccagatgctggcactgccaattgttcctcctgccgtttccactcgagtcgaaagcatgaaggagtatttcaatcagacaggaaaatgcgggatttgtgaagtcaacggacaggatcttttggttgacgcttcaacccattttttatcggttgttccttatgctgccacatttccttttgagatatggattattcctcgcgctcactcgcctcattttcatgaaataaatgatgagaaggtattaccactgctccatagatttgcttccataaaaactagtttcaagcatatgtgattttaagcattttatatgaatgtggaagtaaaagcattttggaaaagtatcttttatttggttccatattcaaaactactactatacatagttatcaaaatgcttttattaggatagaaagttaaaaatgggattataacaaaactgtctcatgaaatcattctctgaaaaaccaatgaagtttagaagctctaaacattcctccatggtgttcacttttcaggctcttgaccttggtgggctgctgaaactcatgctcaggaaactttcattgcagttggacaatcctccattcaatcttatgattcagacatccccacttcagattaatgtttcagatacttctcattctcactggtttttacagatagtaccgcaattaactggcgtgggagggttcgaaatcggaagtggttgctacattaatttcgtcttccctgaggatgctgcaaaagttctaagggaagtaaatgttcctgaatagaaaattagaaatagcttacaaataattcaaaaaatctaattttgttgatttatgccaaatttcttttaaacaccatgatcggatgaactaggcataacagggtgtgaatgtagataatttttttaggataaaatggttacttatttatgtaatttattttcaaaatttcttaaaaaactcaaaagaataaaataataattgtggagttaagttcact

SEQ ID NO: 77804 - DNA, 687 bp, Cannabis sativa
tttatgttattttgaaaaccgaagtgagtagtgtttgttgttgtgttattttttgaacttttgatttcgaatttttgttggtttctgtatattaccaactacatcataacttttcttatcatgtctatattttattttatgcattctctctcaacgcagtcttgttgtcatcccaaatgataagatccagcattacttggggaaaaatggacccatagttgagagtaggattatacactgtaactggaatgtgatgtggctgtattctttttgtcggtgatggttctgtttctgtatttcttccatatttgtttttgttttttcttttttctgttagaatttaatggtgtctgcatcaaatttgatttccaataatgtctgattttgagctttgtgatatgagtatctcattgtcgcttaacgtttttttttttttttgagaattgggaaggtagataaactatacttcgatactggtgctcactcttcgttctgttgacttagatttttaaaatttgatttattaagtttgtaaggtattgaaacaaaaaattgaatggatatttttccttttgtttatgttcaaaatttccatccataaaaataataggatcttgagcaatatagaggtggatgtttagatcttggagttggatgttttctgcaaatcataggctcagcagtatt

SEQ ID NO: 77805 - DNA, 3537 bp, Cannabis sativa
ttatctttcaggtatcttatttattggtctgctccttcattagaaaacaactctctggatttgtcttttaacacctcatcacataattttacacatcttataactgaactcataatttactcacgaattgtatattatctttgatttcattatctacagtaatttactaacggtcagattttcatggtcagatacttagtgctgggtctggtcatctaaccattgctagtggggttgtaacagaatcaagtgactggcatgtttctgtaaggataagtcctgtctttactgatgatacttatatcttgaaatgaaaattggctttatattgtttacccttctttatgttctaatccagttaatgaatgtattaattttcaaattttagataagaaagaaagactaattaattttttctttctttctttctatattctaggtctctttatcgaagcgcttaaggctccctggaaatgcttcgtcagaggcatgtgatcttgctagggaggtctggtggatcgacaaagatgagtttatgtcttcatttgcagtcatgaggcaattacactactacgattatcttatttattcatttttcaagcccttactcaagttagatatgttgaacgagtaatgcgatatatagcctttctaaagtcatgcctgatttcttctttaaggtttaaccttgttcagctctttctacaaagtgcacaaagtacacacctaaggaagatgattgttgaccttgaggtaaagtttagtactgatcttgtatgatatgattatcaccttttttttattattttttatgctgattttctatgcatatgtggatgctttgtaggctcctcgatttgaaagtggatgcattttaagccaggatcctgctatttcttatgtgtggtcacagaaaaatttgaatgatgatcaacgtcgagccattctcaaggttctctaagatcttgcttctagtgtaccaccagctcttgcaatattttaatctctttaaccaggcttttatgtgtgtccacttgttattccatgaatttcatttcagatactcacgacaagggattatgcactcatactaggaatgccgggtacaggaaagacttctaccatggttcatgcagttaaggcattgttaattagaggtgcatccattttgcttacatcgtacacaaattctgctgttgacaatttacttatcaaattaaagactcaggtcagccgtttctttcattcatagattttatatacaatgcaacaaggcatgtgacttgattttcttactactgttaagggagagttaagctcagttagttttgttattactgctattttcccttctgttatatttagttatttaccgactcaagtgtatataaggtgctattcctttcaattggtaactaagcaatattacacttctttcattctttgatttctctaaacctacctgcaatccagccattgcttggcttacatcatgagcattttcgcttgaatatttgagtttggttttaatacaaggtttatataatctagaataaagtcatgttagtgctacattgacaaattgtaaaaagaaatgaaaagaatgtaactaaaatgcaatatttgtagcgatttttatgttcaggggtatttttgtaacaaaaaaatagttcagggacaaaattcttcaagggtcagagtttggggtagacaaattctatttatttgcaaacttattgtcccaggcaggaaaataaatttaagctcataaaccaattaataaagcatacgaacttttgtatcaaccatgcataagtgtttgcttattttgttaagatccaaaaaaatgatcaagtaattttactttggagggagtaggaagttccttggttgagataatgtaccatcagccctttgcagtggcgaagttattatgatagcctttcgatattcatttgtcaccaagttaatttttatgagagcttttgtttttctggtcatattgcaattgattcttaaaatttatatgataacagggaattgacttcttacgcattggtagacacgaagctgtgcatgaagaagtccgtggacacagcatttcaggttagattctacatgaatttaaagggcttattcggttggcggttttgtacctgttgtaattatggtgtacatggcagcaatgaacttgcaaggtgtggaagaactgaaagtgaaattagagcaagtcagagttgttgcagttacttgtttgggtattactagtcccttgcttaccaacaagagatttgacgtatgcatcatggacgaagctggacagacaacccttccagtatgtatagaaattctgctttcattagtagctcaaagtgtaaattttcgaagatgctatattcataagcattttacaattttcacaggtgtctcttgggcctttaatgttcgcttccatgtttgtcctggttggcgatcattatcagttacctcctcttgtccaggtataaatgttcgtattatagaaatatatgtacacacacacacattttgattttggtattcatgttttgagatttatgaaaaaattagtctgttaacagtgttcatttttttacccctagagtgtagaagctcgggaaaatggactgggggtaagcttgtttcgcaggctatcagaagcacatcctcaggcaatttcagcattgcgaagtcaggttagattatttaccaatattcttactgttacttatttttgtttctggtttaggttctattccagatagttaactaatacatttaatgcagtatcgcatgtcccgaggcattatggatctatcaaacgccttgatatacggtgataaattatgttgtggttcctctgacatagctaatgccaaacttaagttctcaagtttgaagtttggttcattgtggattcaggaggtacaaatattttttcctccatccatatataattcatacatatccgatatccagaccatattgaagctacatgcattttctcccccttataaaatgtataggttgggtaaattcagctcttataatgtatgttctctcattgtttcagattctgaatccagacagaccagttatatttattaatacaggtatttaagtctttcagttccttttgattgtacaatccaaagaaattaattagttttgtacatctttctcaaactagatacaatacctgcttatgaggcaaaggatcagaagaccataaataatccgatggaagctcaaattgtggtagaggttggtttttttacatatatgtatgattttctcttgtattctgttatgcatatcattgaatgagcttcatcttggctataggtcacagaagagttagtgaagaatggaatcgaagaggaagatataggcgtcattactccctataactcgcaagcaaatattattcgtcaaaaaataagcttgacctctgtggagatacatactattgacaaataccaggtttaacacaattacacactctttctctttcgggtg

SEQ ID NO: 77806 - DNA, 1620 bp, Cannabis sativa
  modified_base (991)..(995): a, c, t, g, unknown or other
  modified_base (1241)..(1241): a, c, t, g, unknown or other
ctgcttttccagtcagcctcattagtgacgcgcgttgaagtgtcactatacttttagagttactcaatgtgtgtcactaaaacccaattttctagtagggtaaaaagagaaaagaaacgttttgaatctcttgagtttaattagctatacattataactaaattaaatgaaaaggatagttaaaatagagaaacataaaataagaaaattagattactcaatttctaagctgccacatcatcatcttaaatacaccttaaatagtaagattatatagatatatagataaattagattactcaattttaagtttttcttttagttccttttatactggaacatctcatttctttctctctttctctttctctctctgttcctatagtgcgacgccggagactgggagcactgtgctccgatcacgcccaccgccaacggattccagttccattccttctaagctagaaaaacccgaccccctccctctctcgatattactttttctctgatatcgattgtgcagcgatgataccacactagattcaatctttgccggtgccaatggtccatgagattttacgttgactctaaatctaaaggagaagctagttattccaattgcaaaacaaccatcaaaacacatagtagtcttgtttctttctctaatggtgatacctcagctttaatagctgagcaataagatcgtgattcacttactcttaaagtcatggctggccaaatggtggggcagtcgtggcctaggcctcaccatttcaaaggctcccaaaaattaaaattaatttatattttagatataaaaaataaaaatataatatatatttatatatatattttggttcaataaatttcataaaagagttataccacaattagtaagagcatctccaatgaaagtataaataaatggcgaaaagctaaaatatggctcattttcaaaaagtgtgctccaatggtgtgccaaaaagtgatnnnnntttggcacatagtaaattttgtgctaaatttagcacaacatttgctatgatgtaaaatttacaccacaataaatgtactactttttcatttatatttatgtcatttctattattttattagtatatttaactatcacattaaattatgaaacatttatattatttttttattgtcttacgtataaaaataataataagatttattagaaagttattaaattttatttttttaataaaacattaatnagatattaaattttacatcaaaaacaattgtgcattggagcacaaagctaaaatttagtgtaaattaaccacaaaaactattttttgtactaaatatagcacaattcttacatctctcattggacatggtctaagggtgagtgggtgtattggtgttaggtgttgggttcaattcctagctcactcaaaagaattaaaaatatattgtaataataataaataaattaaatattttaataatttttctcttaaaatttgacaactattaaattgtgccctcaaaaaaataaaatataataaaaatagaaaatattcaatatttttttaatatataattcttaaaaaaattaattcaaatcttaaaaaataagaaaaaaaa

SEQ ID NO: 77807 - DNA, 590 bp, Cannabis sativa
ttattatttattattattatatatatactactttccttttttttctttgactcggtcaaccgagattttacaaaaggcattctaggccaagcgaaagaggttgaagaaaacaaaaggcaacaacaagtgtacaaaatcactagcgagcccattttttcgacgaaaaaaaatcgatataactcttttttgtcgatgcaattggtaaatgcatcgataaaaactgttttaccgaccacgtattactggccaaaattaccaatacgtttatgtgccgacaaaaggttacaagtgcattatgcctggttttctcggcgcaaatttgcatgggcaaaaaccttatttcttgtaaggtaaataatttatttaaaaaatcttaaaaaaaaaaattcttttttttttctcttcttcttgtcttcttcatctccaccccaatttatccccccacactcccgaccccaattttgccaaccagccaccaaaaactctactagcgcagtccaattgcagcgagccaccacccaccatcgattttggaaaaggataccaaaatctccaacccaatttcagtcgctggctatgacatatacatt

SEQ ID NO: 77808 - DNA, 1238 bp, Cannabis sativa
aataaactatcaactgactcttggttccatattcaataacctatcgataaagtatcaatatgactttaaaaataatagaccaccatcaacaagacatagaattcacaatttgactgtgtataggttgtcattgttagtggtggtttgagctccattcttggtgatggtggtgtagtggtggtttgagctccgtcctttgtgatggtggcatgcgttcaatagttaaaatggtggtggtggtagttttgaacgtttattatgttaatgaagcacagaggggttttcaattttaggttttgggtggcgatggtggttggacaagagaagccaaggaggaagatataagtcgagggaggaagagaggtggggaagttgggggttggttatcttactttgtagccgttggggatcggcgtttgggttcagtggagagagaaaccaggggaacagagagagagagagggagaaattaaatgaaaagggtagtttgggaaaatagtatcattattttctacaaattagtggaaggtctaaattttgatatggattttttttatgtatagatagtgaaattttacttctaaaaaataaataaataataatgtcagtgcactatatatttctttatcctttttaaaataatcctgaaaaacttaattaagaaaaaaaatattgatacaaagctatcaagtcaaaatagaatgtaaagaaccattctaaatacactcactatttaattctatgtctgattttgcaaaactgcgagttattttattatgagaaattataggaaatagcctcaaattatgagatgatgctagtaaatattctcattataaaaattgtagagaaatgaaccttttagactatttattatttatatactcttttcccacttaaaaaaatcaataattattttatgagaattagaagaaaattacttaaagattatggtatatctatattagttttgttaaaatcttttttattaaaaagttatatagattttttttttttaatttttatgagttgttgtgggttgttggtatatagattgtacaatatatttctattttgttgtatggtatattattattcttagatgatagttattttctattttgctatgtataatagtggtatgtaattttgttagcataatacaagtattttagtgcacatatataattttattggcatgctacatatattaatttaatatttttatatattttaat

SEQ ID NO: 77809 - DNA, 1618 bp, Cannabis sativa
  modified_base (40)..(70): a, c, t, g, unknown or other
cttctattctatcccttcctaattattattattattattnnnnnnnnnnnnnnnnnnnnnnnnnnnnnnnttattattattattattttctatcttttgtagcaaccaatggaaaattattttgaaaattgcaacatgattttaaacaaacaaccatgtcgacaaatgctacagaataatagtctatggtttatagacgaggatagaaaaatataataaatatttatatataatatattatagggaaaagtttttttgttgtaattaattaataaataaataattgagaagaaaaagccaaagattgcactggcttttaaggtttcatgccctttatcttgtatagccttttacaatatttatataacattactttaagaacaaattaggtgactttctcttttattataattatttttaaaaaaaaaatattttttttgcttgaaaaatatttaaatatttatttgcatagctgtactgttttttgtttgagatgtgaatcactgaataatccaacccaccaaaattatcaacctaaatattcacatccacaacaatataattattaaatataaatatatatatattaaaaaatgaaattttgttctggaacactctaatgtatataatatatatttttctaaaaccaatcaattgttataataataatattaattaatcaaaacagaaacgttgatatattaaagaaatgtataagtaattaatctttgattatattctgattcagctctgactagttgccgtatttattattattattagtttatttaatttattaatataagttttagcatcgaatttttatgctcttttaatttaattttttgttctgtaaaattaataattgcaacaacaggagattattctataaaatccagtgcaatgttatagggtggccataatcgatgagagttaaattaattgtttatatatttaaataatattattggatttctgaattaatcatcaacattgtccaagtggtaatcaaattaaatatagataattaattatacctttgattcataatataattattaattggtgcattagcctcgtacattcccaggactgtccactaatctccaagtggatcttgatatttatatttataaatatatataattaaagttttgaaaagaataccaaaattataacaataataataaaaaaaaaaaactttgcccttatgttgtctcttaaaaaaaatttaatacattaatattggatttgatattgtttttgagtcttttacttttttatttttttggtccccaatataattttatttatattttaatatgtggtattccgtcgacgtattacttttattatattattaattattttgcttatttataataagaaatatttgtaaccatgtgcttaatatttaaggattttattatacccattttggccttgagttttttaaataattacattttataccctagtggataagcttttgaagtcagcttttgtttttgttgtctttagaaaaagatttaataattgtatagtgaaagatatagttattgttttgatttgaaagaagaaaaatcgataattatgttattttttgtaaaaaatttat

SEQ ID NO: 77810 - DNA, 643 bp, Cannabis sativa
atgaaaacaagacaataaatgagtagagatatagaacagagaaaaaaagtactgaaaaaaaaactatataaactcaaatttcccttgcatattctaaaggaaaatacaatagtttgagaatttttttatatataatttataaaaagtatatatatatatattctacaaacggacacatagaatagatagaaatgtaagacctgaaaaataaaagcgacatcgttcaacagcattttgcattggggaagtacacaattcatggtagctcgagagctgttcttggaattgtatgctttcaaatgagaaaagtcaaaaaaaaaaaaaaagtataattgagtgactgaggcctaagggagcagaggcagtggtccaaaccaaacttcacaaaaagctcaaaagctttgtagcataggaaactttttaggttgcactgccaaatcatatcaatgttcacaactactcactatttgacattttaactgctcaaaacaataattctacaattatgtcttgtttggtacataaacctcattagtgcaaaaatagccttggctcataacatttaaattgaagaataaatccctacaaaataaaaaacaaaacaaaacaaaacggagaaaattacaatttatgccaatgtggt

SEQ ID NO: 77811 - DNA, 670 bp, Cannabis sativa
tttggaagggaaagaaatggctaaattttggagagagtttataagataaacaactatcctaaaagcttcatccaagtactttagaggcatatgagcatgtgcaagtaaggaaagaccactgtcaactatatgtttgtggacaagattggaagtgaagaatgccaagttgctcaaagtatttatcaaaaggtttaaactcaccatcacaattagattgtgtagcttttataggtaaattaaattgaagtttcacttgttttttgaaaatttgaaacgtgagaaaagcttcgtatttggctttaaatatagccaagtgtacatatatactatatgcatctatgaaactaatatagtatgtgtatccattggaggaagtgtgaagagcatggccccataaattagtatatatcatatgtaaaggttgagtatagaccgtctcagaactagggctgttcgtagtgcaggtggtgctatttttgacttttttttttttaaatcaatccgcacatacagtttttttaattttttaaaccgcacctgcactgcaacattaaaaaactgcagaaactgcactacaagaaataatgtgatttctgcggtttggagtatcactaaataattaaattatcacaaatacaataaaccttgagcaacacttgtcaaaaatacc

SEQ ID NO: 77812 - DNA, 552 bp, Cannabis sativa
gtcgtgcaccaccatacgaccaccgcatggagctcgggttcacgatggaaccccgaccgtgtatgagcccgacgaccccctggcctccttctgaacaaatttgtatggcacttgtcaaactcggtcatagtgccacccacatagtgtttcaaactatttttattgcaccaagaactcccatggtgcatatttatactaaagtacaaaacctgccaacaacaaaataacaaaaatttacaataaagttgatgacataaagcctaaagtcatatgcacatatgctcacatgctagtcaaagcatataccccacaaaaaaaattaaaaaatagttgggatattggaggctaaatcacttgaactttaaattttttgacacttaaccacaaaaattgattatctgggggcaaaactacctaaattcccattctgttttcctctatacccatacttccaaaaattatagttaagtgccacaatggactgcctacgtgtacacacttgtacacatgacaaaattttagtggcccacacaatattaattttaaaaaata

SEQ ID NO: 77813 - DNA, 2582 bp, Cannabis sativa
aaccgttcctaaattagttccatacagtcgctcatattttgttgcactacctaatataaggtgccaagggttccagaacaggggcaggacgagcctgttgctctcttaggtctcgaatttgctccccttactacctaattgtatcttgcatagcaacaaacacttgttcccagttatgaagtggtagagaattctttttctcaccacctaccctgagccccagatcgcggttcaatcgacccgatcacagtggttgcatgatctaatgcacttgcgatccataacttccaactatttacaactcagctagatatcaatggtaataagcatatcccacacatataatcatatcactgtcattactatattacttttttagcatgcttggtaataaataggcaagtaataaaataacaaacaattataaaagacttacaataccacgagtcgacatgtccttgcagtaaatgtaaatatccgaccagtttttagaacttttaaaatcatggctgctctgataccaagttataacgccctaattcctagggatgccacgtatgtatttttggaacatagtttagtaatagattaatgatttaatcaaatatgtgataaaagcacaaacttcactaaactaaaaccataggaataataggataacatcgctaaaaatttatttcgaggatcctttgttacaaaaattttacaaaaagggctatatacaaatgtaagttaaaatacacattaggtacaaccaaaacaactcttgtcaactcgaccacacaagtcggataagttgatatgtacatttatcggagaagattgtcgtctcatggttgccctagtttccccctgcccttacctgcaccacaaaacacttgttagtcacgaaactcagcaagaaaagtaattaacatcataattcagatagatactcaatccaagtcaaaaaagaataaatcccatactgattatcataagtataataggaatccatattaaacaagtaattacctcatgaggcaaaccataaacatcactatatagggtaaacattcaagaatcaatctagcaaaacatctatgatacttaaatcgatatttaaatattattatagttgtaaaatcagacaatccgaatacctagccaccagtattcctgatatgtcattagcgtcatctaattagataaccggcaagtaagaaccctaataataattacagtttagagtcatgactcttctttcatagcagtcatcacaactccttcacgttcataacagtaatgaccatctcgttggttttataatggtaatgatcatctcgttcatttcataacggtaatggccgtctcgttcgtttcataacgggaatgactatctcgttagttttataacggtaattgtaatatcccgaaaaatattataatatttaattgggcatattttattaaatatgtgattatactaatattgggagtaaaattatgatcttacttaagctagttgtgtaattattaatgtaaatttaataaatgactaaataaagcaaaatttattaattacggagattttattggattaagtaagtaatgtaaatacaatttttgaaataaaatatttttgagttcggctgccttagaaacttgacggagtggtcagaaatatcacgacaattaagttaagttgtgttagaattttattggattagtttagaattttaagttatcggtttggcaggattagctagaaatgaccaaaatacccttaggttattccatagcttaagttttaagaggaggggtaaaatggtcattttaccataatttgtcttttatagttttctagtgggtgtgggctgattaataacttagtttttttaattatttagtttagatagatattattttagaaaattaaataaaacttagaaaagtaaaaaaaaaaaatcaacacaagctttttctccttctttctccctgctcgagccctaggaccagctgcactctaagaatttttctcagtaattctttaatttttggctgaattgacaaggtttagaagttgtttaggcattaaggtaagtttttcacaatttctcctttgattttcttaagttttaaattgatttttggttagggtttttcgggttttggggctgtgatgttaaactgaagttagataatatttttaggtttgatttagggtctgcttgagcttagattaagtgaattcaatggttgtttgacttgattttggtttggatggagtttagtgagttttatttcacttgattatgtaattttgattaaattgatgaattattgtgaattagagctttaaatatattgtgtttatggtattataatgttctggaacaattgaataggtttgaagaagtttggaatcgattttggggaggaaaacctaaaatttcctcaccttttctaaccggtcgaccggttggttctggtattgtagaaccggtcgactggttggtctggaggggaaatttcaagttatcttcgaggttggttttaagctcggggtgaatccactacctagttgttggaaattattttac

SEQ ID NO: 77814 - DNA, 623 bp, Cannabis sativa
ctaaatgttatatattaataaagtaaaataagaaatggtttgtaaaatggttgaaagagagtatgtcttatattatatatatagacaatacattgtatatcgtattgtattttttatatatagactacaatattggttcatttgctttctttgactttaatatagtgaaagatctttgtatctagaatatagacacgtattatcatatataggggaggcgccttcagtacgtaatacatataacctgaaattcaacaatgaacgcttttgttctcgcttttctattaattaatctaagaattttgtgatgtttggaccttactttattatttgttttttttttttttttgttcatactcgtacttttttacgcgttgataaaacctcaatgacgcgcgccttacttttaatatatatttttttttaattaatggaactggtaaaatatctcggccctttcttggaaggacccttctataggaccgtagtttaatattagaatatttgttacttttcttatacttgctaaaaggtagttggttttatgaaaaaattaattggaagaggccacttataaaaagtattagcactattagtgtataataataatgttccttttaaca

SEQ ID NO: 77815 - DNA, 526 bp, Cannabis sativa
cattaaaataaagattgaagtttaaaatataagcagaaaacaggatttttctactattattttcttcatggaatagaagaacaataactgaaagtgttttgaaaaaaaaaaataaagggttatttacttgattcaatcataaaacataatattcctagataattatatgcttaagccaatgtccttgtctaggagaagaaaacctcaaatttccaagtgacatttttacactatctcatatctaataactcattatatatcttcttagaaatatgaccgaagctttttctctaattatcctcttacagaacgctactagcatgtagcatattgaaagcatgtagcatgttgggaatatgatttcaaaccccaaaatcaaaatcattattagaaaaaaaaactaattttgccgaaaaattaaaaaattgtttgatttgacttacatgcaattgcctctgaatgttccttggtcgcttcttgggtcggcgaggaggttgtgacctaatagagagatgaaatcttcttc

SEQ ID NO: 77816 - DNA, 1075 bp, Cannabis sativa
atcattttccttgcaacatgttacgatagtgaaaatattccaactgaaagtatttgatgaattagctaccttgggtaccaacatacttgtcacgaatatgatcaaatagaaagaaattaaagatagcattaacctcccaaccagcagggagagtaattgtttccaaaatttccaagtaaacagatatataatcttccccatctttgctcttgtccccatttgggtatatacaaaagttcctatacaatgtaataaagttcagtgtgtaatgaactcaactagcaagcagatcaaaactagagctgtttacaagatcaattaacataccatttgtatccccctgcttcaaaatcattacttaatttctcgatggacgacttcgcaagtgtcgaaaaggacttgattttgagcaaattgtggctcggtagagcatctctttctaaaatttaccaaaaccaaaatgagatatctttgccttacaaaagaaacaaaaagaaaaacccttttaacagtaatatgtaaataccatgtagtacggtggtaagtggggaagaaggtttggtagtcagtggcgaaggaggagaagataattgaatgagagttccggtttgggatgaaaaatcggctgaaaaagtagtagtggtgggaggaggtggtggtggctccggcggtggtgaagacggggctgtatgaaatccggagtcgtaatattgagaaagatgtatattattagggggaagaggaggtagtgatgtagaagaagatgaagtgtcagtctctgtttttctgttggaaattcggggtttcaacgaccatggcgaagatgccattagaaaccacaatgaggggcttttgttctttgttgttttgtgttttgaggggctgtgtttagttgactagtttaaaataatgagataatactacttttgctgtaaaaaagtctctatcccacttcatcaaattattattatttaggctgtgttggaaagtagtaggtaattaaactatattttaaaatgcaagttgtatttggatatgagctgataattacatataaatttctaatatcttgttt

SEQ ID NO: 77817 - DNA, 681 bp, Cannabis sativa
ttttttctagttaacaaggaaagtaaataaaaaattagcagtaacaaccagccatatatgcaagaacaatttcattgttacattttgaatatatgacatcttttacatgaatgtacctaaagctaaaagatggacaagactgtattttgctagccagcttatttacaaaactattaggaaatataagattgatcttattgatggagtattataagatacttgtgtgttgtatattatgaatacaagagaaaaacaatatctaaatataaccaactaactagttgctacaacaaagctaactaacaccttaaactataattcctaatacgtcccctcaagatgaaaaatgtactgaggatagaggtgtaagaagattctagtcccactaccctaagcggattggcagcaatgatggatcttgatctggttttgtcgacaatgttgttcttgacttgaatctgttagtgtttgatgtgataaatttctgttggatcttcagttgcgtctgtgtaaataaaatttaaaaaccataaaaatattataaattccgtagagaccgtatttttgtatttttttttattatttttggggtttttgaaattatcccaagctatttgaggaaattacattgtatacctactttactttacatgttttaatttttacctttattttaatatt

SEQ ID NO: 77818 - DNA, 804 bp, Cannabis sativa
ttctatcatagttctttgcagacaagttcaagatttgtcattatcattttgtttctgtgtgtgattttagttcatgcccctctattaaaaagagagaaaaagaaaggcagttacatacttatcatgaaattcaatgatgtggacacaaacataaaaaattttcaatgtaatatgtacatagtatttccttcaatcaggcatttttttttttacaattagtgtaagcaattttttggcaatgatttgaaggcgaacactgaattgatagagtaatccttttttattaaatagatgcacacagctgagtgtaatgaaatcaccttattgggagtcagggctcaactgaaatcaagtaataacactcagttaactttgcaacttttccagaagatagtaaaattctgctataaagatatcagaaaaaagttttgtgcaaaagtttttattacgttcgattatagcgtattcttccatgcttttacttatctgacaaagagctaaggttgaagataagaattacaaaggggtcaaaagtaagcattgttactaccatgttggacagttcattttaagtcctgaaaaagttttagagcattgcttcgtttgatgtgggagatttcgtatttatttattgtggaggggtggattcaaacttgcaacctccatttgcaaggagaggaacatgtgacttgattttaaagatacatttacaggacttgaacccatacctgttcacacacacttactccacctcacctaaccactcgagctagtggaaagcatgtgacttgatcttgtcatttg

SEQ ID NO: 77819 - DNA, 521 bp, Cannabis sativa
agtttaaccttgttttggattaacggaatcgttatttaagacatatttacagtggactcaatatctatcaattattggaatctcattctgttagatgtgctcattatgtgtaggagcttcttatgtctgtgtaacattgatatatttacattgatttatacaggtcccaccaacaaaaacattgatcacgcccgtccagtgcaaatctttatggaggcaattcaagactgagacagagtacactgtatcacaggcaattgcagcacaggcatgattcaaaaccaattaacaatttaaatcattttctgtttgcaatgtacttcatgttgttgattcataagaccagctggaattgtgcgtagtatatagatatatagatacagtgaaaacattgacatttatacaggaaaaggaaaaatctaaaacagcgattgtaacttagatgcatatatcaaccacatatatggatgcagtgaaaacattgacacttatacaggaaaaaaaaatctaaaacagtgatt

SEQ ID NO: 77820 - DNA, 640 bp, Cannabis sativa
acagaattcctaaacaactccattttaaatggcctaggttaacaaaatgtcaaccttgggcacaggccccaagtgtcaacccaggcgctggaccctgttatttgtacctaggagttgtcctccaaaatgacctatttccccatttttgttgaagacaaagagaatgcaaaagtcagatctttgatctgatacttggaaggtgcccaaattgacaaattttcaacctgagcgttgggtgcttggggtcccggtgctcaaaaattaacttgctccaattctgattctgatgccttaaatatgtctgtggtatgtctagttgatgtcccaataattttttagaccatgcagcaccaagacggtcccgaaaaacgaaatcctagttgaggatgtcaacctgggcgccagggtgaaaccctaggtacccaagttggcttccgagttacaggttcgtgtaattttatctcccgggacttggattaggttgcttgtcttcatgatacaaaatactaaaagatagtaggttagattcaagttattgaagtctgaacttccatccccgagattccaaagtcaacctgagcgcagggctaaggtcccctcccaggtcgcgactactatgacttgggtctactaaactctg

SEQ ID NO: 77821 - DNA, 573 bp, Cannabis sativa
catatacccagactttgttggtgcgcatggagtccatctctaaatccatggcattgttccacttatctgagttagggtcatccattgcttctttgtaatgcaatagattatccttgtttgtgtcagaaacaagaacacgtacttcatgctcttggtgggtaggttgtctcacaaccctcatactacgacgatgtattgggatttccttttcaggaactatagtaatcgttgtcggtcgttcaactaatggtgctaaaattattggtttagaaatctcatttacgatttcctcgataaccacttgacttcgtggcttgtgacttttcatataatcatgttcaagaaaagtagcatttgtagaaataaatactttgttatcttaatgactattagtatctgaattaatttggttttaaaattcacatatttttattttgtagttttctcttttcatacaataatatttttttattattacaaaaaaaatccatatatatctttttcgattaatgtattcttactatttttattcttttttaattctgttagaaattaggataagatgaatgaagt

SEQ ID NO: 77822 - DNA, 1769 bp, Cannabis sativa
tgtcgttctccattgcttaattggaagcatctcaaagttattactaattatggtaatcctgaaagaatatcggatttgaaggagtcgttgatgtggatttcgccctttagaaacattgtctattaatgaaaaacgtatattttagtttaagaatgactgtcgttttttagttttagaaaatggtactgttttccgttatgagattctgtttattttattagtagccttgtactgatgatgaacttgactactttactttaaatatgaatgagatatttctttcttatgttttattgtgaactggttgatattgtcttactcattaattattattctatgatgagtatgtagtataaagaagagaacaattggcataatgtatggattctcattcctgagcaaggggaaataagtcttcacaaaataaaagtgagggaagaaatgaatttaaggcaaccgataaaccttttatattgttcaactgtctcttcttgtttttgtaaggaactcctgaagatgtaaaacaagaaaatttctggaatatgtacaggagacgcctttgccttcgatttatggtgagatcatcccttttctgctaagccaagtaaggtattatcatgctatacttctgtctaggtgtgatgagaattattaaaatttctgtttatttgatccaaagttttgattggtgatcattggtagtattagtctctgtatttgtatgagtttatgctagaaattcgtacctagaggaataactcttggatcttatgaatgtgctggtcaaaacaataatctgatcctgtgaccttcactttgattaagattatcatcagacctaatgtcttgttgttgggcaacagagtgtatataagaacttatacatacattatttgtataagtgaaagtgtttctttaatacataaaattacaaaaaaagcattgatttcataataaaatatgaaaaagatgtgatggattgaattctagaataccagctatttgggatattttggaagttatttgctatagtttttgggaagaaaagatttgaattaaatatattatgaacacattcaattagcttgaataatagcttatgacagcaaaattattggtttttatagattaacgaattgaaactttctggtgattctctgtgcagttaagctatgatcatatggcggtaacctctacattagcgtcgggcgcccgcgttatgttctagtttctaggttgttacagtgctccgcattatgctctattttctaggttgttacagtgttgttgctggtcttcgagctgccaaggacatagccgaagcctgaaaacaacccttgaacccgactcttgttaaatactttttttttttttttgaaattaaaacgtgcattgatagataaaattagacctcacggtcattacaaaagatgtttactggaataaaggatacatataaacaaccatactgattgtgggtaaaagtccactttgccacattatgagttataaatttacaagttttaccaatactagaaaataaacaactaacaaactaaggagatattctttaacaaaaggcaaagtagttcataatctctcttttagcctccatgctattgagaatattgatcactgctttagagttgctctccacaataatgaaattgcaacttttaacttttgccatgtctagtcccaaacaacatgaaactgtctcgccacaaagagcaccagaaaaatccaattttgctgtgcttaccgaagcc

SEQ ID NO: 77823 - DNA, 1886 bp, Cannabis sativa
ctcaacatcccaagcacgctcatcgatcctcataaggctagaaactgttttaccgattaaccccgggtgtgtagactcaatacaaggatgatccatctcagcaaaccaagggtctgtcaaaatgctaaccgagagaccagcaccaacattcttacgcacccctgccgccaccaagtctctagcttcaaaaatactacgccagacgaaactcggatttgaaccaatctccgctgtaagaaaagaaccagtaggaaaataacgagccttcaggattcgtgtagccaaagacgaaggatgagttaataaccgccaaccttgtttaccaaagagtgccaaattgaaatcacggagacttcgaaatccaagacctcctacattcttatgcttacacaatcttctccagctcatccaactcactcccttattttgtggcttatttgaattccacaaaaacttagccataagagtttccaactctttacaagtttcaatgggcagcaaaaacacactcatagcataattaggaagtgattgagcaactgttttaagaagaacttctttccctgcttgagagagaagacgcccctcccaactctgaatccttttcctcaacttatcttttaaaaaaccagaatagcagtcttctttcttcccatggtattcggcaaacccaaatacgtagtgttatcatcagcttcaaagatgcccatcaagccacatatgtaatccctcatatactcctccgtgttagagctaaagaatactgaggacttatcaaaattgatcttctgacccgaagcattctcaaacaattgcagcaaccgaagcacatgtgagacctcactatcattagctttacagtacacataactatcatcggcgaaaagcatgtgcgatactttcggtgctcctctagcaacactacacccatgaatcaaaccaaccgtctcataatgccgaataagagcggagaagccttctgagcacaggataaacaaatatggggataacggatctccctgcctaaccccacggcctggaacaataggacctagctcatgacctccgtgaactatggagtaagaaacagagtaaacacactgcatgatcaaattcacccatctcccatcaaagcccatacgcagaagaacagctcgcagatacccccactcaagtctatcgtaagctttactcatatccaatttaagagccatgaagccattcttaccttttgtctttcgtttaagataatgcataatctcaaacgaaacaaggatgttgtctgagatcaatcttcgaggaaggaatgcactttgagtatccgagatgacaatagggagaaccactttaagacgattagccaaaaccatcgaaaccaccttgtaaataacattacacaacgagataggacggaggtcacccatggcagttggttgtttcttcttatggatgagaataatattagtgtgattgagactcgttggaagagagcccgtaagaaaaaaatcttgcactagtcgaacaatatcattcttaacaacattccaacatttttgaaagaaacctagagtcaacccatcaggaccgggagacttatcggggtgcatttggaagagagcagacttcacttcctcctctgaaactggccggaagcaactcaatgtttcctgaagagcagtaatactaggttgtatgcagctgataacgtcaatagaagcagtgcctgaggtagtaaacaaatcattgaaatactcaaccataattcgatccaagccatcctcttggaatcctgaagcttagtaattaaattgcttcgtcttcgagccgatgcagacgcatgaaaaaacttgctactgttatccccagcctggagccataactgtttc

SEQ ID NO: 77824 - DNA, 1235 bp, Cannabis sativa
gtggagacttacaggggtttatggtgaaccccaaaggcaacaaaggatggatacctggaatttactaaggtccctagtcaacaattcgaatgctccatggtgtgtaattggcgacttgaataatgttcttagtcaaagtgacaaacgcggaggacaaccttatccgagttggttaatctctggcttcgaacaaactctaatggattgtgatctttttgacatggacttgattggttatgcctatacttgggaaaaagggaggggaacttctcgttggatagaagttagattggatcgcgcccttgtttcatcggcttggcttcaaacttttacacaagctcggttactaaaccttgaattttcttcttcagaccactcgccaatcttcctagaagtcgtgtctccggatgtcttcattcccaatcggcaattcaggtttgaaaatgcttggttaaaagaaccgatgtgctttgaaattgtgaaggattgttggaatgtttctaaccatgtgagtgtggccgaaaaaatatctctttgtgctgagaaattatcaacttggggaaaaaatgtgactgacaattttaagcttcgaatcaagaaatgccgaaatgagttgaatcagttgaagaacaaaagagatactctctctgtccaacggtatagtgagaagaaaaaggaactttttttggtgttggaccaaaaagaagttttttggaagcagagggtgaagcagttttggctaaaggaaggtgatcagaactctaaatactttcatagggctgctagcaatagaaaaagcttcaacaagatttcaaagctcaaagattctagtggtatttggaaggattgggaaaatggccttgcggatgtcgttgtggaatatttctcttctcttttcagtgcatcgaacttgagtagtgacatgatggttcagagtattcaaagccgggtttctactcatattaatgaagacctccatcaaccgattcttgccgaggaagttcgtaaagttgtgttcagtatgcatccagataaaagccccggcccagatggtatgactcctgctttttatcagaagtgttgggatattattcagattgatgttgtcaacgtggttcaggaatttttcactacaggggaactgggttcatcttgcggcgatgctaatgtggtgttgattccgaaaaagaaagtccctgaaagtatggttgatttaagaccaattgctttatgta

SEQ ID NO: 77825 - DNA, 1003 bp, Cannabis sativa
gattccaagttcttacaggattctagcaagtttaaaggttacgtaccatatcttaggatgggagtgtcccactcccctcgagatagtttatttctactccgtcaaagctgtccacgcgaggaagagatgctcagggggcttttattatctcggtacccacacaaatgatcacaggatcattgttaggtttctaaataagactgagttcaaagaggagttcttttggactaccggtctttctcctatcaacacgactgcattttgcatcatacgtaagtaatttctgtctccaaaacttggttttgagtttttttttttatatctatgacttgaggtcacttacttattacatttattatgttgacagcagtttccaaaagaccaatccccacccttgaggtattcgagcgccataaaatcctactgggtcttccattcagattgcgattggcaaactttcttttgaacgaagccaacttgaggactgtcaatctccttggctcaaatgagtatacttgtaactacaaggtcttaaagtactctttgtgggagaaggtccaaatcccaatcgatgaagaaagctaggattatgtttcccgcgttcattatctccaaaaagtaacccctcgggaagctaaagaagaagcatcccaaggtaatcaatgtggatggtgacctaccgcacttaggacagagtgtacctcgctagtaacttttcgggatagccaatataacttctatacttgggataatttcctcatagactgtataacacatatgtttgataggtggtatcctaggttcaacgtctaacttagttgcactagctcatattatgggattgccgagcaatatggtactaatttggaagcgcgagccatccagattaaaattgggatctagatccaataaactcttatgatatattcatgatcatagggtctagggagtttagtaattactatagttcttcctcttcatcatctgataattatggtaactt

SEQ ID NO: 77826 - DNA, 1672 bp, Cannabis sativa
accgaaatgtatttggacttcataaatagcacaactccccaaagttttgtttctctttttaattacttcatacatatttatagtgagtgaaagagagatggtgtttcaaatttagaagctatatacttacttatatgagaattataacactagttatttagagattttttgtgtgtgtgctttgggctatttgactagagatgtaggttctactttataaaaatgttttctaagattatttaattacttgtgcagaaaattttttcattctttgtcgactacatgagtttgttagtcttagcacgagaatccaaaatctttattttgccaagaagtttatcttttaagcaacatgctattcaataatcattgtgcttgtagaatgggttaaaatgatttgtggccaaaagggtgaagagaattgctatcttatgtgttaatttagacaatatttctagtgtgatagtaggattaagagtattgtatcctataggtgttaaggaaggtgagttcaatagccatgctgaaggttaactgaagaagtattttaagtacacatatattcaataattatttttctttatttttttttttgttgtattttaatatgatgtgagcaggtctaatctaggatcgaccctgagactaattaggccctagactaattaggccttgaaactaattaggtcatagactaattaggccctaggttatcatcatggataagaattggaatctcataaactaaattactcataattcttccagctttctaacttgggaaagatcatttatgaagttccaaggagcttctcggaattcagcgtgtagtctcaaatagtcaagtcctactctgtgtgtggcgatgcccccagcatcaatacttccaaaatttcaccaataggtggctccttcaaaaatggtaactggggaagggcggttgtgtcacttgattcatgttctaacgagtggctcttcaaaattgcttgaggcgtctgtattgatgccatttctgctgaaatgaaggctgttgagttagctttggagtgggtcgccaaccactagtgggacgatttcactattgtctctcattcacagctagcagttcaagttattaacaatcatagaactcctggctggaaactctcttctcttttcttcttagtcttgaagcttaagactggttttaaccagtgttgcttttattttatgaatcgttattatttaactcttattgacaatcttgtgtcacatatgctagaaccagagctggccttgggcataggcaggctaggcccgtgcctagggcccatcccatatcccaaggcccaaaaacagccatgtaaactcttcatcatcttcaaaaaaaaaaaaccaggcccagtcagcttttactcccagccggcccaactaagcattaaatggagtggtccaactccaacttacactccaaaaggtgtgggtccaatgcaagcaaagaaagaaaaaaaattacatacaaaaagaaattacatatacaaaaaggccaatttttttatttattaaaactgtcttaggcccacttttttgagggtcggccctggctaacatcttctaatggcattatgaacggtaaagggtatgtggatcccatttttaatatcttgaacatgaggttcttgaaaaaaaaaac

SEQ ID NO: 77827 - DNA, 516 bp, Cannabis sativa
atctactaacgaaaaagaaatagattctttatcattaatttgtctcttgtttagtatttgtaaaggaaaaaagtgatggatcaaaattcatggatacttttccatattaaactcagattgcttccaacttcgtccccaaataggacccacgaggataataagagctttaaacacactgctaactaaagaattttgacgaaaatgaagatgccaaccctatttcccaaacagcacaatataaaaatcgtgaagcttccgaaactcaagtctcccatgaacctttggaaacacatccggtcccaattcatttagtgaatgccacttctgttcttacccgacttcttccaccaaaaagaacacatttattttttcatctcatcacacactttttagataaaagaaaaacgttcatagtatagtgagagagagattgcactattgtcttcaataaaacttctttaccaattctagataaaaacttactatcccacccttcaatctgctttctcatctttt

SEQ ID NO: 77828 - DNA, 642 bp, Cannabis sativa
ttgtggatcaatccttgacaatttaacttgaacttaatgttgtgaatgccaaattaaggacagacatgagatatggcatgatgatgaagtgcaagagcctcagcccattcaggagggagctgcccatgcattaagcatgcaaaacatgatctttaccgtctgaatctctcacaaccatatgctaagaccacacgtagcctcagaacgattaatggtcacatttaaatttgtaagaatgatatttttatatggagtattaaatttaaataaattgtaatattttttttaatattgatgagttattataataaaaataaagtacgtaatcatatatttaattaaaaaactgatttaatctaattagtttttaaattgaattagattagatcaaatatttaacactactttatgagtgtatactaatttaatatacatattgtatttctaataatgctttatactatactaaatttagatttgatcaatataattaaaatttctttagatatataaattttaaattcaaatgtaattcttattttatttttgcaaaaaatcaaatttaattgtttaattacttataaatgataacatttgatcaaatcaatcaaacttaacaagttcatgatttcaaataagtat

SEQ ID NO: 77829 - DNA, 1431 bp, Cannabis sativa
tgtttatgttatctttggtctcctcagtggtttttttcttcatataaattttctcaaatttaactttgtcgactattttatctttgatggatgtgggcaagtcgaaaatgttaagttttatgagtttcaattaatttgtggctattttaactatataactagagcaaaagctaaaataattgggaaatgttaaatataatactagtttatttgggacaattaagtttgctttgttgaaacatatgattgatagtgttactgttaatcaaggaagtgtaaataaggatgatatcgtgtggaatttgggacgttaaactcaaatttcatattaactaatacaacatatactataatatttcatttcaataaacaagtaaataatttgcttcttaaatcttaacgtgctttttgaattattagtaatgttaaatattaatttttttttttttttgctttgttaaatattagtactaatttattttttattagtaatgttttgtttaaacgttagtgaaatattagatttttgttaagaaattttaccatctaaaatatgatcattattatattcgtgaatttttataattgtcaaaatcgtaataataattataatttgtacgaaaaaattaataattatttaacggttatagcttagagcatttctaatgataaacttttaaaaaatgcttggtgaggtggacatattatgtaacaaaatatttagatactataccattggagagaaaatgatattattctagaaatttgcatagatactatgttgtggcattgatgctattcatttttttttaaagagtgttatacattttaaaaaaattatgatatataataaataataatgcgtgagatcataattataacatttttaaaaagtgttatacattagagtgtttttagaagtaagtgctaaaaatgatgtaaaaaatagataaaataaaatattatattttcaaataatgtataaattattagtattcttaaaagatactactagatgctcttaggaaaaatattaacatcaataataatttaggaaaaatactactagattctcacataaccaaacactatcgtacgatacaataagaaacactttgtctcctgcaatttcaaaccaaaaaaggtgagtatagaaaaaaataagaaaaaaaaaatagaaatatcgacatctcatcggtatccgtcgacattatgtcgacaaaaacaacaacagaaagtataccatgtttcatcgacaaataatcgacatactgtcgacataaaattaccaaaaaataggttggcagttcttatcgatatataatcgacacactatcgacataatgtcgacatagactccccaatgcaatttgcatgtcaggcacgtgtacaatggtaattaatccattcaactatcgacaagctatcgac

SEQ ID NO: 77830 - DNA, 1775 bp, Cannabis sativa
taaatcaaataattaatcaattgaaaacatattaaatttaaaattaagagtttggctttagttcggttgcatactaaatattcttaagagttgtctatgttgcacaatcataaaatatgagtcatttttctcgaatgatataacacaaaagcataataactatattgcaacttgggttaaatggtagtagttagtctcatccttttcccataaaaactttaatttcaatcatgaattctaattctattctagtattcttaacttgatgaggtgcttcaataatgcaatatacaaatccaacattacaaaacttcacagagaaagaatgcaaataccattcaactaaataatgtgtaaaagtaattatacttcaacaaggtgaaactcaacattagaatcccttaaatttgttcatcgaagacctcacatcaatattgttagttctttgttttcttccatcagctgtaacctcactctttttgtttccttcgaaatatctctgattctctaccatttccaaaaccagtaaagtatacaatactacataaaaatgcatatgcaccacttcaacttcactaagttgtacaattttgagtccataaactatgcacagataaattgaccatcaagcaaagttaaataaaaatctcacacaatagccataataaaaaaaatttatttcatattcattctcttactcaactcaccaaggaaaccccatcaacatctttcgccggcggagaccttgaggaggtggtttagacgacagaggatttgacgatgatcttgtcagaggtggtttaggctctgtatatagcgactgcaagaacttccccggttcgtttataagaataaaatttttgattgtgattaacataagaattcaataaaggcaagaaaaaaataaaagaaaaaccaactaaaacccatttattcccaatcgaaaataaattagataaagcaaagtagaagaaaaatgttgctatcagagtagtaacaagtgtagtagccaaggaagaaaatgaacaaatgaaagaataaataactcataaagtgttaaaatttggggataagatgaatgggttcatctcaaaactaattgccaatgagaagagtagctcattcattttatatatcacaatttatttccatacattatcaatttatataacgaacgatctttaagagaccacaagaccgaacgtgacatttgaaagaatcccacaaagctaaatatcccatatcaaagacccaaagtagcacaatttatttccacacattattaatacattattaatgagacttaactcttaatataaagagagtgcttacaaaatgatggtgtttgactctttgtatacccaaattaagcatagataacctaaaatggtggtctaaaagaggaatacgtgtcaatttcttaatttttttagaagtgataaaaaaaaaagaatttagtgtgaaattacaattgaatcctacgaaggagctcaaaataaaggctttaaaataaattaagttggagaggaataagagacttattatttataagacatatatatggttaacgttaaacacattttttcttttagtcgaacgttagatgatttttgaatattaatatattttttaaaagcaatttttaattagtaatattattataattatatagtaattaaagaagaaatttttacatgaaaaatctattttacacaatttattacaaaaaaactcctacacggctatatcaatttttttacttaccatgtttgttt

SEQ ID NO: 77831 - DNA, 633 bp, Cannabis sativa
aataagtaaaattattcaattattttttattaacaattatattatttgagcatataaaataatataattgattagggacaacttttgtagttttataatgtggcaagtacttaacaatcatttattgactaggaactattttattttttcttcaacctaaactctactttgtgtctggtttgtaggttagagtttgaatctcataaacacttattctttaattgtgttatgtctagaaaaagttttagctgaaattactggttggttaggtcatttcgatttgttaatggacttggaagagtagattggcaagtgctctaggccgatgaaaggccttgtggctatcattaccaaggttgtgattgttgctacaatgtattgcatttggtgcaactgcaacagatgtgtttttaaggcatgtagctcagttagttttattagtatccaagttaagattgttgttaaggatagaattatattttgtaatctttctaagcttaacaaaaaaagaagtaatgtaactcaatcgatatccaaattctaatttgtttagttgttgtctaggtgtgtattgtttagtggttgtttgaataaaaagttttcttttgcgatataatagtataattgattgaa

SEQ ID NO: 77832 - DNA, 1412 bp, Cannabis sativa
gtcattttagatctccttcaaccttcagccgggttgaaacttgcttaaagaagctggccgaccagcctctacacaacacgtggtcagccagccaggaaaggatctggtaggattttttgtacaattttacacgtggactgcgaattgggccctaacagcccaataaagtagctagaaaatatctaagtttaagggcattttagtcttttgtaattaattaatttaatatacaaatatctacggatttcaattgtaaattaggattaagctctactatataaaaggcattaattctaatctaagagacctaagtctaatcctagcctccaagtcattaagcgctaaggcctcattctaagcctaaatctataatatctcttcctcactctcactctctcacgcgcctatacaagcattctcaacacttgagattttttatcttaattcccattttgtattcataagggagctatatcaaatcccacctatagtgatctgaatagtatgatccctcgatattaatacaattaaaagaggagtaggtcattacccattaactaaggaggtcgaacctctataaaattttgtgtattctttactttctaattctaattgtgtaacacgtggtaaatatcatcggatcaatggataagtattattacaacaacattgcgatcattcataaaattagaactataagaccatttctaacaggagatatagaaattgatctatatttggtataaaatatagttctgtgatatttttgcatcaatttttattatgcatctctgatggagatgcaaatataaaatatagctcattttgttaaaaatctactccaataatgtgctaaattatggtacaaaaatctcacataatcaaaaataattcaaatttgcatcccaaaattgcatgatgtaaaatttacatcacaataaaatgttatgtttctatatctactattataccattttgaatattttattattaaaatttagttagcatgctaatttacattaaataattttcttaattattattattttattattaaattttacatttatttttgtattattattatatatttttaatagagtattagatgaatattaaatgatatattaaattttgcattaagatttataattatacattggagcataataataaaagttgatgcaaaccaagctgctcacaattcgacaaaacaagatttagtgctgaataataattgtatttaattagaggagattacctattattttttctattattgtaaatgacttgctttaatttataataacaaataggctaattaacatttttctccccgaactttgacatgtactaaatcatgccccttgaacttttttggccgttacaaaattccccctaaactattaaga

SEQ ID NO: 77833 - DNA, 2236 bp, Cannabis sativa
ataccttatttttgttagcattcagattagaagaaatgttaccaatagaggttgacataatgactcatcgccgtgaattttacgtctagatgaaaaaacatgaattattatgagaatatttggatctgcttgaggaaaagcatgttgagccccaattacacaatgatgcttattggcaaaagattacaagaaatttaatgaaagggttcaagaaaggctattgtaggtcaaagatttggtctttcgaagagtcttcttgcatactcgagatctagcagtaagtgtatttaaccctaactagaaaggtccttatgtaattgaggccagtaattggacttggtgtttgtaaattagcttttccaaatgggtccctcgttgaaagagatgcttatcaatacaattcctaactagaacaatatagaattggacacaaggaattgtaaaagctctaaaactttatgagctgaacctttcatttatatagagaaagattacaaagaaaaggctgataacagaacataacaacctctgttaaggcagagtataagtggaaaaacaaactaacaacctgtacaactgcaagaaataacagaatacaatgtattgaaaaggtttgttatttatcatcccccctcaagcgaaagggagtggagcacactttgagcttggatttgagatagagaaagcgatccgcggagagagcttttgttaagatatcagccgtttggtcgattgatggcacataccgaacctcaatttctttggccagaatttgatctctcacaaagtggagattgatctctatatgcttcgatctggtgtgaaacactgggttggcaacaagagaggcatccccttggttgtcaacccatatgattggagcagcaggaaaatgcacttgaagttcactcaaaatagagtgtagccacttgatctcggctgcagtattggctaaggcacgaaactcgctttcggtgctagatcgagcaactacttgttggttctttgctgaccaagagatgaggtttcctcctaggaaaatagcatagcctcctatcgatcttcgatcatccgggcaactcgcccaatcggcatccgagtagtcttgtaaacaaagtcttggagctggtcgaatgaggagaccttcatgtattgtgcctttgagatatctcaataatctcttgcaagcatcccaatggacatttgtaggggcatgaataaattgactcaatttattcacaatgaaagcaacattgggtcgggttaaggtgaggtattgtaaggcccctaatgtgcttcgatagagcgtatgatcagcaaacggttctccattagtgagagacaaaacatgagatgaacttgccgggctgggacatggtttggtaccatccattttgagcttagccaacagatctgtaatgtacttagattgagagagatagaaaccggatgttgttctatgtacttctaccccgagaaagtagtgtagtgaacccaaatcttttatatcaaactcatgattgagagctgttataacatcagatatagcagtggggttaggacctgttattagtatgtcatcaacatacactaacaacactattagactttgtccagaaccttgaaaaaacagcgagttatcgaattttgacagctgaaatcccttgctgtaaattgtacatttgagcttttgattccaggctcttggagcttgcttaagaccatacaatgccttggtcaacttgcaaacatgagtgggtttttcaggatcgaaaaaactcggtggttgcggtatgtacacaatttcttcaagagggccatagaggaaggcattggagacatcaagttgtttgattggccaattaaaagaggctgcaagagtgatcaaaattcgaacggtggctggtttgaccactggactaaatggctctttgaaatcaattccaggggtttgagagtacccttttgcaacaaggcgagacttgtatttgtcaagtgagccatctgcattgagtttaattttatgaacccatttgttgcctactaatgtcatggagggatggtatggaaccaaagtccaagtattattcttgattaaggcacggtttttagtttgcattgatgcaaaccacttgtgatctgccagagcatgctttagagttgatggttctttaggcaatagggattcgggtaaaggataggaggtggctggtggggtttatgccctaaataaaac

SEQ ID NO: 77834 - DNA, 1454 bp, Cannabis sativa
tcttatttccttgaagttgcaatacgaaatggccttccgaaagtcactcattaggtaatcatgcttcaagcatccccctttcttttcattactcttaactatctcattaaagtcccctccacaaacccaagctccttggatcaagtctcggagccgttccattagagcccacgaattcttcctccctcccggatccggactcccataaaaccccgtgaatctccaacaaaaacccagcccattctcaaccatcgcatcaatatgggacaccgtaaaggacttcacttccacctcaaaaggctccttccaaagaagagccaaaccaccacttttacccttcgccgctacaacaaaacagccctcaaaaccaagaacaatacgaattctctccattgctacttcattcaatcgcgtttcagataagaaaatcatcccgggatgatgatctttcacatgggaacaaagagttttcaatgtccaggggttcccaagcccctgaacattccaaaacatgatattcatggctctcggcgacccagggcccccgggttcgccgcttccaaagtcaccccagagtccaaatctttcaaactagaaatgtcccctggtaatttttcctcccatgagttttccactttcccagtcaaatctttcatagtgtccactgcttggtttttcagtttagtgtcatcctttcgattcctccttgccacaatcttttttggtctccctactttgcctttctcacttgcctttccaaatgtgataggaatgtcattccaaacactcccctcctcagaatgaacaactgacaattcctccctgtgtagtcgtttaccagagtccttccctaaaccatcttctttattcaaagaatcccaaaattccgctctccgttttaaacccgagcttccttcacgtacaccttccttagctacccgtttgacatccaaagcattcataagatttaaacaatcaaatgaaagagaagagttagagactggtacctccaaattgggtggtttttcattcgtattcctgggcagagagggatttcccatagcaccacaaggattatctctatcattcaatgtcaaaaaatctgccataggttccaagtttaaagacctttgtactccaccttctgaatcatctctcaaagtgttcatgtgtcttattcctttatccaccgatttgcccttagtctgtctctccctttgtcccatcgacttttcatcaattttcaaccatgccccaaaggcttttgagctcgttccctccttcgtcttgatctctacaggattctgcccacatgaacggtagtcgtgccccaccttgccgcaactgaaacacatgaatggtagtttttcataccggaagggtaaccaaacatgtcccccagaaaacggaaaaagaaagcctgggcagagtggtttttcaattgaaatccaaac

SEQ ID NO: 77835 - DNA, 655 bp, Cannabis sativa
gagagactcacctggattaaaatcttggggtattgtagtcgatccctactcttggtaattttgtccacttggagtggttcacccaattgtcccactatcttgaacaaggaagagtccccccaatatttgatatctaatcctttcagctggatccaagttggcttcctttcatccaccgagttccatggtttcatcacattggcttcctgtcaaagaacacaaagccttgctccataattttgtccctcgtttcaaaattctggaatctgataatgaaaatgcccttagctagtaatccaactttcaccactgcatctttccaacttctacgatcaaatccatcaagtatgtttactaaagggttagctcaattaacatagcacacaagagacggttgccagtaattaacctcctcaacaatttcttcaaattcgatcttaaccttcactttcccattcgcagcagtatctgcaaccctcagttgtgtatcaggaaaattcgtctttgatttttcgaaataggattgtagtttttgtgcgatattggatctgagaattggaggagaaggattcttcccccaaactcgcatcctgagaagcacgattcgcccccgtaagccaggcagagaaatcttgatggatctcactagtaggcg

SEQ ID NO: 77836 - DNA, 582 bp, Cannabis sativa
cctttcctcctttcttgttctgggaattactcatgtttcgttccaaaactttcgcttttgattgtctaggagtgacactacatccggtttgtgtcgtcccatgcctagaaaaattagtttgtgtaggcacgggcacagatgcaaatggtttgtagtctgttgggttataatgtgttttaggaataaagttaaatttgtcagtagaagcaataggagctgctgctggagggactctgaattgttgataagaatcttcctaactgataaagccttatgccttttccatgaattttgacaacgtcttggtcctccttcctttcatctctccccataagagagagccaactacaattccaaaatgtagtgccacacgttcatatcatcggtcaccttaatcttagttgccacatctgttattagatgaacgaaactcttcatgctttctcctgcctgttttttgatattggtgatggagcctatttccatgtcaaagtcgtaagcatcaatgaactttttctggaaggtagactgcaactactgttagatatattttaccataatctagatttactaacaagtatg

SEQ ID NO: 77837 - DNA, 1193 bp, Cannabis sativa
cagtaagagaaggcgagattgagcttcttcaagaaaaagagtactaaatttttgaaaaatgaaaatggtttcgagttcgaattctagtaagaaaaacaccaagaagaagaacaagaacattaatgcaaaagaagtactcatcaagctcaacactataagggattacataaagagagagaatgagtttttggacaagtgtgaagagagattccaaaagtacaacatcccaaaacgttatcaaaatggtcacaaacaacctttaaaggattacataatgagattggaagagttcatggagattacttggagaaaagaatccaaaaagaaaagggcaaaagggtattgtaatttgctcgagttgatgataaagattgacacaaaaaacgaacttggtttctctgcttttaattctctcaagattcgtattgaagaaatcgctattgaaatctctagtttcatgattgactacatgttcttgatcatggtaataacttccagcacaagtaaccattttcttgatgagcttaaaactatagtggaatgtttacttgtggaaaagaaatgtgtctctaatacttttgttaccataattcgtttcataattgcttcaatggagttggcaggaccattttggaacaacaataataatgagaaggattataagtttgttttgaatgaagaaaaaatggaagacgatttagttcatcatatcatcatggaagttcttcgtttagaggtgtgcatatatagtcctgaattctttcctatgatgctttcaaataatgtgtttttctcgatgtcagagcatcttaagtgtaatgttttcgaggaaaaattgaaaagagttaaagataagataaatgagtggaaattgggtattaaatttggtattaataaagatgatgaagaagaagattattattgttcagagatgaaatttttaaggcaagttttggaggatggggttcatgagatttggtgtgcacctaacactactcaattgatcttatcaaacctagtgctcctttagaatcatcaactttttgttttagatttaatattgttgatttttattttgtcaagattttttcttattgtctaacaattataatgaatagtattttgctaagagtttttttggtttggtaaaatttcttattttctagtattgactcatataacacaaattttat

SEQ ID NO: 77838 - DNA, 1744 bp, Cannabis sativa
  modified_base (1644)..(1644): a, c, t, g, unknown or other
  modified_base (1692)..(1719): a, c, t, g, unknown or other
cgccccaaccacgtaaaaaatctccttcttaatttcttgcagctctctaaattattattattttattggttgccgaaaacctcgatcaacacaatagaacgtaatttaagcaataaatcaatatcctggaaaacatgatttggagaggaacaattatttattactatttttcattgatgatgatcatatgaagattcctattttttattcttatttctctatgtgttattaggaacaggtgaaaaacttttaagagtatgtttattggaatttttttctttttttctttaatatataaattagtaatttaactatggttaaccacattattttacacagcacataagtgcggtgtggtttgcggttaatattagttttataagtccaaatcagtgtagaaagcagaaatgggttttattaaaaaaatgaatctaatctaaatcattattgacctcatttctagtcaacgacgtggagtcaataaaacagcaatataataatagaataataaataacactttaataatataaacgacacaaacagtaatataataatagaataatgaataacactttaataatataaacaacacacgaaatttatagaggttcgacccatttcagcagtaacagcctaatcccattttattgtattacttatgaaataatattaagatgacaagatctgtctaagtgagtttcttaatatctctcaaaaaggttacaaatatttttagagtgttttctctattgtaagtgcgtaaatctaaatagcgaattgacctcactatttatagggaagaataaatacataagtcaccaaaaatatgagataaataaggaagggtttaaatgtgaatctcatgatttttttcatctgtcaaatcaaatcccatgaaaatatggatattaattagcctattattgtggaattgattaaggaaagtatctttgaagatcttcattgaattcttctgttcagtcattcactttacaattacatggcttacatagttcggggcgaggtgaggtcttgggcttgttcgattctattggcatcaattggcctagtcgtcacaaattggtgttatactccgctcatgggaaatttccataccacgtatcagcctgctagtgccacgtcattagtatgaattttgggataacatttgcccccaagtctgcatggaaacttctgatcgtacggggactttctaggccttacacgttgcacggctaggtgacacgtgtttgtacccacgtgcctgcacggatatgatatcacttctacccgaagcatgtgaatccttctttatcctttaaaatcttcgcattagttgtcttttcttggaaaccgcatcttagggatcgtgcactgacaattacacaacccctacaatgattacctttttgctttttggggagaaatagaatattttgaaattgattgccattatatcccttggtaatcctataaataggatcaaaaatacccatttgcaatctttagccatttaaaaatatacaaagcaagaagagagatgttctttgagagattggtccttttcaacttgatcagactgttcttcgatgagaagcctcaaccaaccagggaagtagtaagtgttggaatatattttaccnggatctagatttactaacaactattttttaacatcctaaacatgaacnnnnnnnnnnnnnnnnnnnnnnnnnnnntaaagtttcagaaaccttacagtgg

SEQ ID NO: 77839 - DNA, 1290 bp, Cannabis sativa
  modified_base (1225)..(1229): a, c, t, g, unknown or other
ttttttataaaattctaataatttaaggtaccgaatacaaattttaaaataattaattttgagtgtatataaaatagtttttaaaataattggtgcaaatatttatatttaggattatttgcggtgaaattttatcatattttgattttttacacttaattaatttttttattatttttttgtagtaaaattcttttatgtttatttttctttacaaatttgagatatcactaacttaaattattgctatattagcttcaaaattttacttttatatgtatacagtgatcatctaatctaattaatattaaatgataataattaactaatggcaaagatttacaaagaaaagtaaatcttaagttaatcaactaggaatagtatttagtatatcactcttaatattattttaagcttttcagttttcattggtaatattcttaatttatgagttatgagttatgacatatatataaaacttgaaaattgcatattgtggtgcgaagccaaagagtatttaagtgtaaaaattgaccacgtgacatggtttgattatataatgaatgaagtttgccaaaacgtctcttagccctatcaaaccgtcatatacatattgcacttgttccctctccacaacaccatcactatctacatctaatactccttctagttctcttcttatccataatatataatcatacctttttttcatattataatattgatttgaacttcaacataagcaagtttataaatatgaaagatattagatagtgtttagttgggagtaatgaaaatataggaataggaatgagattggaaattagaatagaaatggaatggaataaaatttaaaatgtataaaaaaaattgtttaaaaaaattattaatttttttcaaatcttgtattggaatggtctttccttttattttaaaatggaatagtcattctgccaaaatgatggaaagatcattccatcggaatggtgttccaatgattttaaatacaaccaaacaaaagaatagaataaaaattgttttatttctatttcattacctctaactaaatgccaccttaatttgtgagaaattggatgcaaggtctatgtaatatcatttaaaatatatagaatggaaagtattaaaatgaaggtttgaggctacaactagaagtagaacccacataagctaagggaaatatacatggtatactaacttttgtcannnnnttacaaaaatactgttaggcggtattttttacttttatactgtgtttttttataagtttca

SEQ ID NO: 77840 - DNA, 1403 bp, Cannabis sativa
aagaaaaaaatagtacctccaaagcctatctacaatttctcctttcccaatatgcaattcaagtaatgcagatacatcatctggactaacatatccatacctgtataaacataatcaatgtaatagcattgatcatcagctacaaaaaaacgacgaattcgacataataatagtaatgttctttctcaccagtgtccagttacttctcccttaacatttggtccgaatataatcacatttccagcatatttatgtcctccaatgtgtgaacatgggctaacagagacttttccttgtaatgcaagtaattctatttcatctctgaatttactgaccagagctggtccacaaactccacatcgacgatctcgggaaccatgagaacatacgaaaatatatgaaccttttagtgtttctggagttccaggtagccattcaccctccttcactaaaacttcttcaacaaatgtgtcaacatcgaaatgtgtcagcctcctgcgtttcattaaccgagtttatggtcactatcaactatcgaacaatgaattaaggtttcctgtgaagagtggaaatctaaccgaagttaacagaaaaggaaaaagctcgtaaataacctgtatctgatcatgtccggaaagatcaacacatccccatttgatgtttcggttccatcatgtccctcgcatattgttaaccgagtctagaagaaacataaaacaatcaaaagacatagaaaaaaaggttagctcaaaagaaattgagccaaaaagaaagagataaatccaaatttataagcagcaaccaagaacatagaacagatttatgaatcaaccgaatatttcgacatttagaacaaattatcacgggaattatcactatctgctgacaaagttcataagaattgacattgacatggatcttctgtttagcgcccaagttagacattgtgcttcgattttaaagaatagacgattaatgctaaggcacaccttaaggtaccaaacatcacaagaggtgcgataccactatcggctcccatacatttaaattagtaaataatatggaaaatcactaactactaaccactaacaaaatgtcacatcggtatgaggttaggcaccttaaagtaacagatacaatctttaatagacacacagattaagtatctctccataaactgaagatcctaactctaaagtcaaatccttaatgttttgatttttggtatataaaaggaaggaaacaaaaggataaaacaaaacaagataattcaccttatctaataataatgaaaagaaaaggaagaaaatttattagttcctatcttttccttattacttcaaagaatatttgaacaattaatgtgtataaacaaatgggatttattccattcctatacttct

SEQ ID NO: 77841 - DNA, 723 bp, Cannabis sativa
tagattccataattccatatattccatatatatgattagcgcttcaattgcactatcatgttcccaagatgtaaatattgagccaatctaattgattagctttaacaaacaggtcaaagaacacatgtactacattaaagtcataacctaattaactatctcaggattgagatcattaatctaagatcaattaagtgaaatttacttagaaaagatattacgataagttaatgatatctttttcactgtggacatcggtcaagtttgatgtataactaatacatccaatacaatcttactttgctaatgacttggaaaagatattccacttattcaagtgtaagtaaaccacattgttgattatcatatcagtgtaaattcagtgcactgataaattatgagacttaatagtttaatcatataatcatgattatttttcactatgtagacaacacaataatcatgaataataatgtgatagggatttaatagaattttatattaaacatatgatcatgaaataaacatgtgaaccaagcattgcactaaataagtaataaactaacttatgttcttttattgatagtaaaattaaatattacattaaaatatgattttagttagggcactaaacccaacacaatcatcctcctcctccacagattccccttccacaagtttcagttcaccatatgtgtctcactcatcatccatatcctccac

SEQ ID NO: 77842 - DNA, 533 bp, Cannabis sativa
tacacagtgtagttacattcaattttctaagcgatgtgggaatcgcacaacttattaattacctggtttttctttttgtggatcatgagtctctgactggcgcaatcacccccttattacaaggttcaatgccctcgtcgaccacagttctgactaagttaagactttgatatattatttgtaatatttattaaagtaaaaatgccataaatgatctcatgttattgcttttattagaaaatagtttgcaaagtttgtgtacctagtttaaaacaaacgtctatatttaaagtaatgcaaaagaaactacaaagacaacatatgtttaataaatcaaaataaatttcaaaagaccacacataattacatgatctcatgagataaatctcatgttgtctaactcgccactaaacatttaaaatattatttcttgcacatggaaaacataaggagtgagctacaaaaggccaataagaaaaatagttgatctcactccttgtccattaatatgtttgaattatatgaatagtact

SEQ ID NO: 77843 - DNA, 2059 bp, Cannabis sativa
aaaaaaaaacaacaatattattatcacaatagactagtattggagaaaaaataaaattaactagttatgacttgatttgaaccagcaacttgatcttctcaaacaaggaaatcaaggttgtgtttttcagcattccaaatattaaatctttaggagctgatgggtatggatttggtcttttcaagaagctttggcttgacataggatctaaattttgctcagctgtcaaggacttcttcaacacaggtaaaatgcctcttgaactccattcgactctaatttctcttatacctaagaatgagaaccctactagagttgtggactttagacctattccttgttgctccagaatttacaagtgtatttctaaactgttatgctctagacttgctgttgtgcttcctggtttgatctatcaaaaccaaggagttttcattcaaggtaggtccatcgctcataatgtgatgattcttcaagactagaaaactataagaggaaaatagtctccccgagatgcacaatcaaaatttaaataagtaaggtttatgacactataagttggaatttttttggaggagttgcttgttgcctataatcttcctcataagtttatttagtggattatggtttgtttaagagcaacgtcttattcgatagtcatgaatggtagagtggaaggcaatttcaaaggagagaaagggttaagacaaggtgacccaatctctcttctgttgtttgttctcatcatggagtatctcacgagaagacttcaattggaagcttctaattcatcctataggttcgaaccaatgtgtaaaaggctgaaataattaacttgggcttcatagatgatttaattctgtttagcaagggttcagtaccctcgattttggttctcaaataggtgcttgatgactatagtatggtgtctgaattgcacattaatgctaacaaatctcaagtctactttggaggcatgaacactaatgacaaacagactattttaagagatttttagttggttgaaggcacattccccctcaaatatttgggagttcctcttaggccaactaaatggaaagctaaggactgtggcatcatcatcaaaaagataaaacaaaggttacatacctagtcgagcatacatctttcatttgctggtaaagtacaattgattcattctgtgttactaggccttcgaaattattggatgagcatttttgttctttcccatagtatcactaaggaggttgaaaaattatatagaggatttctttagagagcgaatggaaaaaggagtaagattcatattgcttcttgggacaaattttgccttctgaaggcatatggtggccttggatttaaagatggtgttaaatggaaccaggctattctagctaaatatgtttgagcagttttcacaaaacaagacctgctatgggttaagtgggtagataatatctacttaaaatctacatgcttctggtcttacgatctaaaactagattcgagttggtactggcgtaaactatgtcatctaaggaagaaatttgagcgaaatgagatagtgaaagctggtacattaggctggtttaaaaccaattggttgtacagtatagattggttcaaaacccaatcaattattacaaggttgtttgaagttcgttatcagtgccaaaacacagatttaccttatggcaagtgatgaatgctcatcttcttactagggacaagatgtctcagttttacattgttctaaactcgatcaaatgcccggtgtatgaggaggtggaggagactcatgagtacctattttttaactgtgttttatctcgaaaagtcctgggtttaatttttgcttggatggggtataggggtcggtcgattgcttatgctggctggtatgtttgggttgttctgacaagtcatgctcagattcatcggcttaatatcaccattttggcagcagtgatttactacatttagctcaatagaaacacatgtatttttaatagttatactagatcaatttttggaattgtaaatgatgtaaagaata

SEQ ID NO: 77844 - DNA, 1153 bp, Cannabis sativa
attttatgacaaaattaagaaacaattaataaatacaaaattcaatatgaaatgaattagttacaagtattaagatttaatgaacattttgctaaatcagataaatttaaaatataatcatagtatataaacaccttaattcactatctatgttccctacaaaaaaagagattattttacaaacacacaaaaataataaaaaaaaaattacaaaaatacgattttatagaattttaaatatttttacgatttttttgatgttatttacagaaaatacggtctttttatgttgtactcttgttcattcgttgttgattttttgttatttgtatgttattttttgttgttactttgatattatttagttgttaattccatgttccttttatgtagctttcgtgttatttttataaaaaatcgtaaaaatataaaaaaaattcttttaaaataaaaatataattttttttaaaaaaaatagtgtgatatataattattccaaaattgaaccactactcatttccatttatgtaaatttccattctaaaatcgttatttcaaaaactcataattacaattatgtaggaaatatggtagaaaatagtatggagggtaaagatacaaaatgttgagaaagtgacaagagaaggtgctaagcaacttcgtgccccaactttgttttaatttatttataatatctgatttgtttaaataaatatagtccaatttgttctccatctctccttttcataacaagaaatttagtacaccccaccatttttgtttttttttttttttgagtttaagatttgatataatttattttgacaatgtttaattgatgtaaattctacattgttttaaaaccaggtttcaagatttgttcattagttgataagtttattgggaaaaaagaaattccatgatagacaatctaaatccatcaaactttatttaaaactcaacgaaataagtcgaccactattgttgagagaaaatgaaatgtaattgtcagaatttctttttcgagtaaatcatatttgaattttgtttggacaatttgttgaaagtactttctcataaataccatctctcaaaatttttgtccatttacaaaaaaagcaaaagaagtatttatgaaacggatttttatttt

SEQ ID NO: 77845 - DNA, 1521 bp, Cannabis sativa
tgtcttcctccctcgattgaagggttcccgtttcctgggattggtgtgtttcatcctcctccatggaagaactgttggcgaagacccataacctccaagtcactgacgatgaggaatgggaaattgataagagcctctcgattacgattgcaaaatgcaatttacggggaagactgtgtactacgacggagcatagccggagtttcttaaagaaagttctgggaggcatttggcgattaaaggaagcggaatggaatctcaaaatcaaggaaaaatacgaatcaggtcttttcttgacttttacttttgcatcagaatccattcaaaacagaattctaactaaaatgccttggtatttatcaaatggagtgcttattctggggaagatggagaattccaatgaatcttggaataatgacttgattaatttcccaatttggggaagggctttgggagtgccgatcgatctgctcacaacaaacaacacacgaagaatggcggcaaaaacaggggaggttatcacagtgaacaattcagacatttcaaagatggtggcagatgggttcttccgatttcgggtttggatgtcaatcaaaaagccagtttgcccggggttctcactctcgtttgctggcaaaaagttgtggatagcctttaagtatgatgaactcccatatatgtgtttcaaatgtgggatgattggccattgttacaaagaatgtcatcaagaaccggttactatggaaggggaaggaaatgaggttgtaaatgcttacgggacttggctgaaaagtgaaagcagttgtcgagatggatttcaggggctccaacttagtatggacaatcaaaagcttcaaggggatcacactactaagaaagcaatgggggtaacacatgatacggtaattcacaattcatttgggccactggaagacacactcaaaggggtcgacaaaatgatcgctgatcttgaaagccaacaagaatccatggcaaccatcaaggaaggggggaaaatacaaatgatacaagccaaagacaagacttcaagtgacaaggttcaagagagagaaagtgtaacatgggatgataatggaagaggcaagagaagaatggtagacaatatggagtttactggctatgaaaaaacgaaaaaatccaacactgcaatggccacaactataccagaaaacaacctattcaatgtacctatatcctattctatggaagctcaaaatttagaaggctcggcatcctttgtggtgggaagtaattcaaaagaaatgtccaaggaaaatagaaggaaggtttcggtgaagaaagactccaaagcaaagaaaggaaaggtcgagggtaaagtggatggtacttctcaaatgggggatttggcaaccactaagaatacggaagaggcgcaccctgagattcagggtcgccttcaacaatgaatatcctaatttggaacgcccaagggttggggaacccttggacgcagcgttccttattttccctggtgctgcg

SEQ ID NO: 77846 - DNA, 1145 bp, Cannabis sativa
cctagtagcttgaaggctgcatgcactaacttggtaggttgaaggctaaacacacgaacctgacaagttggtaggttgtaggcgttaagcatggaggtttgcaggccagaagcactaagctataggttggcagggtgtaggcactaacctcgctagtaggcaagtggcatgcacaaacttgggaggttagatacaagctattctccacgtgtcttataacaaacaaaaaagcgacatatttgagaactgatgaacaaccatactagagtaaagaatgtaactaagtgatgtcattatatcccttatgctcaaaaaatacatgtttgggaaatttctttcacttagccagtgtctaggttaacgccaggatgttaacttgtgcattagatatcaacgtgggcactaagagctgaacaacattcagtgaaacagccataactccatcaatatttatttgattgttgcgattaaccttaagtatcaaagctatttcaaatgtctattaagtcatgtctcatacccatattgcaattctgaaatttgtgccgatgatagttacgattttttccacaaatctccgaaaaatgatttgacgaatgaaattcaaactccaaaaattaacaattttcatctagagtcaattttcactgttagatcatcatcaatggccaagaccaacatatattgatttttcatatttgttatttattctatgaatatttctgttacccgtgtttttgtgcaagtgacatgtggcatataacagaagagaataaattcataatcccactaattaaaatcccccacagaaggcctagtcatggagaagcctcacagatacaacaagaagtgaagattaagagataatcagaagtccacaatgccttatcttagcttccaagactgggaagacatattggctcttagactttgaagggtccaaatatgaaagcctatccaactgatacctgaatgggtactcgaagggcctatcgcggatatcgatcggttgagagttcatagatgtctacctttggtacaatctggagcacccaatgacaattatgctttttctgacacaagatcaaatcttgtcccctgtgtctaggcatggaagtgtgcgcacctcatccacctttttgcca

SEQ ID NO: 77847 - DNA, 1210 bp, Cannabis sativa
tttaaaatataaaatgggtatctaacaatttctatattgatgtagttaagtatcaaattttatataatttaaaataacttttaaaaaatatcatttatcggtgtagaaagtatagcaatactctgattttaaatataataacaaattaattgtaactaaaccaaaggtgttggataactatattttgtcaatatataggttgagtttattacaactctcactttttaaaaaagaaaatgcaaaaaatatattgaagggcgtattcaaataactatattttgttaataatttggctcctatggattcttgttaacatgtacttgaaggcaatgcttgtgatttttttttttttttttcttttggctacgtgtggtggcttacagttttttttttttttttctttgtaaatgtcaattatcaatacatctagaagagtgtatatcattttactgaattggtgtaaaataatcttcactcaatttcagttcatgtgatataacaaattagtgtgcacctagtattattttaaatctacaaagaaattggtacacaattttttctttcattctagcattcttttaatttgttttaaatatgatcattaattaatttttaaccatatgcataattatatcgtaggatctttaaagaaaaatattttcattaatttcataattcttgtgatatttagcgttgaatcattgaaattattgttccaaaattaataaattctgcactaaattggtgaagtacatatatattcacctaaaaaaaaaaattatgtttcacatatatatatttgatttttttttttttttgaaacagttcacatatttgaatttagattaaaatgtgttatatttgctacaaaataacacccatactcatatgctaggggtgtttattagatcacatccgatgtttttaggcatatccagatccgatccaattatatattggatgttggattttaccatctgatccgatctaattgatttcaatcttccaatcgatccaattatatattggatgttggattagatcggttctatctgttggttgtattttatattatatttattggtttaatttgaatatattcaaattttcaactagtatttttggaggatccaatattttaggtccaatatgtattggatcagattagatccatccaatccaagaaaaaaagagtaaaattttaatttta

SEQ ID NO: 77848 - DNA, 1378 bp, Cannabis sativa
atggagaacaatgcatatatattaatcatatatttatgatatgatattaattgtatatattcatatagaaaatatatatgcacacaatttatatatatatatatataaataagatctataacatatatatagttatacatacctttcgggcaagggatatgtttgaatcggtgagagtttcctggcattcgaaaagggcaattatatataaatgaatcacagatgtaatatatatatatatatatatatatatatggaaattaataaccactactatgtataactctactagtttaaactactgcaagagagtttttctttagttttatgcagaagatatatagatgtacaatatattatctcttaagtaaaactgtctttatataatggatctatctagctagagagaaaagtagtacattataattgcttctaattgttaatgaagttcttaataatataaggtaaatgtatagaaagtcaaatatatagtaccgtaagataagtaatatgaattccatgatatttgtataattagaagcaaccataaatgactagtctttattataagatataatttatacattctaataaccagcagtatatataattataataataataataattaattaacctgtggaaacaattctaagcagaatgtttcacgctggaatattcatgagctatatatataaaaaaatatatactctcaatcggttatcaaccgaaataattatattttagttacaatttcaaactataattttaaaaaattaattaattataagtatgcaacttaacattaaggaaataagagacttggaaaaatgatcataatcaaaatgaagattagaagatatcttaactatatgtctttgaaaatgaatggactagcttaactttgcaccattgcataagggtatgttattcctattttttgcagcttggatatgtaatgagaaatgttaagtactgccggtttcaaatgtgtatttatgtaaagatggtattaagcatttttagatatgctcatttaagccttaatagattttagtagatttttgaattattatttgtgttttgttgttattactttgaataataataataataataataataatgataataataacaataattacatctatatcacagcgtgattcggagtatgggcgattggcaccgatcccaaatgcttggcaggccactcaccataagcagggcaaaggatgggtgactgatatagatagagagacatgggtatgttttaaacaaatattatctttatattttttgtctaaataaattttataattaatttaaatattattgtttaataggaaaaaaagattgccgtacgtgagacacaaca

SEQ ID NO: 77849 - DNA, 1095 bp, Cannabis sativa
agagtaaaatattgtataaggcttatattttactcaatgctccattattaatatgacaaattttataaacctatattttatcaaaatatatatatagtcatataaaagtcttctcttacaaatttacattttgcttagcaattaatattcataatatataaaaaatcttatatgtggaagcaaaattaatatttgaatcttgtgatataaattattgtataggattcaaaaaagaaaatttgagggttcaagtcaacaccattggcatcctaacaattagtggtgaaaacactattaataatactcatgttgacaacaatattggtaccaaaaaaattcgttttcgcaaagaaatcaaaattgaaaaagagtgcaaaacagatcaaattcgagctaaatttaccaaaaacattctctacataacaattccaaagatctttccaataaataatgataataatataacactagcaccaccacgagctgacaaacctgatcaaacgatcaacaaaggaagcgggatagaatcaatacgagattgttcgagcccgttgggagaatatggtatgattggcaaaaatgtagctttgggagttgctgtggtggttgttgttggtattattgttgggggtttctttgtatggaattggacttcaaaaccacctattctaatatattgattatcatcattatcataattataacatgttaagtttgtttgatatttgaataattgtgttgattaattataatgtttctaataaataattgaatgtatatactttaccaacatatttctaattattgattgtttttcattcaatgttacaagttctcactatgattttatttacccaagtgggcagtggaggtgtgttagtgtgagccatatataaaaccaaaatagtttaattattttgttagaaattagattaattgatcttaacaataaaatgaaacccattaacaatatctggtcattgttagtgtagtaagtgtaataaaaattttggtttaatgatattttttttttatttttttatgttaactttaatactattgatagaatatttttttcttaattttataatatta

SEQ ID NO: 77850 - DNA, 1526 bp, Cannabis sativa
tttagctagacgttcttctagcccatgttgtggcccaagaagaatgtttacatctactactaattgttgaccaatgacttagtaagctctcttgattagtatggtggcctgcctaaaatggttttcaatttttgcttgctagactctcatgatttccatctctcaatcttgccattctttgaactggcatctttgttccgtaaggcaaactttatagtcactcaagtatcttactgatcatgataaagagtgttattgtggccttgtatttgccttagtgcagcacaaaagttctatagctcggtgtcatcaccgattggcctttgagagtttgtagcagatggaatctcagtactggggatggtttgctcggttcgagtacttgtagttctagtttcttgcacgcttggagtgaaccagccagaggggtagtcactcattgacctacaatttatgggcctgttggtggttaaaaattagtcagagtaggatctgtcgttgttggatctctggggtttgcaggtgtgtgcacatttggatccatggccattggatctattgtatcaatctgatttcccctttgcatttgcacaactattatgtgtcctgaaaaagaattaaaacaaaaacttgtgtgtctttgctctcaatgaaagcactaaaatgttgacctcgctgttaatcaatgaccaagagtcaaattaaagcaattaagattaattgaataactaaacataaataatataaagaaaagaaaacaccagatctatagaggttcgactctttattaatggtaatagcctaattccctttagttgcattgacttatgagaagatgaatacggaagccttgatctctctcttaagctcttacaacgatctctgagtattttgctcttagatcaaagtttctctcttgagtgttctctctttgaaaataatttgtgtccctggatagtgagatgaatccactatttacagggatgaattaaattggtttcctaaaactaataagaaataaaatgggaaactggtttaatttctataattacaataagcaaaatagaaacttggcagatttcctttcttctctagagatacgaatctatctaatgaatttagggatagtatcatgacttgcaagcttgagattacatgagatatatctttgaaattgctaatttgcattccccagtaagtgcatgcaagccacctgcttgatagaagttggtccgatgtcttcatgtactctactcggatgccacaacttttgtctttgaccttgagagtcaactcttctatacggcctactaagagtagaactgtccatctaggttatgaaatgtgttccagatgtcacctagaatgatgccacatcaccttgaagaaatttggataacattacagtacataacaatactaataattcaattatttgtctagtaagacaaagtattctcgatacttataaagtatccatcaaccctcattttcaacaagtaaactaatgtcactatcgttgccta

SEQ ID NO: 77851 - DNA, 2885 bp, Cannabis sativa
  modified_base (2590)..(2606): a, c, t, g, unknown or other
tcaaattgtccctagcaatggcaatatataatggattttttaaaatacatatattatacatttgtatggaaatagctaatgaggataccaagtatgcataccccccactcccatgatcaccaaaaaactaggctcccgagatcagaaaactataacaattgctatgtaagtacccaaaagtttcgaaaacttgcagttttttcttgcaagcaaactagatcatttgagctatctctctcaggtcaaattgaaagtaaaagataatttaaaccaaggaattgacttaatatgggacaaaaagtcttcaataactcggtaaaaggttatggtcatccaaaaagtaggctaggctagtttaggctagggtttacacatagatataatatccaccaacctgcagttaacctttttacaatgcttttttttttatggttctgaatgtatttccatgttgagcatgtcatgtataccaaccatataatgacaataataagaataagaaagatatatttgttttctgatgtcaatgatttcttttttcatagcttgttctttcaaaattaacacaccctaccacctaaacctaccatagaacactcctacataacactcatttaagatatgtatgaaatattttaacttctcagtgtttggtaggagcgaaaagtaatagaaaaattattggataaatttggacaaaactttttgtccaattaaagggattaatttcgggggattaagcgggaaacatcatcccctaatggagaatattgtcccacatagattaaatgtaaaagtacttagccatatataagaacatgggctacttcactcatcaccaattggtttcaagatggaattccacgattctcattataatatcagagctatattggaacattattccttaaatgtaaaagtattgagccatatatataagtacatgggctacttcactcatcaccaattagttttgagatggaaccccataattctcatcatctccccatcattactctccctctcattttccctcttaccaaacaatagatttttgcgctcattcgacccttgtttctcttatcatctacatcattctaaagaccactaaacctttccaaattggagatattttaagagggaattgtccacttaaattgtagagtggtcattaacaataaaaaaatttatccttcctcctaccaaacaagggagatgattttgatattctcttctcataccaaacacaataagagaagagaagagaagatagcatattgcatctcattcctttctaccaaaaaccaattaacagttttatgttctaattaaccaactgttggaattatatttcttagcagctttttatcctagatgagtggatttgtaaccacaaatcaacagcatgaaaagttgacataactgatcacaatttttgtaactctttagccgtttttcagatgaagttgagaaccaaaaactaactgctgactgtattagtttacaaatagtcataagattatcttatagaagtagtaaaaagtctacctttagccttaaaatacatgcacctgtctaactaggattttactattgtaacttataccttaaactatgctaacacctagaaaaatgatcaaacatgaactgtatctagtcattaagtcatgaaaaggtatcaataaatttagaatccaaatgtaaccttcctaatcaaagagcttagatggctatgtaagcattcaatttgttaactttccactaaataaataattagagtcgtacacttacctttcatatacataaatatatatttatatacatatatatttggtatgtactttgatgaatcgattcccactgatgatctcttcaatatattcattaccaatattatcttttctgctcaatctacatcacatgtcaattttatcactggttttttctagagaagcctgatatgtgtatgtgtgtatataaatatatgtatatagatataccaccccccttttttggcttttcttttttctttaaacaatgtcttgatattgcaatttatcatgtttgagtataataatagtattattactaatacaagacaaaatagtgtatttaaaaagagaaagaaaaaatggtattttataaaactaggggtgatgttaaaacaagttaacatcaaactacagagaggtagacaatggtgtaggcatgacatctatgaagatggggtccatctgagcccaaaagtgaaaaaataagaagaagaattatgcatttatatgatggaaactgttaaacaatatgaaagagtaagaagagaaatacaatttatgcacaattcaattctttaggaagtatgagaagctagtttattgataggtcataagagcaagaacaaatacaaaatcccaagttatttgagaaactttggagtttgtttggctgtgtttttagttttcagtttttaaaattgtgtttttaaaattgagaatagaaaacagttttttgtcattttaaaaatttaatggtgtttgatacaaattttttaaaattatttttagatttttttcttactaaaaaaattaatatnnnnnnnnnnnnnnnnnacatgaacccatccgggttcgagtttgggtatggttttgggtctaggatcgagtatgcaagtaaaaatataaaatataatatgttaaacaaaaaaaaattatttttgaaaattgaaaacaacattttgatgttttctgttttctattttaaaaatttttttaaaaaaattttgccaaacgacctctattaatttttaaaaactgttttcagttttaaaaaatagaaaacagtttttaagttttgaagccaaataatcttggtaactccttgagtaatat

SEQ ID NO: 77852 - DNA, 575 bp, Cannabis sativa
  modified_base (523)..(529): a, c, t, g, unknown or other
tatttgttttttattcattatgttatagtttcggttctatttttagttatatctgagacatctacttctggtgactttttcagtgacttttatagccacggtgactttttcggcgatggaggcaataacttttttgatgacttttttgggaccgacgactttttcggcaacttttccgatgaaacttattattgtttttaaaataaggaatttttactttttttttttatataaaaatatggcataaaaagcccatataaatataaaaagaaaatccataattccatgatattatttatgccataaaaaagtgaattatactatatttttccatatttattaaaaaaccccaatctaacatctaatcatagttggatcagatcaaatgttaattttgaaaatctaattagatcggattagttgtttgttggatgagacatccaatccaataaacaattgaaccgaaccgattcatttatcatccaattatatttatatattttaaaatacatttataattttnnnnnnntaatatattttatttaaaaaataatatattaattgattttattctt

SEQ ID NO: 77853 - DNA, 826 bp, Cannabis sativa
ttcttggtccttatccaaacatgaatctgtccaaatttgttaaggacctctcgccgtgccagtgatttacagtgagtttgttgtttgaattttattctttttctattgttaattgaactttttttgccatcgaattacaatatacgaagtttttcaattgtggctatggcaactttgtgggttttgtttaatttggtgaagttcttaactctattgcttctttttttattgtggtcgtgccattgttgcgttcattggagatcgtccacctccctccccgacgttttcttcgttctccggcgtctctctcacctctggaggcttggttctccggtgtctctctcacctcctccatcgacagcactggatttcaagctgaagccatgatcaaccacaagcatcctcaacttgtcgacgacaattccgatctcatgccttcagccacttcgatcgcaggttaagactttattttttgacttttcctcctttccaattatgctatgtttagctcttgatatttttccaaatcaaaaacctaccctgtatattgtgaatttggttgtttctatctcaattttaggaacaattagttttgattgctctaactacttagtctttttattttcttattccatttgatattaagagaagttcaatcgaatgggtatatatatatatatatgtatgtgtatgtgtatatgtagtgcctcttcatctaggtcacgacaactctcactctcaaaatatctggttccaaataggtaaatttcacacaaagacttttaggcattcttgcaattttatcgctcacaccagcttgttgaga

SEQ ID NO: 77854 - DNA, 851 bp, Cannabis sativa
cgtagattacgaaagcccattccatctttagttttatttctactctttctttcccaactcatccaataaatactgtcaccatgaaaaaaatttgaatactaccaaaacatactcataattctctctaaatttaaagacatattaattgggtgcaagaaaatacttatggagcagaagaagacatttaactaacgagcaatgctacacattttgacaaattatcatgaattagtatcttgaatgatgtgacaatgcttacattcaaaatattcacccaaaaagttgaaacataaattaataaaataataaattgtaacatgacatgacatgtcattcatgatataatatgatagattttcataattatatcattttccttaactaatacgattttttaggggatttttatagaaaaataaaatttacttttacatggtataaaaaaatgtaaaaggatatgagactaaaaaaataaataaagtttaaaatatgataaataaaaaaaaacataaataaagttgataaaatttttaagaacaaatatcgcaggataacattttggagcaaacattgttgctgaaaaagtcatcggagcagataaagtttctggagtagacatctttgccagcaaaaggtcaccggagtagcaatcgtcgccagaaggttaccgaaattgtcatcgttgtcgaaaaattcatcagagttgtcattgtcattaaaaaagtcatgaaaaaatttgtcgtcaccggagttagatgtgtgagttgaacactagaatatatgataaagaaattggttacatttatcaacaagttaaaattatgagacaaactttacaaaaaaaaaaaaat

SEQ ID NO: 77855 - DNA, 535 bp, Cannabis sativa
gggacccggagccttgtcaactccaattgaacaaagagctcgaaaaacttcatcttcatttggcataatattcagatccccgtccaggtgagaaaaagttatgatatggtgccactcatctggcttcaaactagtaggagattgtgaattggagaatatgttggagaatttgttgataaatagctatgcaatatcctcaatctgttcaaaaaccttccctgactcatctttcaaagattgaatgtaattaaatcttcttctagttatcgtattggccatgaaaaattttgtatctcgatttccatctttcagccaagccaccctccatttttggcgccagaaaatttcttctcaggccaatgctttgttcagaccggctctggtagaagtatgagccaactcatcaaaggaggaagtttcttcagtctgggtaagtatgactcgagcttctgcaatttgaactaagagctttctgaactgagttttattcctccttaagagctgatctttcgtgtgtatgagcttacgatacata

SEQ ID NO: 77856 - DNA, 664 bp, Cannabis sativa
aggtgctaataaattcactacaattgcgagtagagatccagtctttatggcggaaagtctcaagagacaaagtgctgctgtaagtctactatcttttgtataagctatatcttctaagtctttttgcttatactttattattatgtattttctatttcaaacaagtctaatagcagagatgtgctcttctttggtcaacaaattggcttatgaagttgaagcgttgaatgcataatgtgataattccgagcaattaaaagaagaagtagtcaattctttgaatgatgctaaatctcgagcagaggctatagtcaagcaaagagttgaggtgtccctcaatgacataatttacaattacaaagcttttgccaaggcgaagaaggatggcgctgagatatgtaaaaagtcttacaccaagacaaattcacacatttttggattggaggaaaagtttgctgatgctcatgttgaagtcaaagagctagagcaaaaatcagaaactacttctaaagactacagtactcagactgaggcccttaatgacaagatcgctgcaatcgccaatttagagaagaaaataaagcatcatcaagatatccagcaacaggctaaacttttgaacaggcgtgttgacctcaaaaagtgatcaattgacagtggggtc

SEQ ID NO: 77857 - DNA, 782 bp, Cannabis sativa
tatttttgtaagttttcttaaaaaatttagaaattatcttatatattattttttttaaaatttatggtttaggtttctaaattgatattgcgatttaggttgctccgctaattacaataaagtttttagtaaaaatacaaaagcaaaaaaaattagtttaaaatgtaaaattgaaaaaacccgaaaaagatttcacaaattattttgactagattttgagttaaaagatttataactatatagctttgagttttgagcaatgccagtagtggatttttttcttatttaaatttgttttttttttcttattgacaaaatatatgttggagtaaagccgcccgttatgactcaatcaaagtattacttcttattattattctagaacaaatgtgtaaaaataataacggatcgaccgttcgatgtgattggagattaagtttctagataattaagtaatttaattattattttatactatacatacactatatatatatatatatatatgctaactatattgataattttttttttcctcagcgactatgtatattaataaattttggttcaaggttaatatatattatacatttagtgaatgatagaagaaatttaaagatactgtaagtttaaatttatcatgatgatgacaataattagtttatttaatttttttaaatttttttgcatggaaaatatttattataaaaatttaaatgttttatttataaaaattataattataagctcacatagctagtcaagcgtaatacttcatggtc

SEQ ID NO: 77858 - DNA, 620 bp, Cannabis sativa
ggattagtatcatgtggaagccaaggatcaccaatgatattatattaacaatactgacaaatgcaatacttactctagcacaagctttaattgtatcttgagactcgtgaatgcttcgccaaacaaaacttggattattaccaagttcagcagaaaaaaaacaaatttttgggtagtacctcgttttataaatacgactaaacaaagaatattatcatccaacaacaaacgccaaccttgtttccctaataaagcaagattatagtcatgaagattttaaaagccaagaccgccagcgttcttgtgattataaaacctattctagcttatccagctgaccccacaggaactaaaaaacttagaattctaccaatacttagccattattttaaaatctcccttcccaggtgagtattcatttttgcattttatcctttaagaaacttaaaatagcagtcttattttggcccattgtacaagaaaagccaagatgaagttgttattatccacctcagccataccaagtaacccacaaactctatgtcgagtgtcatgtgggagtattagaactaaagaaaatagagtattagaggcaccctcaaataaatccagtaagcgaa

SEQ ID NO: 77859 - DNA, 528 bp, Cannabis sativa
gttgcaattgttcaggtattttgaaatacatctacactaatttaaagctatacccttttttgtttttttgaacacaaatctatacccttttcagtgtcataaaatatcattcaatttatgtttttatatgtttaagacctatgataaattctgttttgatgtgattattgattatacaaccatgcctaattagtgaaagagctatttacaaagatactgcaaaaaataggttggtttttatatttacggatatcaaatttatgccataatatttagtgtaattttgggagagaaagaattaaaaataggaaatacaaaccccaacaaaagtttgaaaggtctgtgagaagagttgaatctcctagacattgaagcttcaaatcaagcaaaacaataatacacagtaaaggaaatctaagaatagagaaaagagagaaaagagagaaaaaataagattgaagaagatgaaagatattatgaaatagctcagttgttattgatcacagttgtactgtatttatacaagag

SEQ ID NO: 77860 - DNA, 686 bp, Cannabis sativa
tttatattatatttgaccatatgtttatatgagaagaacaattaagtggcgtgtattatgctcttaattgtgtggtccaagttaaatttttatataatttatatgtagtttagtggagattatttaagtagttctaatcaatataattttattttatttctaatggcaaattaaattaccacttagtctgttaagcacactaccttgttaaattgttatattgtaatgtattgaataatattgttttagtttggagtctgattgcaactgatttgttgcctagtttggtaataaagatggtgatttaataaagttattattttcattcaaaaaaaaaaaaatattgttttagtttttattctactgtattatataatattatatttgatattaacttgttttaataatttgtataaaattaagatattcttataacctgaccttgaccacgcctgaccgtcaaactctgaactcaaaaaccttggagtccaatcttgagcttgacccagaaccaaatcctgtaccttaaaatggatccgatcccgttttctgaccttgacctcgaccattactaaatattataatacaagctaatatagagcatttctaatggttaaatattatgattcatatatattgtattagaaattattacgatcataaattttagagaaacttacaaaaat

SEQ ID NO: 77861 - DNA, 808 bp, Cannabis sativa
aaattggggactataagtgaaaaataaaaagaaaaaatgttgatttttttattattctattataaatttgttataccatggtgttcccatgcttatcaatttattattatgtggagccttaatataaaatcctcttggatttggactctccccaaaatagtcaacaatagttccattccatgtgctcttcaattaaccctaaacttaaataatgaatgggtcctatggagagagagagagagagacttacatgctaagcattaactactaataattaaaaatgaataaattgagaaaattgagtttgagtgatcaaacattattattacaacaccaaacttataattaagattggttttttagtgttcacaaagggacatcatatattatttatgtaacattgttttctagtgttttgcattacatgagtgatgattgtttgaaaaaagtgcatgcataacaatgtaatgtacaacataagttctttaagagaatcccaataaaaatgaaaaagaaaggtaacaaagaagaaaaatatgcataggaaaagaatgaagataagttgagtttacaattttcttaggaaaataaaatgtcatgtttgtcttcttctttttcactttgttttttagttgaatcattaagcctctcattttcttttattttattttcttttcttacataagctttaccactttattatccttgcattttactcaatttaaacaagtacctttttagatcataccataaactttaacatatttatagacatcgatagagcgagctattacgtttctatattctc

SEQ ID NO: 77862 - DNA, 1700 bp, Cannabis sativa
cataaggtgagagtatctctctttagaaatataaagcttttgccttagtcaattttcttgtatcctcatgagcaataaaaactcaaaatagacatactccattaccgccgcgacataagaagtgaactattattaatcttgtgtgtctctcttatttactttatttaacttctatttctgttcgtcaatctagcgaccaagtgttaactagttttctgcgtcaataccctcttcaaggataactatattatcaaaggaataatattttatggttaaaaaaaaaaaaaatcctcaaaacaaacaaaataatattttatattataattcttttgttagcattaactcattttaaacaattccttaaagttttgaaaaaatctgaagtagacccctaagaggattttatggtagacaccctaataatatattctagttggttggaatttgggaaggagggtatgttttgataagatttttactgttttttttttttttaatcaaagtgtgttttttttatttaaataaaatagcattggttcatcttcttcctagtgctcgtaatgttggaaaaacttggtttagtaatctaatcaccagtttgcttcattttcatcctagtgagtgctcattttttttttgataatcctagtgagtgctcattagtttgcctagctagctagaactttcattctcggtataccatcattgtatagtagtattaataatcattcttgaattaatgcttacctagatttacatttctaaatttcaaacttccaatatataaatctttttctcaattttcttttttcagttccaaattatttttactcgaatgaggccctaggaaaaagaaattcttaagcttattaatttgactcatcaacattgggttcatttctatgaatttatttattttttgagaggatgtatgtgattctaattcaatacttagaacctttattccatttatatatactaactcagtgaaaaaattgcaaaaaataaatatattaccctacatagcactcccaccaaaacaaaacattgatgtgtcatctccatatgtgcaatttataatttaaaaatttatgttcttattaactctcaataaataatattaaattttcttattatttaaattaatttttattcctttttttctaaaaaaaaattatttaaattaaacacgtgtccgcttaaattttaatagcacttcattatgattttgagagacttttaaggactattattggttttgatcgcaatgtgtgtgagtgcaacgtaggcatatataaaaactttaatgcattttagaactaatatttattagaaaaatcacattttagaaattaatactaaaatagatattgcatcttggcctgtttgagtttttcacaaaagggtttccaaactaatcttttcttccaaaaagattgttggatgcccattttgaatctaaatacataagaaagtgagttacacaaaattactcacatttctctcttggcatataggatatcaccaaaacaagctcaacattttgtaggagaggaacataataaatatatgagaaatactatgttgggttacttggatatcaatctaacccaagtcctatatcaaaaaagataaaaaaaataaaaaaataaataaagagaaacttacaaaaatactggaatttgggttaagttttacaa

SEQ ID NO: 77863 - DNA, 781 bp, Cannabis sativa
gtccttgatatggaatatctagctctaattctcaattaagtctctcaaaaaaacggtttaaagtttcttcatcgttgccattctttaaaattgacctatttaagctttgtagatgattcttttgttctttaaaggatatctgccttctataatgcttcttcttaaaagctttaagagattttcaaaaactttaggtctccaagcgaatgcctctaaggctgaaatgttatgttcaggattgagtgatcaggatgttaatcaagtgttaaatgattcaagtttcaaacaaagttagctccccttttgctatctaggagtcccaatttactcaaaaatagtatctaatactgattgtgaagtccttatggaaatgatggtgcaccgtattgaaacttgaagctctagacacctctcatatgtaggtcatgtggtacttgtagttattcattcgtattggtctcaagtcatgattctttagaagataatgctgaagaaaattgatcaaatttgtagggtggatatttggagtggagttgttgatgctagagggttggagtatatcaaatgcattgatgcgtgcaaaccaaaaaaggaaggaggtttgtgtttcaagaacattgaagaatggaacaaaggaacaattggtaagcatgtgtcaatcttggcaagaaaaaagaaaaacctttgggtgaagtgaatccatccattaatgactgaggattggtgggagtacaatactacctcaatttgtagttggtattggaagataatgattcaagtc

SEQ ID NO: 77864 - DNA, 576 bp, Cannabis sativa
ttgtttctattattatatatttgaatctctctcaataggtgaacataaatcggatatacaagaaggttgccatcgacaagaatcaaatgaagaagataactccaaattttcatcaatgaaaggaggctttgttggtgttggcaattcagaatcattttgtttaagcatttgaattaccattgccatgttaggacgtaaagatggtacttcttgtgtgcacaataatcccacttgaacaactctttcaacttcctcaaagtcttcttctgctaagcttttttctatgatctctgacactgtatttgattggtagtgtttccatacctatacacataaaaaacaaaatacaaattatgcatatttattgattaattaataagataagaggggaataaataacatatattttacatacatgagccactagagtttcaaaagtgtcatgggatctcaattggttgttcctcacaccactaactatctccaacacaagaactccaaagctataaacatcaaccttttcagttaatcttccttgtgctaagtattcaggagctaagtaaccactgcatacat

SEQ ID NO: 77865 - DNA, 5622 bp, Cannabis sativa
tccctgaagttcattctgtaatttcttaagggtgtcaggctacatgatggtagataaactggtagtaccacgtaggaaagtaaaaaagaactggtatgtgggtcttgatccagagccagtggatcgttctcatccagatgttcacgatgaccaaatcgttctggagtctgagttggaaaaatcagtgcaccgtaagttcttcccccttatgtatatactttctattgttgactttgcttctttctcttctcatcatcaattaggagacttttcagttttcaagataagtataagcctgtcatgaaaatttactctcctatgtattgagggaaagaaaagtatatctcgcgatagcaactcatttcacctgaaatttctggttacatttgtagaaaaaagtggaaataatacaaaccattcagatacgatttcaacagaggatgaaagaaaattgaacggaagccaaataggaatagacatcaagctacgtgctagtggaaatgattcttctgtaaacataagttcagttggaactgaaactaatggaagccaaataggaatagacatcaagcaacctgctagtgtaaatgattcttctgtaaagataagttcagtaggaactgaaattaatggaacaagcactgggagacggcttttagacgataacaattccaaaggatcacaagagtctgaatccaaaagcactagtaaagaggatactcctgttgtaactgttgaaaatgaaggaggattggaagcagatgctgattcatcgttcgagctgttacgtgatagcgatgagctggctgatgagtacaattatgactatgatgattatgttgatgagacaatgtggggagatgaggagtggaaggaggggcaacatgagaaactggaggattatgtgaatgttgactcacatatcctgtgtactcctgtaagatacaaatttatgtattgcttatatatgtttgcatgtgttttgcaagtagactattgatggaggcaagtcaacagaatttcatttttcatattttatcaggtcatagcagatattgataaagatggaatacctgaaatggttgttgctgtttctcacttcttcgatcatgagtaagtttctttccattattgtattttttcttttcatatattattttaactgaattgacacgttgataatgaaaagtttctctttcagctacctgaaaattactgttaaacaattttttaggtatatagtctgtctaatgtgttaatattaattgttgattttgctttatttgtcatgtttgtttgacatagtctcgttattgttactctatgatggaaattgagttaatcctagagtttcagacgatgcatgggcatttattgcaggaatggcatttcacaaaaagaaaaaaaaatatgttctgtcctttttgcttgttgttttgaccttatttgtggccggagccttgtgggattatctcactaactcattttgtcatcttgttgatatgataataatttgatgaaatcgttttcttctttagtggtaatcaagcccataaaacaaaacaaagtaccatggttttgacaagattgacttaaagcaatgaattgacaggtattatggaaactcagagaacatgaaggagttgggcgacattgatattggaaaatatgtagctagttcgattgttgttttcaatcttgatactaaagaagtaaagtggacagctgaactagatctgagtacagattctgcaaactaccgtgcctacatatattcttctcctaccgttgctgatttggatggtgatgggtacttggatatccttgttgggacttcctatggcttgttctatgtcttggatcatcatggtaagtcctcctctagaataatgtatgtggacgtattattatattcctttgtttgcatggtttttgttgttatgcaatgctatttctagtgcattacctggcatagattctacaacactattaaaggatattaaggaatagtatatattttcaatataaacataaagaattgtcaattggttccatgtacttgcttttgtattcgatataaacttagaggacttacccatccctgccacttcccatgaactatgcatgcaagaaatttagtagatgaattgagctccctcttcccttgcttgtgtttatgttagtaaataactttaagttgatgattcaagtctatatttctgttgctacaaaccacgatattttttggttgattaacgaatctgttatatgctctctttgtggtctggtgcattattctgtggagaatatgggtgatggcttgttacactgagagcatatactgccctttttagctttccttttctattgctttcctgaaaatatgtgccttattacttcaccctataggaaacatatatattgttttgtatgtggttggagaaactgagaatttgggagttttagtttatttaacaggattaattttcgtagttttattttttcctgaggagcactaattttgtttcatgacatttcagggaacgtcaggagaaagtttcctcttgaaatggctgaaattcatggaggtgttgttgcagctgatatcaatgacgatggaaagattgaactagtgactactgatacacatgggaatgttgctgcgtggactgtacacggggaagagatttgggaaacacatgttaagagtttggttccgcaggtaaaatttgaatctcgataccttattttttaacatacagaattgcaaattctttgttgcaacttgcaattttatcatcgttttcgtacaaaatgattgtctcgtaaatctaaattcttattctctcctaatatagttgcaacataagtgctcctttattcatatcaacttaataatctgaattggaatttaaatgtgggtcttttttctgtatctggtgatgattattaaatggtgtatttttatttatttattttttatctttttcttttttaacaatatgtcaaatgtctatttgatttacttgaagaccttgcaacttcgccgttacaagtcttgaatcacatgtagctgctttaagtttctgaagagcatattgattaaaactaaaattgtgtattaagaaaccccagaggttcttcaatctcacatggtatttcctttatggtttctagatgtggagcatgtgggaacatcaatattgaaacttttatctctaaatttagtaagctctttttggtatattctacaatgtgtgaatcttaacaaaagttatattactcaggctcctactattggtgatgttgatggagatggccatactgatgtcgtggttcctacaatatccgggaatatatatgttcttagcggaagggatggatccattgttcgcccttacccatacagaactcatggaagagtgatgagccaagttcttcttgttgatttgagcaaacgtggagagaaagccaagggactttctatggttactacatcatttgatggttatttgtatctaatagacggagcaacatcatgtgcagatgtggttgatattggtgaaacatcgtaagatattattacagccattgtttctggattattattaaaattctttcaaatttcaaaagttagtctattcaaatatttttacaaacagatatagcatggtcttggcggacaatgttgatggtggagatgatctagatctaattgttacaaccatgaacggcaatgtcttttgcttctcaactccagttcctcatcacccacttaaggtaaataggtttgaagttgattcttagatacctgcttctgtatatttcttgtttatgtcctaactttgacatttcacatctttatcaggaatggaggtcatctaatcaaggtagaaataatgttgcctataggaacaaccgtgaaggtatctttatttcaccgtcgtctagagctttccgcgacgaggaaggcaggaacttctgggtggaggttgagatagtggacaaatatagatatccatctgggacacaaggaccgtacaatgtcacagtaagttgcttcttccttttgccaaattatatgaaccttatattgcaaagtaactaaactaccatttattttttctgtcattgaatcaattttcatgttagactaccttgttagtacctggtaattaccaaggagagagaagtataaggcaaagtcagattattaatagtcctggaaaacatcgtataaaacttccgacagtagcagtaagaacaacaggaactgttttggtggagatggttgacaggaatggactctacttcacagacgagttctccctcacattccatatgtactactatagattgttgaagtggctccttgtccttccgatgcttgggatgttcgctgtgcttgtcatccttcgaccacaagaggcaatgcctttgccatcgttttcgcgaaacactgacttgtaattgtaacattcaaaccctgatagaaagcttcatctcaaccaatgccgagactcggcgataaagtatttagcgctcatgagagcatcgatggctcggccacacttcagtagataatttcctaggctaaaattgtgaatggcccgagtcgaagctgcaatttggatgataggtaatcgggagttgtaacatagataattttgagttatgaactaaaggattttttggattttgagtccccatatgttttgtcagttctcatttagggattttcaatataaatcataatcatttggagggaacggatatttatactgtgaaatgttgtgttagtctatcttaatgcgcatgcacagcacacctgcactttgtttaaactaatatatttatattgtgaaatatgagaatttaccaccataatgtaacataatttgtataatttaatatcgggtaatgtatcctatcaacacttccaattaagcagttttagatttttagttcaaaaaacaaaatgggtagtttatcctttttattttcttgggacttgttaagtatgacttcgatacaacattgagtccatcataacaattatgtgatttgatatgtcatttcgaagcacaaattatgtgattgaatcacaattttcgaaaaaaaaaaagcaacttgtcatgtttacatctcttgaatacaacggtattttagcccattgaccaatgcagcaataaatagaaaagccacaactatagccataataataccctcagaatcagatgatgagaaacattattaacagattgtaagaacatttacacaataataacgataagtgttgataataacgtttcccacttgtaccattttccaattatagcagtttttcaattcaaggagtatgcatgagctatgaacagtgcatttccaacagagccttcaaccaattaagctttaccaaacctcttttaatagtttcaaattcaacacatgttctgttcctactaacttttaataactacattataaatattaaattaaccatttcaaggcaaagtataaaggctaaccagtaattttttgctttaactttcacatatactaaattgtccctctaaatttttttggccgttaaaaattcctcctgaattattgagattgtta

SEQ ID NO: 77866 - DNA, 1127 bp, Cannabis sativa
tcttcaaaatgacttatttccccaattttgatgaagacaaagaagatagaaaagtcaaatctccgatctgatacttagaaggcacttagattgacagaatgtcaactttggcgttgggtgctcagggatcggggccccaggtgtgcaaaaaatgaacttacttagattttgattctgatgcctcaaatttgtctgtggtacgtctagttgttgtctcaatacaagttttgaccattttgcactaagacagtcctgaaaactgaaactctagttggatacgtcaacctgggcgtcgggtgaaatcctaaatgtccaggttagctttcggattgcaggtttgtgtaatttcagctctcagggcttagattaggttgctcaatgtcttcatggtacataatatcaaaagttagtaagttggattcaagttattaaagtccaaacttccatcccaaagatcctgaagtcaacctaagcacaaggcctagggtcccctcccaagtcgactgctataactcaagtctactcaactctgcggcatcattctttacatgtcaaacattgatgtccacatcaccagaaaaaaaaaattgggttaacaatatgttaataatgaggcttgtttgtatgtcgaatatgctcttatgtacaatgcattcatatataagtgaattagtatggtaatattgttggagaacacttgcgctcagagacggacctatttggcaggataggggtgaggttgacaaaacaggtcagacacaataacatgactttaaatctgcacgaagattatagcaggtgcgggtttgctttaaatgagttcgagtcgtgttcgggtttacatgattaacatgaaactaacccattaataatttatttaaagttatttttaatactttaacatatcataaataggttataacgtgctaaacatgttattaatatattaatgagttgatatgtttaaacaaaaattatttataattgggttacatgatgtcgtgtcaacctattttttgtgtttagattttttttttttttttatactattatatttgggttgagcatatatacctataatatatgattttatcgacacaacacgaaagcaaatacaaattgtcact

SEQ ID NO: 77867 - DNA, 1666 bp, Cannabis sativa
aagagattgtgcaaatgtttttttctgttgtatttttacttcgccattagaaaattgttgagttcaaacaaatactaaaactcttaattttagttacaattttacgtagcaacttttaagaacttataaaacaataacacatattaaaaatataactccacattttaatatatttatagaagcattatcctacaattttatattttcttattattttatacaatgattataataagaaaattatttcaacgtctttatttgtcgtttattatatcaaaagaggttttcttttcccctttctagcagggcttacaaactatatatatatacctctattttcatgatgatgagatagaaaacattagtcagagaaaagaaagacagagaaatactatatatattaatgaaaagagagagtaatgacataccagcaatgaccgcactatcccatccttgtatcatatttccaagggttgccacaactgagattgctacagctccacccattatttcgatgatctgaataatttccttccttcctccctcccagcctaactattctattgattttggattttaagatttaaataacttatcaattgacatgataagtttttttcggatctagaatttaatccgttgttataggctacgaccactagtaaatggtggagtttatttttccttaaattggcaggaataacataattatatatttgatgatattatgataatttaatttcataatattaatctactttttatttttcaaaaattttcataattaacatttaagtctaataaatatatatattcgtacctattttggaatactgttaagatttgaattttctttaatggaaatagatcgaacttctttcttttgaagaaaagcgtaaaataatatttagaattgtcattactacactaaaaatcctaattgatgacatttagaaatgtcactgttattaatatttagttgtaataaaataatatataatatataatagataagaagatgaggacagaaagaaaaactcaatgcaatttctcaattgtttattttaataggatgaatttttatttatacaaaagtattgactaaaaaaatgagaaactaaattattgtaataaaagaaaatacaatcaaacattaatattagtgataattaatttggtaatttggacatacatatgtataatattttataatactttcccttagatgtctataataactgtctcatttaaaattttgctgaaaaaacttggtcaaaagaaaaaaaaatatagtatgaattaactcctacttatttaggcatttgcaaagatcttctaatcgacgaattttaatcttatgaatcatattctcaagtgttgatgttggcaatgactttgtgaatatgtctactagattgactcttgattgaatatgttggacaccaatatacattctattgaaatgtataaagaaaactttggtgaaatgtattttagttttatctccttcaatgtactctccttttagttgagcgttccaagcagtatcatcttcatagagtactgcttgtgtttatacttttttattgagtgtaatccatatgtttcctgaacatgttatgtcaatgatctcactcccacacatattctctacttgcttcataaa

SEQ ID NO: 77868 - DNA, 1212 bp, Cannabis sativa
aagtttcacaatttataatcaccatagtaaggaaacttagagcataaaacaagctccaacacaacaataacatgcttcaaaaccatatttaaacatgctcaacataagctcaacacatgaacaaatcttcacactaaataaactcaactgaagttgactccttatatatggctattaatggaccaaaaagatagaaaacgcacatgctgaaaaccctattcagctttggtagttgttttgatagctttcatgggctgcagcccgtgtgtggttttccatgtggggttttgatttttagataggtgggctgcgacacacccattcctaggccgcaacccgtgtaagaaacattctttgtaagaaacacccacttattaatgaagggatcagaaagagaacacaaaacattatctgtaagaaacaaccacttattaataatagagactacggtttattaatgcccgaactacgtaaaaatatatgcattaattatcgtaagctatcattattacattaaatatttggttaacgaaaacctcaattaataaagacaaataatatatattttttattttaagtctttacgaaataaaaattatagattcacactaattatcgcatatattttagtaagcaaataaataattttacctttatgagatatatattattaattcttttatttttttgtatggtatgagatatatacatatattattatatacttgtacaattaaaattatgatataagattgttaaagaaaagatgaggatatatgaattatttttcttcttaaaaagatataaaaatatttatttaaatatttttttttttcaagcataaaattaatgctaattttaaaataataattagattcctttagaaaaactcatacaattcaaatacagtttttatttacaacaataaataaataaataaataaataaagtacatttttctttatttggaatacattttcctttgttattaatacaattctccaaacaataaagaagaaagaaatttactttttcatccctgaaaattaatgatttagaaatttgagaaaagtaaagtaatttaaaaataagtttttcccctacaatactgtagaaaccggttgagaaacttgtagtgagaggtcaaataataaaaagtttacctggatctatagtaaaagaattttgtcttatgtgtgggatctcacacct

SEQ ID NO: 77869 - DNA, 654 bp, Cannabis sativa
ttattgagaatattactataattaatcatctatgcattacgtcctactatagaggaaagactggttatcatactataattgaagtgtctcttaattcatgctcacgtatttgtttaaataaactcattagaattgggatttatattattggcatcacacaattattatctcaaataattaatttcgttccacacactgaataagtgaatgggtttcggtggtagtacttgtatcagtaaaagaatctttcaagtactttattttaaattaagggtttgtttgatttcataatttaaaaactgtttttaattttaaaaaataaataccagtttttaaaaactaataagaatcgtttggtcagtttctaaaaattgagttttaaaaaactagaaaacagaaaacatcaaaatattattttcaatattcaaaaacaatttttttgtctaacatattctattttatatttttgctgagatactcggaccttagacctagaattaaacctagaccccaaccttgacccggacctcggaccccgaaccccgaacccagacccggatctcagactctgaccaggacatagacgcagacccagacaccagactcggacgaatctcgatccaaacccaaaacccggacccaaacttggatcct

SEQ ID NO: 77870 - DNA, 1408 bp, Cannabis sativa
atatgtcaaaatcagaatcaataagatatacaaaatcatgttgtttgcaaaataagaatgaaaacactaataatactttagcgttggaacattaaaaaaaaaaggtagctatattacaacttaaaatgctgtaaaattcagaaatcacaacttaaaaagattgtaatatattagctaataaaagtgaatcagtttcaatataatatatttgaacttcaaatctaaaaccttcacaacttctagttcaaaattacatttctattggagtcatgcaaaataatttcaaatttattcttttattttatagcatcataggtaggatctgtgttaaatttcagtctacctaaaagtaaattcatccaccgtagaataattgcagtcatattgtagaaggcagaagctgaataatttagagtagaccaacattttgtattcttcaaaatcaatgaaaataccttttcttttaagaaacattacttcaacaatattataatttactttataatggaaaatttatataataggacattaaaaggacataacagttcgtctcctacgcctcttcagaatttatattcctacaatcaactatggctgcctccacccgttagtacgctaaaatttaatgtggatactactttggataatgatggtcaaataatgagtattggaggttattgttagcaattctaatagtcatgtcattgctacgatttccaaaccaaataagaagttctgttacagaaattgaagcgaaggcaatctcttaccatttacaataattgagtaatattaattgtggttcattatatagagactgatgctctcactgtctcacaaagtgttaacaatcatcaacaacataatagcagatttcatgatttattcaaaatattatttatttatcaaatgtcctctttttcaagtgtctctctaagttgtgttcatcgaagtgctagttctactgcacatgattttactagattggatactgatattatttagaaggctgattatctcagccccattaaaattatcattgtaaatgaacttgttcattaatatatataactattttctctgaaaaaaataaaagtatatgatcttatagattgatgttctaatacatttctaattgaaaaatactaaaagacacccatggtgcctaacaatcttgtgagctgtaatatcactattaggttaatttaatatcgggtcccacttattttactttaataaatattataaaaaattgctaactaattataaaacgacatttcattgtgatgctaaacactatgggtgccaagtaacaatgctctttctaactaaagtataccatattactttgtttcactatttcttttaatataattaaatattgttatgttgttatactggtatagat

SEQ ID NO: 77871 - DNA, 697 bp, Cannabis sativa
  modified_base (32)..(61): a, c, t, g, unknown or other
tttagaaagttcttatttaggatgttaataannnnnnnnnnnnnnnnnnnnnnnnnnnnnntaaaataatttccaacaagggatgtgttactagatttcatgtagaatttttattctatatggtagtgtttatggcttgcctaatgaggcaattacttgttcattaaagattgttgttatgtttgtgataattagtatgagattcattcgagctttgtgataattggtttcttgttcattgattatctatttgatttatgttgttagttacttttcttgttgagtctcgcgactcacgggtgctttgtggtgcaagttagggcaaatgcaaactaaggcaaccatgaggtgacagtcttctccagcaaatgtacatatcgacttatccatcttgtatggccgagttgtcaggagttgtattgagctgtacctaatgagtattttgacctatttgtgtatacaaccctttttgtaaaacttttgtaacagaggattcccaaaacaaatttttagcaatgccaacctgttcattgctatgttattattcttgtgaagtttttattaatatcacagattttattatatcactaatctactattacaaactatgtttcaaaaaccacacacgtggtttccctaggaaatagggtgttacaacttggtatcagagcgaccatgattttaaaggtcctaaaga

SEQ ID NO: 77872 - DNA, 535 bp, Cannabis sativa
gtttattcataggctgacccataataccttttcctttgtcttttgttggagcgaaaggtccaacatctttaggtttaaactttttaatgggaatattttcctctcgaattggctcttcaagagtatcttcttcaggggaatgcatcttcttcacgcacactggcttgtagtcacgccagtgctttttgcatttcatgggagaagtcttcctgctctgccaatctctattgtgcctcggtaagttcctgggccattcatacaactttgggatttggctcatagtaatactcctagttgtttccatcgtggtcatcatttttgggatcttcctcctattcttcctaatcatcctcgttgatggggtttcttgtgacattcagtagtcccgtgatccgtaagaggttataccgggtaagctgtgcagtcccacatcgccttgggaaggtcaagtaggatgattctgagactgtgtatggaactacacaatttaaaagggcttaaatggattgattggtactacctatatcaacaaggt

SEQ ID NO: 77873 - DNA, 843 bp, Cannabis sativa
ttaatcaatcttttaaattaaaagccagaaaatacataaccatactattaaatcaaagcaaacacttcatcaaattaaatcctaaaagatcatttctctttatgggcaatgaaggcctaagataactatacaaaactaaaatcaaaaacagaatataccaaaaaaaaaaaagattaggaaaaacatacctggttctgatcaatgatgtcaatgataacattaaccacaagctggccataatcctttccgtagttgacaagagccactctggagtaccttgattcatattctcattaaaaaggtaaaatgtaaatatccactgacaccgtcggattcaacggagtaccttgattctgttcgattctcctgagaagatttccattatacacttcagcattctctagtgtagctccggcttcgatgtcatcacctatcgaaggccaatcggtttcggagattctcactttgactccgtagtgacccaatactttgatcgcagtgtaaaccgcatcgatctaatggcgatttggtttgggaatggaaattgagtattagatttaggtattgagttagatctaatggggatttggtttgggtatcaattaactaaaatcgttaaagaattagttgtggttatttccaaaccaaaattttcattgtagaagctttaataccagagctcaatcatcgtgcggcaattgaaagcataaaatttttaagctccctcaaatctcctctcggtatcaaaactctgattgttttttttttttaaatgggttgtgattgtggaatatttaatatcagttattttattatatgtaaataatattttattattttatt

SEQ ID NO: 77874 - DNA, 734 bp, Cannabis sativa
ccaacaaatcttgctcaaactgaagatcatctcatttggcacaaggatgtcacgggtggctacactgttcggagtgcatacaacctagtacaagagagtcaagggcaatggcacaacactgaaacttcatctttctggaagtgtttttggaaactaaaagtcccacctaaagcaaaaaatacagtgtagagggcagcaatggattgtctaccaactaccgtgatgttgagaactaaaagagtggaggtaagcactatatgtccaatctgcctttgtgaccaagaaacaattgtccatacgttaattacatgtcaggtggttaaggaatgttggaatagagtgggtataggcactttgtatgccacgggtcaaagctttttggaatggtgtacaaccgtcttcaagggagggaacgaagataaaaaatgtagtctgataatggtgtgttgggccatgtggggggctcgaaacgatctggtatggaataaaaagccagttttggtggaaaatattgtggcttcagcaaatagaaatctttatcaatggagaaacgctcagaactcttctttggagtcatcatggtccttgtttaaggaaggtgatggggctgagtgttggtctaaaccagggagtaatagtataaagatcaatgtggatgctgctttatttggggaggacaaagttttgggattggagctgtggcacgttacgacaaagggctactaattgaaggt

SEQ ID NO: 77875 - DNA, 717 bp, Cannabis sativa
gagaaatctcactataacaacaagattaaatgtatagtttttttttctacaatcattttttgttttacttttttattaacaaacctaaaaaataaatacttcagcttgactataaaagccaaatgttatatatgtggtttgaaaaattaagaaaaaatagagaattttaaactaaataaaaaataaagatgagaaataaagacaaatgaagtaattttatcaaataaaaaaatgagaaaattaaggagagaataaatagagttaaataaaacaattttagactgacacatcacttcatcatactttatatatatatagactagattaaagaaagttacgtgcaaggcacgtataattagttttatgttagatgctttctattttatttaaaaaataatacaataaataattgaagaaaaaaaattattagttattgtttgaaattatttttaatgtgtattcaattaatgtcaataatagtattgcaaattaaaagtaaattttgaatgcaatattataccgtgtatatcacactatttgtaaaatctgtatcaattaagacttgccttttgaaaagattaataaaattgcattgaaatattgagatgacatgataataaagacaacagtgcaggctctcacacatagacgatgtttcataatgggataaaataggaaaggactcaaggagagttcttctgttatagtgagatttct

SEQ ID NO: 77876 - DNA, 645 bp, Cannabis sativa
ttaagtaaaaaactggaaaagaaaaagtttggaacatatctatcaccaccttatcaggggcggagggaataggtacttgtgggatatttgcctagttgcctacttcaaatttttataaattaatttttatgataaaatttgaaaatatttatttttgcccgcaagaattaatagtttttcatttatatttttatatatttttattttttctctaaaaactttatattttctattattattctacatatatacttttatttttatacctataaaaattatattttttacaattatcccacaaaattttatctttatctcattaataaccttttaacaaaaaaaaaaaaaaaaaattgccccaagaactatatatgggtgtctctgccactgcttatccttgttaattaagttgtcactcttccaagaaaaatttatataattaagggtaaatattatgttggaccatttgttttacaaaaagtaactaatttgatcttttattttgttaaatgataaaatggtccatgtattttctaaaatagttaaataatacatgaactaattttttgttaaaataaaatttaataataatctgatctataagtgttatgacaactgtttatattttctgtatttgttcgtgtt

SEQ ID NO: 77877 - DNA, 548 bp, Cannabis sativa
acctcagggctagcttacccttcactccaaatctcgttacatcgtgcataggtgtaacttttaagaatatatctaattgtaacccttccaatctcctctctctttgctctgttcgactcccttgtgagttggtgccatggcgaaaactagggctaagaatgtggggaagatgaaggtttcaggcaagaaaactaagagaaagggtctgaattcatctgctgaagtgaagaagacgaaaacgatggatgaaatactgggggttgcacccctggaattctcagatgacgatgaggataaagagcaactaaaggataagaaccaggatctgtttcaaccattatcccctgattcatctttccgattattgcagaggtaggatgagattgttgcagacctttggattctttcttgcggctaaccaagaatgtcaaagttcaatctcgaagggtgttacaattaccccaccggttctcagaccagattcagtgaaacggagcttagactctacttttgccaattcaaagaaaaaggataaagtccagattaca

SEQ ID NO: 77878 - DNA, 682 bp, Cannabis sativa
cacataaaaagaattaatatcgaagttaagatgagaatataaaagttaagatgagaatatcgaaataaaagttaagatgagaatataaaaattatactttaatcttatcaatattactaatttaatcactaaaataagtaaattcaaagcatgataataataataaataaataaatgaactataattttgttactctaaaattttgatgtctcttttattgcttaaagcccttcatttatactaatttgatcccaaactaataagattcgtgcatttaggtatgggagaaatgttgatcaagtatttttgttttgggttagtgtgaatgtgcttacttatctttgggcttttcacctttgtcacttttatttttatttttatcaattatacacaaaatctgcaatatagcacaaatttgattgaattaaatattttcaactataataacctcacaactaaaatcatgaaaacaagtaatttaaatggaatttacttgtacaattaaagccttgaaagttgaaatatacatattttagcattaattagttactaagggtacatcagtgcacttcttttaagggagtaaatcggtgcactccttttaaggaaggaacattgctatatgacacctatagtgcctagtaccatgatgaagagcgccttataattagttagcaattt

SEQ ID NO: 77879 - DNA, 695 bp, Cannabis sativa
  modified_base (59)..(71): a, c, t, g, unknown or other
  modified_base (630)..(639): a, c, t, g, unknown or other
actcagaaattctcattcactttctctttctctctttatcttcttcttctttcttctcnnnnnnnnnnnnntattttatattattttataatttaataaggcaagttatttatggtaaacataattttatttccaactatatatatattaataattaaattttgttgttatatattaaaatatatattctatgattaatttttttaagaccgtaatattaaaaaaaaaaaaaaaaataagtccgtatgtgacatcttttattcctaatcaaaattgtattaagtgtgaccttctatatgcacaaagttacatttgaatttaattgtttttgtattcaatcatcatgaatttaaagtaatattgttctttaagaaactaataaaaatatttctaagtgagattcctaaagagaatatataaattaattggtgcatataggtagctatatatagaaagaaaataaaaataattagataaatatacccctattaatatatattgtaattacaatataaaaataattaaatgtatgtttaatatatatctatatatatatatatatataaggaggaccaatatgcatgggattagaaagttaatatttgaaaggataaataccattttggaccnnnnnnnnnncaaaagttaccaattggactctgtgttttgttaaatgacaaaatggaagatcggaa

SEQ ID NO: 77880 - DNA, 1626 bp, Cannabis sativa
aaacatgtgtaggagttttgatgcagatccattgagctcaatcatcaagaaacaatttcctcacatgtagtaacttagacattgctattgtcataagaataaatctatggactaatacatcatacaacagcctatgtgatcaaggacacatattcttacagtttcattttagaacacatttgaaattaacttcacatatcaataaacaagaatttcggttaatcccctttctaatcaatgctcacataaatctgggaacataaacaagattaggtatcttcacaaaaaagaaaagacctataatgcttaaacagaattctgaatattgaaacagcaataccaaacagggaatcgattaagaactcgcctgaaggacgacagaattgatgacatctgcatatctaaccgctaaatttaaggacatacacctagcaggagcaatggcatagcacctgattcttctccggtcaatgtttcccaattcagcccgattttgcacagctaacacagctagaagtgttgcaacaccagaacctaaggaatgtccagcaaaagtcaaagtataatttggatacttcattaccaacttcttcaaagtatcagattccataagcaaaacatgttctgcagctttcaataacccattgtgaacataaccaccatcaaatttcctctgccccaacttattatccaataaaactgcatagtcactttcctttgccaaattaaggcccctaaaggcaagtactatatcctcatgatcatgatccagatacaatatgtaaggaggagcttgtccatcagtatcttcataggatttcttatgttccaaccaatctgggttgattccatagccttcaggaggttcccaaagtgggtgccttagatcatcttcgtaaacagctagaatataacaacacatacgaggcacaggctcaaattcttcagcagtggcaataccccaattctcactgtcatgtcctgctgtgtggagacatcttttccaagcccagcgggcacatgccaaacaataaacacactcaagaagagggatgccacatataattgacattagagcctcctatctaagcaatcatcctaagattgaccgagacacatgagttttagcagtattacggtaactaatgtccaacaaggaaaccccaataggtaattatctatatctacttggactgtatagaaaattcgagaagaaacttttccaaccaaattagggaaataagtaacactaccaacaagaactaaaatttagatgcttgagacttgagatttacaacaggtgcataagcttgcaaaattaagaaatcaactgagaaatatgaatactataagtcaacgggacagacagtaacccgagtaaaagaactaaaggagagaaatatatatacggatcaacggtataagaggtattgattagggaagactccttatctcaaatgagtctctttcactaagcttctactatgcaatgaaagatcttcattcactgatgatgacacaattttctacaaccaatcacacaagaggaacaaagagtataaaaaaatgacagatacccaggtatcaaaattgggtctttaatcaataatgtggacttacagcctt

SEQ ID NO: 77881 - DNA, 1385 bp, Cannabis sativa
tttctgtgatgcctgccaattaggcgaaatgcatcaattcaattttaaatctaccataaataaaactgttgctccttttgaaattttgcatactgatgtttggggtccctcattctatgcttcaagggatggatacaaatattacctcagttgtgttgatgactttactaggtttgtttggatctatcccatgcaatccaaatccgaagtaactactctgtttactcactttcaaaatctggttgagagacgatttgataccaagataaaaagtgttcaaactgatcttggaaaagaatattcacctctttaccaacactttagaaatcttggtatttcccttaggcaatcttgtgctcatacacaccaacaacaagggcgtgttgaaagaaaacatcgccatgttgtcgacatgggcttgactctccttgcccaagctcaaatgcccctcagtttttggtgggaagcgtatgctagtgctgcataccttattaatcgtcttcccaccccaatcttgcacagcatttccccttatgagaaactttttcatcacaaaccagattataaccttcctaaggtttttggatgttcatgttttccccttcttactccttataataatcacaaggttgctttacgttctagcaaatgtttgtttcttgggtacaataacactcaaaaagggtatagatgccttcacccgagtgggagagtttatgttgcaagaagtgtcaacctcaatgaatctaaatttccttacaacaaactattcaccacatcaactttaccctcatctcaccaaccaatcatttatcctcatagtgtacccctgccaccaactcatattgataatatgcatcccacccaaaccagtacccacaccggttctgcaactttgcatgaatccactgcctcggccaatacttctcattcccctcccacaaacacttcacctcacaacagccctgctacccaatcgagttcttctcaccattcctgtactggttctgctcttccatatcctctaccccaagaaccaacatcttccctacaatctctctcacctccccataatgttccaaccataaatactcactccatggtcactcggtctaaggccggtatattcaaacccaagtcctatctcactcacatccaaaatcctttagaaccaacaaatgtaaaacaggcgcttgctgatagaaaatggaaccaagccatgaatcaagaattccatgctctcaaaaagaaaaagacatggatcttggttccccccacccctgatatgaagattattgctaacaaatggctttttagaatcaaatataatgcagatgggtcggttaacaagcttaaagcttgtctagttgctcgtggatttcaac

SEQ ID NO: 77882 - DNA, 530 bp, Cannabis sativa
attagtaatattatgtttagtgtgatttattaaaaaaccaataaacaaagtaaaaatccgacctttgagctaaatgaatcccatattgaaatatttaaaactcaactgctaagtgggggaactcttataatgtacctaagttgcctgaaatcttttgcaagcaatttcattcttgtcaataacgacacattgacattatctacacttctatcctcgagcaatcttataatttcattttttttcgaatcataaacgaaattgagcttgagaattcgagaacattatccacattcaacctcagcttctatgaataaagtcatttctaataaactgcactctaaaataaaaatacaacaaataatcttgattatgtttgaatgaaaacaatatataaatggtaaactcaaaatctagttttatacacatcttagatttatttattgaaagataagttttgaaaatcaaacattaaataccactatataactttaaaatgttgcaaaaaaaatgtaccattactcaattaaatt

SEQ ID NO: 77883 - DNA, 573 bp, Cannabis sativa
  modified_base (325)..(338): a, c, t, g, unknown or other
aagttattaattatatacattagtgtccaacactattataaaatgactcatgtcaatactccacttctaattttttaaataaaaaatgaaaaactaattaatttaaatatatatatattagattattattacgtgtattctacttagtaattttttttaatttttattatatattttaaaattttataaattaaaagaaactactaatttatttattaaaatagataaattaatattgtgtattaaaaaatatttattaatattctatattgaacatactcctaatattaaaataacaataaaaaataataatattacaaataannnnnnnnnnnnnntatatatttaaattaatttaaattaaataatattaatatttatatatatttaagaaaactaacccttgtattcttaaaactattttgttaaaccaacaaaaagtgttaaataatcacattttatatataaatatatatattgttggacaagtatattttaaattattaatttttgaaaaatttatataataatttcaacacataataaatataaacattttcaataataatataa

SEQ ID NO: 77884 - DNA, 691 bp, Cannabis sativa
ataataataataataatatacatacaaaaatattaattgaagtggaattatattaactaaaaaattataccccaatttccaaaaaaaaaaaattaatggctattagtaataaatatttccaagttgtaggtatgatggatgcatataatagtttgtcaactctctgaaaaaaaaaatattaatgggcaatttgctgtataatatatgtttgtgtgaagtttttgtgctcggagcatgggacattattagttagtgctttgacacttagaaaacagccgaggagctatctatatataggtctatagatatatgttagagagtattaacttgactaatgattacactcttttaatattatgtggggcatgtataattttttagaatgttgctattgagtatcagttgttactaatactttttataattgacacttattagcgatataaattaattaaaagtttttttttttttaagttatatgatatttaatatttaattatattagtaacagtataacacaaagtagtaagcactaataatatcttttaccaattctcaattttttattaccttcacttattaaccacgataaaactagtaatgactaattaaagtccaagtagacagatgttttatgatttgaataaattataaaatgaaagttaacaaatttaggtggcgtttggtaaca

SEQ ID NO: 77885 - DNA, 737 bp, Cannabis sativa
gttgccgttattctttttctaacaaatatatggaatattcttgacctttaataaattaaagtttatatatatttattaataataaagggacttgtcatcaactacatacataccatagaattgggtgatgggtctgaattttcttgccttgacggcaagttaattaggatacgatcgacgtgtgacgcggacgccagaaatataattaaacttataaaaacgaccaatcatatataattggtctgtttgactttgttgttcaaaatgtttcaactctacctcaatttattactacttattttcttttgttatttgaatttgaaggggtttttggcaatatatttattaattggctttaaagtcagctcttatataattaatctcaatcactcaatagacagcagcagttatgttcaaaaaaaaaaaaaaaaaaaatagacagcagcagtagccagtactcagacacgaaaaacaaaaaaatattaactgtatatggcagcgcacgtgcaacatttccttcatccccatgcaataagtacgtacttctctgataaaggaaagtttttaaggaatttattaatccactgtaaccaatagctgcttaattagctccaatatatattattgagctacatatattacccattaattaagttttttattattgagctccaatagtaattgtgttttttttttttgacaaattttagttagcaagtaattatataattgtattt

SEQ ID NO: 77886 - DNA, 963 bp, Cannabis sativa
tggggattctctgtaggtgtattcgaattaggagcaccttgactttgagggccagtaaatgtgatgtcgaatcgatgatagcacttttgtgcggtatgaccaacacgaccacacagttggcaaatcggcctattacctctgcctccacgattttgaggagtgccacggccgcctctataagcccccctgtatcctcggcctcgattgttcccattcatagaaagattcacaagatttgcttgcacattattgagagcagctgctgagaattgttgcagacgaacctcatgactgtgaagcataaactgaatttcttgaagagtcaagggttcggatctggaggtgaggttgaccacaatggattcatattcagatccgagtccaccaagaacatacagagccaaatcttcatcagaaatagcttgtccagcagctgcaagagagtcggcatagcctttcattttgagaatgtattcatcgatggtggaggagcctttctttgttgactgaagaaggcctcgaacctgaagaagtctagctcgcgatgtggttgcgaacagttgggaaaacacagtccagatctcggaggatgtgcggcaattgatcacataaccaagcatttgttcagtgatggagttcatgagccaatgcatcaagaactgatcaaatcgaagccattgaagatgtgctgggttagggatgttacctgcaagatttggctctggctgaggatgtgtgccaaggatatagccgtcaagattgtacgcccgagttgcagcaagaactaaggaacgccaaaaagtgtaattcgatcgatccaggcgaagattaaggggaaggagtgtgttattaggtaggcttgggggaggttcagccattgttggtgaagcttcaggggtggtgcttgtggtggatggagcggtatctttggacgccatctagacctaagcatctgataccatg

SEQ ID NO: 77887 - DNA, 957 bp, Cannabis sativa
tcctaagtcaaccatacatatatataatgccaaaaattgaaaagttagtatcttttttcaaatcagtccatttgttgggttgggtgtctactacgactctcacgtgaatagtaatttaacgaaattgatgagtttaatctttcatatgtgttacattacctacatgctacgttttggtaattcgtataatagataactgttaaaacagcctcaatctggtatttcattaccaataagattacaattctatagtatgaatttcttatacgttgtgatttatttggctgggtaatgaatcttaacaacgtgatcgatcgttaagatttgttatgtttttagatagtgatatcaatatggctaaatgatcgtattcctgattatttttttaaaagtgatttcataattatattaggaatagttattattattcattgtcattgatacccagcgtaagtaaaagtttatattgaccatttacaactcggacacttgtggtcaataataaaaaaagaaacactaatattcttgttatttgtaacaatgtagcttgcaaccttataaatattagagacaacgtattcatttttacacttcaaaatagttttcttttatatttttacagaattctacatagaacccctattgaagctaacgttgcaacctaaattgcaataaaaaatcgtatagcaacccacataaaaactaccggaaaaaccactttagaaactcaaaccgtaaatttgaataaaaaaaaataaaaaaacaatatatgaagtaattccccaaaatattattccatatgaagtaaactcaagaagtaaacagtaaatattattcgtaagcagccaataatgtttgttctctgtagtatatattaatgatgcaagaagtaaactcaatgtttgattaactaccctttagtcattttttccatactgtcgtagttgtttgtcttag

SEQ ID NO: 77888 - DNA, 595 bp, Cannabis sativa
ttcaaaccctaaccctaaccatggttcagacgagaggccattcctctgcgccggctgccgccagcgccgtcgatcttccttccccggttgaagctcctcatcagactcctcgtgcgactcctgctccctctccaatgttctttccgactcctccctcgacgatcgcaccgtctgaagctccgtcctccactgctcattctccttcgacgatcgctcctgttgacagctccctcgtcgacgcctcttcttacccaattatctctctgccacctgagatcgtgaccgagcatgctacttgaacattccgctgccaacttcgcgtccccctggacctctttcttcttcgccgatcttctcgatggctcttccaacgggattcgcacctatctcctcggttccctcggtttttccagctccgcctcctgtggctccgaagacctccccctcttttccacctagttttggtttctttgacactcctcaggtgaatcttgatcaaccttccattgatgaacacaatccgtatcaccttggaactggagacaaccccaattttctcattgtccccttccaattgactggccaagataatttc

SEQ ID NO: 77889 - DNA, 825 bp, Cannabis sativa
tgcaggaggacgatagggaacgtttcttgaaccagatacggcaatgtttgcttgaagcttcatgctaagatctgcaacagagttgtgatgatcgagtctactttcatgagcaagaagaagcgattgaacttcctcaaacgtgagatcatcactgcgcgcggtgatgccggagacgacagagtcgtattcagggccaagaccgtttagtagttgtaagatcagatcttgatctagaataggagaaccagctatggtcaaggaatttgcaatagactggactttgtcactgaagtcagagatggattgtcctcctttgcgaagcgtagaaaactggcttttgagttgaagaagacgagcctttgattggcttgagaacctctgttctaaggcacgcgaaacagagtgagaggaggtgaagtttgcaactgaagccaagaccgcttctgtcatggaagcacacaaccaagataggagtaattgatcttgacgcttccattgatgaagcataggatttggttcaccagagaccagctgagcaggtgggggaattcctgcaagaagaatttcgtcaagatcatggccaatcacagtggggagaacctgtgatttccaagaaaggaagttagatctatcgagtttaacagtaagagttgacgtgagagagtgagaaaaaggattgttcatctgtgtcgaacgctcgacggcagcctgagtaagggccgtgttcgtggaaggagctctgggaggaaccggttggcctgtggacgatgactccattgaagacgttagtcagaggcgactgataccatgtaagagctataggca

SEQ ID NO: 77890 - DNA, 706 bp, Cannabis sativa
tttaaatgcagaagtcaatagtgtatatttataacttgcagactgcacagtccttagcgaggcacgaatgtacgaactattgactcatgtgttgacgagaaattattttgtgtcagaagacataatcacgaggatgatgtcgataatacatagcgaggcgtcaaccccgccctgtgaggaaaggtgttgacgaggtgatttggctgttaaaacactttgtgtataatacacattatactaactaagtataacagcttgaaggacacgaatagtgaatagcgagacacccatctcgctataggaaggcatactcctggtaccttctctagtcagctccagacatctttcaatgagctccactgctccatcgcgtcagctctcatagaaagaaattgacattcaaatgatgttggctgctaaagttcatcttgtcatcaagaactgcgactgtcagatggagcgttatgtcttcacgcgcagaaatgatgagatttgcattatcaatcctcagaaagacgtgggaagagctccagctccttgccaaggttattattgctattgtgccaagcgagataccccagtgggatatactttgcagcgtgccttattccacgtcatcgttgactcttttaaaagcagtttaattcacagctgtatgattttcaaataataaccgtatttatttacgtggagcatgattatagcc

SEQ ID NO: 77891 - DNA, 1018 bp, Cannabis sativa
acgatgatgagatagattcatcctggctctggcgacttgcgcttcactcaaagcctacacaatataatcaaaattaagtttcgaaacaatttcataaagtaaactatcaataaagattactaagtggaattttaccaaaaattcaggggtaagacgagttagaacaaagtcattccagtctttattgttaagttctggatacttctccggagtatcacatagctcttctatcctaccacttttagcaatcgggaggataatcgttcgggtcaggagcttcttgaaacttttcattatttttcccgcatttgatagtagtttagacttatacgtttctggaaggtcgaaagcatcctaaaatcacaaaaagaatggattagtaattaaaagtgttgaattaaatgtgttgaaatatatatatacacaaaatttaagtcttacatgtgtctcctttcatatttactccttgagtttcgaatctacatgtctccaatcatcataatttagagaaactgtagatctttctttaaccctaatccatgattgcatatctgcatatgttattcctatagattctcctttctcattccactctagttttgtcttgcgtccttgagctttcagattgttgatgttattcttttttatcatggctcgccgttttggcttatttgcatcttatagaatcaatcagatcagttatgtaaaatacttgtttcgcttgggtagccatgataaaaggatcgttcttgctacctcttttgcttaaatcaaccaaagtgaaactaagttcatctgttctaactccgcctttattctctacccaagagcatttaagaagtagaattcgaagcattccataatcaagctcccaaatttcatcaacaatcccataatatgtcatagtggattgcaccgggtttctgtcctttgctgatgcaaaatgcattgcttctgcaacaatacttactccactattttgaaccgttcgagcatcatctctttcctttgtatgaaa

SEQ ID NO: 77892 - DNA, 2971 bp, Cannabis sativa
aaatataaataaataaaagagaggattgcataagaacaacacaattcgaaatcaaaagccctaccagggacaacaaccgcttcttctgttgcacggcttgcacagcagcagcgagtccgactccatcttaggttttctactattattttgagttgttctactttgtgttttataaaaacacggtatttttgaaaagattttcgtgtgacagtatttttataaaagttaatccaaattccagtattttaaaatgcaactcacaaacgtctcatccaaaataagaggctatatatcttgagaaagttacactacatacctcttttaattgaaaattttacatggtatactaacttttgccattttttttacaaaaatactgccaggtggtattttttacttttttactatatttttttataagttttacactgcaatatactgtgttaagttttcacagatgttctactaatatttttagttgttctattattattttgagttgttcggttttgtattctactggtgttttataaaaacacagtatttttaaaaagagttctgtgtgacagtatttttgtaaaagttaacccaaatttcaatatttttgtaagtttctccttttaatttgatgtctttaatttttaccatttttttcaaaatctattatgtttacatctttttcaatcattctaccaattttactcttatcactttatgatagttttcattcatttataattaaaatttgctctcaactttttcacaaacctacacatccatctccaaagaacacaaatttattatatttaaaattatgtcttagttatgtgaatgtgtgaggataatttggataccatactcataaaaaaatgtatatttaaattaaattttatttaaaggtaaatttaattaatgtataaaaaatgagtattcttcaacttaatacaagtccaattacaaaacattattacactttaagcttatgtttatatttttttctctattattaaatgtttagtttttttaactttgagggtgagattggaacttgagatttctttataaaaaaaattgtgaaaaattcaattattaatcaatttggcaaaatttattgagtaggcaggaattagtacaaaaaagttggatagaggatccgcttgtaatatgattggtcctttctggctcattttgtatagatttttacactaatcttttctattttttttttttcacttccggtaaaaaaaattcatgatccacaaatgcaaaagagtattattattggcaccagcctagcacccttaggacgtgtcgtcttgcgattgacgagtgatattccctaaaattattatattaaactatatgagacccgatacttaattataccaatagcgatattaatacataagaaagtgtttgacactactgatatcttttagtatttcttatgcaataagtagtacttgtttcctctaatgaaacacaaaagtttatttgttaattaatttatttatttttaaagtttgtacctcatataaatcgtgatgttatattaccatgagaatatatatcaaaccttacatcctagacgaaatcataattaaaaccaaaaaatattactaaactgcatgttaccttaatgtaaacaacaaaatatcaaactcaaaacaactgtacaacaagaacaacatagtaatatccatttatatagttaattaacctcatatatttggtaaccaaactaaaagtacaaaccaattaaacacaaaaaccacatataaaagcctatccatatcagcaaatcaaaacatcaattatattaagataatcaaaaatggccccaacaaactctctcaaacttttctcactactaatttcttcattattttccattatcaaatttacaatggctggagatccagatatccttacagactttgtaatacctccaaacttgagtgcatcaaatataacaggctcattcttcacttacactggtctaagaactatatcaacagcttcaacctttaatgtcaccaaagtaagcatgagcgaattcgcggcgctcaacggccaaagcattagctatgccgtcctgcagtacccgggggggacagctaacccgccccacgttcatcctcgctcggccgagctcctcttactcatccaaggatctctagaagtaggctttgtggacacaactaataagctctacacacaaactattgaagctggagacatttttgtgttcccaaagggtttggtgcactttcaatacaatgccgattccaacacatttgctgctgctctttcggcgtttggaagtgctaacgcagggacatcttcagttcctaaggctttgtttgctaatgatattgacgatgatgctttggctgtctctttcatgactgatgttgctaccattcaaaagctcaaggctggtcttgcttccaagccatgatgaggatatatatgagaattgttggggcttgttgtcataaatttgggttgtctttttatattgggtgattaataatgttatcaaaatggtggtatatatatatatatatatatgtgtgtgagcattgttattgggtactagttgtgtccaacaccttctatagatgagatctcatgattagttagcgatattgtctaaaaagtatttttttaagttatatatgaaactcgatacttaattacaccaataacagtataacattaaggagagtattaggtaccaacaataacttttaccaattctcgtatatataacatatgagtttgactaataatattttcatgtgtatattttaaaggtatcgaatgtacataaagaataaacttcactttgatctctcagtcttcttagatatctcatgctagctctaaagggaaatttgattttctatacttagaaaatcaaaaaatttgatttctaaaccaataatttaaaccctaaaaaaactat

SEQ ID NO: 77893 - DNA, 628 bp, Cannabis sativa
tctcgagttgttcaaccaagccttgcttgccaaataaatttaaaatgtctttggcaaccaatgtctttgtgcagcaaatatggtatattaggaataatactaagcatggaaggaaaatcccaaaggttgcaaactagaattcaacaacttttacatcgttttattattgaatctaattactaaaaggtcgtccaattaatccgtagcaaggaagatggatgtagggatatattgataggatattagattatattaggaatttaatataatctaataccctattttgcgctggcagatatgctatatttctaatattaggaatttaatgttacattatatggttgttgggatctcttttacggggaggtaagtgaggtagctcatgtataaactaatcacgctttgattaacaaaatgagtactatgtagattggggttaatcacccttgtgtaaagtttgcgcttcaacaagactcgtctaatcctatgtaatgtttatttgaatgaaggacttgcttcaaagaaaaaaaaaatgtaaaaaggaataagtcctttagtaaataagtaaataaaatcattacgggatgaaaaaacaatctgatgcaaaatgacatatgtaattcaaaac

SEQ ID NO: 77894 - DNA, 571 bp, Cannabis sativa
aaactatcttactcattttcacaaagctattatcttattctgttccttactttttatttccttaatcctcattatcctatcacaattttttacttttctcagtttcaaaactcatccaattttacaacaagcaatgggaaattgcatctcaaaatttctcttcagtttgatgctatattttccaactgctatcaatccactgttgcacaagctagttttgtacataaacttaaagaaaatcttaaagctctagagaaagctttagaagagttaacagatgtgaaaaatgaattagtgaggagagtcaagattgctgaggaggaggaccagttgacatgccatgatggtgtgagaattatggggttatatgggatgggaggggtaggcaaaaccaccctactaagaaagatcaacaacaatttccttaattctgaatatgattatcatgttatatgggtagaattttcctatattgatgcaccccttaaaatggatatattgatgcacccctatctgttttagcattcgaaataattttttagttaaatttttctcattgtcatgtacgtta

SEQ ID NO: 77895 - DNA, 2070 bp, Cannabis sativa
tttttttttttttttttttttttgaatggaagatacatctttattaatcatcgaaatccgctactaaagatggtagcaagtcgaatgaaaaagactctttatcgaaaatacaaccaggaaaaatattgaagctctagcacaattataagttactatatttgttgatcgtttaacaaataaaacaaaatttgtgttattaatattgtaataatcaaatttgaatttttatacttacttgggtgacaattaactatctaaataataataaaaatattatgtcattcttttcaaaattttccagtacccattccacaatttgtatttaattatttttgggacgtcggacattatctatgatcgcattggtataatattgtttgtttttttttttttttttggcctaaactctcatgaatttgctaatggatcctacctaaaaggcctttaaaaataagtctcataccaataattataaacatattattatcttttagaagaaattgcacggtatattgaaaaaaaaaatgaactcttttattccgtaactttttaatgtaattaggttataagctgttagctattttacatttgtataggttctttatgccatattaatactttgtaaagaatgttcagaataccgtatttgaaggttttgttttccattttttattatactaaaaaagttaaaaaaaaaaaataactagacaaacacagagatagagaaagaaaagtgaacatactagattcccattccaaagctctggttttatattatgtcagatttgatttacacaccttcattaataatatatgggtgtgggtcactgtcttaacggctgcagttagcttctagaaaatcagagcaactgccgaagatgaaccaggaccaggaggagcatgttccaaccaggaccaggaggagcatgttccgtccattcatctccttcttatgatgatcagtgctcaatcactgcgtctgcgccgccaccaacagaaccaacttcagctttagcttctgtggctcatttgatatcggtattgggacacgtggctaaagataatggagctcatagtactctgacaaaaagacgaaaatttagtttgtattacaaacatagcagcgagctcagggagagtgacgacagagcctagactttggtggtttatgatgaatattgtggcaacgatattggtagtttgtgggaagctatctctccagaatttaaggccagcgttttgggagagggtcaaggcaagggcttcctctgaaaattagtgatggaaatttgggccgagggaacgagtacttttgggtacccacccaattggattagaattaccagccttaatgggtaataggacaaaagtagagtgcaatttatatactggaaatgggttcgaggcggggttggggtgatgttgaaaaacaattacagattatgagtattcgcaagtattaaccaaatataatccataactattgaagccaagatctagtatttatttaaagcatcaaagacaataaaatacatacctcccatgccatccgtgagagccatcaccaccaagatctttaagcaaaagtctagagagcacttgtggagctaacccttttttcttttaccacacaatccctaatgacccctttaccacacataacacacatatatacacacatgttattacccttataaccctaaggggttattaactaataggtcttttggggtcctttatggtatactataatttaatgggccaactatagtattaagggtgctctcatgtgcctctaacacattattaagttgttaaccatcctattatggttattagcaacattaggcacatagttaatgattgtgtattatggaattaaacgtatgattgtattagtccattataataattctaacaggtgatactcaattatatagtttctaaatttttcatataattcttttaattattacgtattatagttattggttataattacaaagttgactattaatctttcctaaattaatgtgtaataaagattttttttttcactactacaaaaag

SEQ ID NO: 77896 - DNA, 1002 bp, Cannabis sativa
gggggggggttcactgatttatgtagtttgctcattttaattttttgttattatcctgtttttactattctatgtttcttattgtacatatttttttatgttttcttgcaattgtttcgttgttgttctcacttgttttttcgagttaattttttttaaaagataaatacacattaccctaaactcattacttattgttcttcttattttcatcatcttcaaaattttcaccttcttcttaagcatactttttgagttgtttacctgtatttgtttgaaaaattaattcatattttttcaattgtggttaacttagtttttaccatttcagataagtttatatttttttgacaaggaaagtaacaaagatatatatctttttatttttgataaagatagtgaaactgacacgtaattatctttgggaggtgtgaggggaggttttaatcatcttattgttgtttatgcccttttactatgttttgttttcaattttttttatgcagtttaggattttctatttttttggtatttgttttagggtttttgtttgtgcatgttcagtgtcaaatatcaatttgggattttgttcatcgctctctgattttgttaaattttatatgttttgttgttctatatatgttatttagtttttagtattatattgatttttatgttttttaatggttttttttttttgttctgaatgttttttaatgtatttagtgtaaggagaaattttcacgggtgaagattccctctcatgatggtatggaagttctcactagtaaaaaagttattgaagtataatattttttgtgtgattatatatggttattttatttttatagttatactgttgttttagttattttttatgttattattctaggattggagtcttaaatatttatgttctggatgaataattatcgtgtttcagctattttactgttgatcggttgtttctgatcgtaactgttgagaatgatgaggttttag

SEQ ID NO: 77897 - DNA, 1724 bp, Cannabis sativa
agtgtactagctgcaaatcttctatcacgtgagaaccaagcatatcgaattagatattcactttgtaagaaacaaggtacttgaaagacaactagatattcatcatgtgtcccaatcccataatcagataataaattgcttaacaaaaaagctctcacattctcaatttcaattcttagtagataaccttggagtgattgtatcaccctctcgcttgagggatggtgttatagaatgaaattatgcagggacattttagtcatggtgaggctctccaagtttgttggaggttaaggcaatctcgagacattggtcacaaaactgtcctctcatattgttagtacaaaattttagaaattctctaacttgtaatgaatattagtggcacatgtatggctttgattcaattttgtacctctctgctcactagctagacatttctttataattcattatatgttattaaaataaaaaatgtagtactacaaactttctaagtcttataattttgattttcaattttatcacattctttcccaattaagaattaatgggacaatttcatgaaaccaatattgtgtaatttattatgtcttatgtgtctttgcttgaagtatccaaattatttatttttctttaaacaaataaaataataataataataataataaaaaactctaaaacatttaataccttcctattattagcctaattctattttggaagtcaatatttagctactaaacatatgtaaatgtagttatcaaatcctatgtatagaataactttttcgtacaacaaggaaaatataagacatgaacctattaaattttcatttagtttgacttcgatcaaattataagataagctaatgcatgcatgtatgtatgtttgattaataattagtcattgataaataaatgtactacttatgaatgataattattcagaaaatatgtgtttttatctttgatttttttatttaatttaaaaaaaatccctcattttcacattatatatgttggaattgttctatcaactcaaaaaaattaaaaaaattgaatttgacttaaatactttttatataaatatatttttaatatagtgtaaaaaaaataatttttgatatttttaattttaattaaataattaatttaagtatagaaactcaaaattttcttttattatttgttattggatcaaaatctaacagtttttttgaacaaaaatctaatggtttaatatttctaaaattaatatttatagttaaagtgttttagtaacaattaacgagtaatactctttgagaaatattccatatatatatataaataataatcatgattttctttacaagaaatataaaaataaaataacattttagttaggagtgtgcataatcgatctaattcaataacaaccgaccgattcaattataaccggctgccaaacattagatattcaattgcgatcgaatcgaattagatgttatttttgaatatctaatcagattggatcggattttggaacatccaatcgaactaattattattttcatttcgttttaatgagtaattagattttatgttgttatatgtaaaaatatgtatatatataaaattaacattaatttttttttattggatacattcaatccaatagatactggatttaaaatattaaatggatctgatctgatccaataaatactaggtctaaaatat

SEQ ID NO: 77898 - DNA, 589 bp, Cannabis sativa
ttttcttagtacaattataagggtaatatattttaccgaataaattaacaatattttataataattactaaattaaattatgagttctaatatttaataaaatatattgtaatgtacaaaacactactaatgggttttagcacaatcaaacattacaataagaatcaattcttgattcttcttttgaaacaaattctcttattcctttggccactcagttctttctccttttctattacaattaactctcaaaatacaacaattttaatttctcaactctcaaagttctatctttcttgcattacatttttcttatattataaataaagagttaagactacatatatatagtagttaagtttagctatcaaaccaataagaaaattaaagaattgtataaattatgattagtaatttatgcctttaaaaaaaaggtaaattgattagtaatagtaaatatgtcaaataattttgtattacattataagaatgtataattgttcttgtgtctatgatataaacatattttgaaattaaatacatgaagtaagaattaattattgaatcttcatttgtgaaataattatat

SEQ ID NO: 77899 - DNA, 576 bp, Cannabis sativa
tattttattttatttgtattttttcattatgttacaaaaccggttatatttcaattataaccagtttgaattatttgttttattcattatgttatagaactcgttatattttttgtttatatctgcgatatttacttttggtgacttttccaatgactttttccagtagctgtgactaatccgacaactttttcggggagactaacttttcttgtgacttttccgataccgacgacttttcagtgactttttcgttttcggcgccgatgattttctcggcgaaccttattattacaagttttatcaaatttatttattatttttttcctcataatttaaactttagttttttttaatcccatatttttttcctgatttatttataccgtaaaaaattaaactctactacattttttcatgttaataaaaaagcccccaaatataaagtaagatacaatatactaaatgttagctggttttggactagcttgagaatatatgggcctaaagaaatatataaataaaaatattaaaaaaagagggttatgacaaacccatattatatatatatatata

SEQ ID NO: 77900 - DNA, 772 bp, Cannabis sativa
tatgcttttcttaccgagtctgtcaactcacagttattgcttgcatgtgtaggtaaaggaaaggctaaggctaaacatcaatgagtccagagcttgaggatgaatattgtacatgtcaaggtggtttgacctagagaattcggtctcaggacgactgggggctttattttgtagttgttgtgcgataaaattgtaaagtttattttgaacatgtaaacaagtttaaaaagtgagatcccaacctttttgtataattatatatttttagttataaaagtttaaatttaatcaaaaagtttaaattaagcacgatttttgaaaaaactctttaattagcaaaagtgtgcacggtaattaaaaatcactgtagcgtatctaattattagggtgttagagtccacatcttctattgttcttaaagcctataaaactccaattaattaaggtatatatatgcttcaccacgtagagaatatttatgtgtaataatctattccctcactttgtgtgtagtctttgactactaatctggtcttaaacattgctttttccactccaagtatgctctcctttgggcttaataacccatttgcaccctactatcttcttcttagcaggtttcttcacaagaatccaagtgttatttctgtatggaactaaatttcttctttcatagcagcctcaaattcaagcttatcatcactcttcacagcttcagcataagttcttggtttttaatagttgactaagttgagatctgtttagtgcatag

SEQ ID NO: 77901 - DNA, 2669 bp, Cannabis sativa
aaaaaaaaaaaaaaatctacttcaaatgaaaaaaaagaatggaagtaaaataaacattacaaacacttaaaaataatttagggtatttggtgataaaatgtaataataaactaaaaaagaaagggaggtggtggaccattcattctcatttcatttcattttatataataaataaataattttatttatttttattaattaattaaagggtcggttcggttgtgttgggttgggtttgtcttgactgttcattttgtgggtcccaatcccaataacacaacacactcgtatttttattttccccaaaaactaaaattaattattatttctatttttattttattttatatatataactgagacacaatttatttaatttaatttaattttttatatatagaagtgagagagaaattgtttaatttttctctttcacatttttatttttttttttggtgtaaatttcacaattatcgtcatcgtcttcctcatcatctcgagctagctaacccctcttcttcttcctcctcaagctcaaaccctagccctagccctaccccaatctaatcaactccactcccctactgctactgctgctcttactcctccatctttctctctttacagctgtatttttcatcatcatcttcgcggtcttcgtcgtcgtcttcttcttcttcatccccaattgtttggtagggtttctgaatctgaggtcacaagctagtgaatcgcctcccttgacgatctatctctttctctctttctctttcttgatatcttcgccgcctaccaggtgccagatctctccgaaaggcgacgagttcaggtgctggtcgtgttttctttcttagtgtttatttttgcaattccttacagatatgttattgtttgatttttaagaatgttttttcttttaacacagaatctagtttttatttgttggttcttcttaagtagtgatttttctagtttataataccaattattagaaagtagtaaattccctagctaaaatatattttcttggattagtttttgtttgtttttgatattggaaataggctctggactatacattgtttgtatttgggattttggagtgagttaaaaggctgccttatctttatgtgagagtattgttgttgatgtattttgatgatcaagcatcttgagtatttatttatgtgtgtatctttatctggctgcactccaacagttgatggggtaggaatttacttgcattatgttgttaaacttctctgatagtgtttcaaattagcatgatatcaattgcaaaacaaaaataactttcttttctccatagagtagcgttaagacttaaggctttttgttgtgacttatgtgggattgtcttaagtcaatatccttttatatttcaatgttgctgctgtgttgtttataagatttttttttttgttttatgtttaaaggaagaacagagagcccgccaaaggaagaaaatgtcaccattggtccttggctggtaaagttttgtaaatctgagatcagaggttagtgattcgtgattcgtgctttcgaaagagaaaaagaagaacaagaccccaaatccgtgtttgcatttcaagaattaatcatggacagtgattcatggagtgcccgcctttcttctgcatctaagcaatatcaatcggcacttcaatcacgatctggttagtgcaattaaccccttttttctctgtcaacaattgctttgtgtttggaagcgctgagaaaaaaaaagatccatgtcatgggttgatgtaatggaacttgttcactaggttaatgctagttgttttggattaaaggatctctttccttttccgaagttggttttgctttgtaataatcgcaattaataagtggatgtcaagattccatttgatatctcaaaaatttgttttgatttcatgtccaatttgggattgcttttttttttcccccataatgagtcttaaattcttaaatttcttatttactgagtttctttgttaatgtttatgagtttatctgtgttgggcttcttgggtgttaacagattttttagaatttccaccaattgagattaattcgctggttacagatatgttcatggggtttgaagaaattgatggggacgatgacataagggaggagtttccatgccccttctgctcagattattttgatattgttggattatgttgccatattgatgaagagcatccagttgaggcaaagaatggggtatggctctttttcacgtctctagttgtctattttattgtgctgcaagaaaatgtttcattttggtcattattatgagatttctggttactttatatattttttgattggttaataaatggtgctttacaatagccctaagtcaactttgagaacaagtttatcctatcttctttgatggagctcccgaaatcttaacaacatgctcatggaaactttctgttagtgttacatgatttaatgctggtttgtctgcaggtatgtccggtttgtgctatgagggttggggtagacatggtagcgcacataacgctacaacatggaaacatttttaagatatccttttcttataactttttgtttgttactcacaagtttgtttttcttaatttttaacataatgatattaaaattgcctt

SEQ ID NO: 77902 - DNA, 3773 bp, Cannabis sativa
atccacataattattaatatttataacaatagtaataataaaataaattaataaccacacacgagacccttccataaatagaagccaatgataggaacatgaaacactggtgtgttacccaacaaaccaatatcacttcacacatacataatagcacatataataggcacctggctaccaaaccacaattatagcttctctatcaaaaaaaaaaaaaagaattaaaaaaaaaaaatctagcttgatggtgccaaccaataagcaagaactaatttcatcatttctttttcctttttttttttttctataaaagtgggaccccaaaaaaatcagctcccattgagaatataatattacaaatggactttctccctcgaaaacaaagtatacagtactatccaatatctgatcatgaaaacttcaaattgtaatatgcttattgtaaaacctgctgaaaacaaaatcactcgcacaatgtaacaaatccaacccaaatcttcaatactagctaattattataagctgatcatgttataaccaatatataatcactaaaacaaatacttattatatatatatatatctctatatatataaaactgactcccggcctcgtaattatataatatataggacgttgaaaataatcttaattaattttcaatatgttttatttattaatgttacgtcattatattttgttgtatataatttatgaaaaaaaaaatactattgctacctaacaataatatataggttaattagttaaggatcccaaagagaatcgttatgcatatcctcataatcaccatgatcccagtactgatcattatcctgatcaccattgttgaatccaaacaccgctgactcctccaccatttgcatccacatctttggcgagtcaagcggagactcgttgattgcctgaatttggctcggcgaaagccgaaccgtgacaggcgccatacccataccatcagagccggagccaccaatctcctccactgtggaaggacccactgtcccacttctcagcctcaacgccgcctcctgagacgctatgcgaatgtcctccgaactcgagctcaccggtcggggtaggcagtcaacgaggtgagggaaattgaccctcgcctcacgtcccctgaaatgcagggccgccacatcataggcggctgctgccatctccggagtctcaaagcttccgagccaaattcttgttttcttgcctggttcacgaatttcggacacccacttgccccattttcgcttgcgaactcctctgtagatagaactggccgcgccatggttccccatgaagctattattattctcagtgcttggctctcccatgaaattactagctatatatatgtcagtatgtgtgtgtttgtgttctcaaatataatggttactatagaggaagtatattagatcatatacttaagtatgtcatgatatatgtaacatgttcttatttatagatgtgtatttatctttagcacattagatttttttagcttcatggaggtgaaacacatatgcttcgaagtaagcttccacgtaggttcacaaccaaaaagtttttcattatcattattttttctagttttaattgggtgaaggtgtgcatgtgtgttgggttattgagtcttatggaccatccattaaaacaaaatacaaacttatattcatgaaattatttgttatttaaaaaagaacaaaaaaaaaaaaatcccgtgtactagagacctatcacaactttattacaagatttttgtgcacatatgtacatagagcaagatttgtgattgctaaatttggtgaattcgataatgggaaattgaggtgcaaaatataaacttataataattggataaggagggaaaaacttatattatagataaatatttagatataaataaatgtcgttatccatggaatacgcggtttgtgaaataagatatttgcaattggacccactatacagtgaagtgaactctctcatggctaatctaattaatgaatatatgtatataatggaatgcacatcaaattagagaattctatagggctcgtgctcttatagtcctgaatggctcgtttggtgcaaaaaaattgctgcatatatggtacataacaattattaggttctattaatatagttaacctagacaaattcagttgagtcttcataattggagtttctagttagaggaattatgggtctaatgtatcgcactcacttcaaaaccctcctaacttatacacaagacccgaaagatagccatttaatctttcttgtattaattgttaattgattaggcctaacagtgtcgaattaatttgagatattattgcagatatgaccccaaatcatgcaagtaaatatacttagagaaataacacttttataccatttattatttatattattttttgccacgtaaaaaattaattttttttcttgtatattttttttagaattagaaacaaataatttaaagactattgtatatctatattaattttgttaaaatcttttttattaattatgtagattttttaaattttatataagttattgtggaatgttagtatatatattttgttgtgcagtatatttctgttttgttgtatgatatataattactctttgatgaaattatttattttttattttgctatgtataacagtggtatataattttgtaagcataatacaaacattttaatgtaggtatataattttatttttaaataatatccattaatttttattttattatatacgtacaatggtggtatataattttttttatcataatatatatatattttaattgtggtatattatttagttagtatagtatatagtatatatatatatattagtaatatatattttttttttattattgttagtatatatgttttgttgaatggtatatatactttttgttatacggtatatcattttttaaacagagtaaactgcggtaaaacctccaaaagtgtcaccttgctagcaattaaccccccaaactcattttttgacggtagaccctccaaacacgtgttcttttaacagattaccatttttatatattttgtagtgttaactgccatgttagatttacatagtgtattgcacatgtggataagtgtacacatggcacaatcttatttgtccacgcaataaatacattttaataaaaattaaaataaaaaataattcattttaaaaataaaataaaattatttacgaattatttttattttttcttttttactaaataaataaaagaataataattaaaaaaaatcctaatttcttttccatttgctgtgtcacttccatctttacaacctaaagcttcaaaccctaataatcctcaaagtgtggtgccactgacaccctcgaagtcgattgtctccatcacctccgctgcaattgacgatgggtaggtcagtagtagctctgacgccaacaaccctttaatctctcgaccttcttcttcttcatcaggtgggtaatggtcgaatctgttagagatttcattacaatgaaagaaaatcaagatattataactctattgtaatataatacaaggtccaacaaagaaattaagtattaaaacatataccacatatatatgtatatatgaataatataagtgatgaatagatacataatattatataacatatatataatatgaagaagaaaataagatcactcactcacaaccttgagtgtagattagtgagga

SEQ ID NO: 77903 - DNA, 755 bp, Cannabis sativa
ttaacaaccttaaaagttcaaggagtataatttggtacatgtcaaagttcaggggacaaaaatactaattagcttataaatttatacataaatttttaaaagacttaggctctaatccttgtatttaaataacttttaaaggactaattaactttgtccttaattagaagttaatgaaaagaatctcttgtctttttacaaagttttccagctaattaagtaataaggatataaccaattgaaatatactaacaatgtgtgagaactaaataggaaagaaaactaagttccaatgtttgtttaatttttttttttttttttttttggataattaaacaatagtttagtatgtacttaacatctaaaaggtacatcactaacaacaacaacaattacaaaaaagcatgaaaacaaataaaccctcttctaaaaaagttggcttttttcccccttaaaaaaaaaaaaaaggaaaaataaattactttatattaattaattaaacattgtagttatggtggggtaatcaataacctcccctcgtgggtaattaattaacaataatcagtccacaaaaagagtcctacaaaggacacacaaactttctttttttcttttgtaaggacaaaacttgtcattgttaatatacaaaaattttactatgattattgaactaatgggatgggccatggggtaccatttgtagtaaaagtgattatttataggtacttttaaataaattatgattaatattattt

SEQ ID NO: 77904 - DNA, 1555 bp, Cannabis sativa
  modified_base (1319)..(1320): a, c, t, g, unknown or other
gacccttataatctagttgctctctcttctctcaaggggtatcctttctctaaaaaaaagactatacataaatatacttttatttatatctataattttgtaaaagttattttttcaaaaatgtcataatgttggcattataagataaattgggtgttttttttttttttgtatgtaaggagtggagtatataatggatggtttgggatctcacatgatatccaaacggggcctacatgaaaccctaatttatgtagatgatcgaattttacctaccctatctatattttatcattttatcatgaacgtgtgaaagagtaatgtgggcaacttgttcaaataattttatatataaatcttatgtatggagctaggaggagggtgtcacatttactttactaataagatgtctctctttcactaatcaatatttaaagaaattataacctattctttttatacgattattttatagtagacatcttactaatttttaaaaaattatgaacaatttacgataaaaaaattgtaagctttatttatttactgagatttttagaaactaataaaatagaacttaaaaaaaaaaataataaacaataagcagataatttttatatagttcgggcgttaataatctttagtccatgagtcagttatattgaccttacaagcgagtgttgaataatacaagcttttacagtataaaacctacttctcactccttttgtttttcttgaagaagaaaaaagttagtaagaattttagtagagatttagctagtataaaattactcgctctttgtacataaaaatgagagtatttatatgcacatgtgttgagtttttgtgtcctaattaaaactctatttcaatgtaatcttgaatattcatttatcaataaaggaacataattattttattacttgtttaatacattgcttggttcacgtgtttatttcatgatcatttgtttgatttctaaattcatttaaatcttatcacattgttattcatgattactgtgttgtctacatagtggaaagtaatcgagattatgtgattaaatgtagtcccacgatttatcagtacacaggatttccactgatatgataatcaacaatgtagtttacttacacttgaatagtgttatgtctttaccaaggcattggtaaagtatgcttggattggatgtattgttatacatcggactggatcgatattgaacttggataagatatcataaacttatcgttatatatttctaagtcaatatcacttagttgatcttagaccaatgatctcaatcctgagatggtnnggttctagttcaattgtattatttatgttctttgacttggtcgttaaagttgaccaattagatcttcccgatacttataacttgagaatatggtagttcaattgagtgggagcgctaatcatagatgcgaaatctagagctcttcattctttttgagcaaagtcttcttagtcttcaacccattgttggctcgggtaagctccccaagttatttctgctggaaattattttacca

SEQ ID NO: 77905 - DNA, 767 bp, Cannabis sativa
ttctcctaccccgaatccgattattagacggggatggggcgaggatgggggtataaataggtagcggggataggggcgggaattgcattacccgtacattaacaagtccaatttccaatgtacttgcatatttatttttcctaattaacaagttttaggggataagttaaagaagtacttattttcttatccattaatcgaaaacaatatcaaattttattttattaaaatgtatttatttttgtaagtggattcttcaatatactttattttctacttaaatctagcacataattaataatttaatattaaaagagatataataagacaatatatcttagagaatgtaaaaataaaaattaaaacaactaaaataaaatagatatacactctaattttcattttttagatagccatatttgacatttcattcttactatcttttgaaagagtagatagaatgttatattttgaatctatttattaccactaaataaaatttcctaatgctgtcaagacatggtcatacggttgaaaaaagtgaactttaaactttatcattataaagatgaaatgtagttgagaaaatggaactttgataaatttaaactgaaatgtagttgggaaattggaaatgtctaaatatttttctatctattttctgttgttattttgagatatacaacaatttgcatcaaaataattttagaaatttatgtggtgggcctgtacacatggatatatcatttgtattatttcacaaatat

SEQ ID NO: 77906 - DNA, 987 bp, Cannabis sativa
caacctgttataccacatgccccatcacctctcgaatcacctaccaactctgcacccatccaccaatcattaccatcctcaactaccactactaaacaacccatcataaatataccagttgctacaaccaccaatattcaccctatgcatacacggtccaagtcaggcatctccaaaccaaaggttttaatggcatctctttatccactttcattaaaatcagcattagaagacagcaagtggtttgctgctatggggactgaattttatgctttggttaagaataatacatgggttcttgtcatctttcctgctggaaaaacacctattggttgtaaatgggtgtatcgaatcaaagaaaatgaagatgggtctctatctcggttcaaagcccgacttgtagcaaaagggtatcatcaataagatggtttcgacttcaatgaaactttcagtccggttataaaaccagtcactattcgggttgtcctcactatagctatctcaaaaggttggaccatacgacaattagatgttgataatgcatttctaaatggtgatttataagaggagatttacatgattcaacctctgggttttgaggatccccaatatcctgacagagtttgcaagttaaataaagcaatctatggtttaaagcaagcccctcgggcatggtttgacaaactttccactgttctagttgggtttggctttgtctctgctaaagctgatcattctttatttatcaaactcacggctgcaatagttctttatgtactggtgtatgtcgacgacatactaattacaggtagtgatgacaatgccatctccacttttgtttcagctttaaacaaagcctttgctttaaaagatcttggtacactgtcatactttctgggcattaaggcaattcatcatgatactggcatactcttatctcagcagaaatatatacaagatctactttgcaaagcccaattacaagga

SEQ ID NO: 77907 - DNA, 718 bp, Cannabis sativa
taaataaaataaaatttgagtggagcatttagggaatgataacatgtagagtatggtagagtacgtttattttacgaccttattttatgaaaaaagttctacccataccttattctattactctatattattttttgtaggtacgatataggcatagggtatccacaaataaccctacctaataaatttacgaaaattttaaaaatttaataaacttaagttcaataatataaaaaattaccaatatatttataattacttaaatagtaagttttaattctatgaattgtaaaattaatccaaaaaatataattgctaacaaccaaaataatacccaaaaaaaaatatatattagaataataaataattatgttagacttttatatttttataatagttaaatataaaagtatttttttatgtatttttttaaatatgaataaaatacatagtttttaaatatatacataaatatatatatatataatcgagtagggttataggagaggatacacttatacccgtcccttaccttgtatctgcatcggatacatctttttataccatcaccctaccctaagccttgactcggtaggggacaatttgaaaaaatatgcataaaatatcctaatattttatgcctaaactaatacatttcaaaattaaaaatatatgaccactttatcaaaaatccaagaatactcctctcataacaata

SEQ ID NO: 77908 - DNA, 1023 bp, Cannabis sativa
caacctaactatgatcctgcgatcgttcgtataggtgccgatatagtaaaagcctcatgcagcttgcttccttgtagggaccgcgttaactgagtaagaataggctatctccaaaggagtaggacactcccatcctaaaatatgatataggacctttaagctcgcaaggatcctatatgagatggggttcaacttgaagggggcaaccccgagatagttgcagaagtccttaaagtaatccctaaggggaagaaccgccccagccttgatgtgctcgaggctccaggcaccaatgcccgagggattgctcgtgctaggtccactgcactcctcgcgtattaccctttctggaggaaaacagttgaattcctcaggagccacagaccttatgatacaacctttcctctgcttgatactccaggactttagaatgccgccaacgtaggccctaattgacctaaccttggatttgatgagtttagcctcgaaggtgacattgggatcctgtggggtctttgatttgtgaggcttaggagacataatgttaaacacaaggtcacttggttcaaaagcaacagtgacttcaggtaaaaatatttgtctcgcaaacagaataaaagataatactgtgagttcaggccaggctgtgtctagcaaaaaacaatgctttcccttagaaatctcttgccaaaatcacctataacgactggaaatttacaaatatttatcagtcgagatctgagactattatgtttgtctaacggatgacatttctttgggatttgtcccattaaaaacaacaagctaagtcagaccaacaataaagattcaaaattcatactacaacattaataacagaaaataccataggttcaatataaattcatacacattcagaaattatcatatattcagcaagtaagcaagacatgtgaaaatacaaaacaagcacatcttaaataatttctaaggtttccaacaaactgatgcagtgtcccgtttagacgagagtaggggtgtata

SEQ ID NO: 77909 - DNA, 612 bp, Cannabis sativa
tttttttaacaaaatataaaaaaagctatttttaatgtttattgtcttttttttagagatagtaagaaaaatatatgtttctcacgtgttaaaatgataaccttgaaaaatagattacaatagtgttatttttgagtccatataataaatgttgtggctggaataaactttttgaaattttaaaaagaaaaataatgaaagaaatattataatatgctccaactagaaaataaaagaaaaagaaataagaaggtgaagctatatatatataaagtaataagaaaaaaaataaatacttttgagattcatttttaatctcgacacacgtgttaaaattaataccgaatactagtggtattttttgttttgaaagagaatcctagcggtatttgaagtaattaaatagtcaaagataatatcataaatactttgaaatagacgttctaatacgtaattatcccttttttaattgccatcattagtaattgaaagtttttttttatatgaataaaaatgcatattaataaaagaatgaatcattttcatgttgtgtgggaaagtaacttcatagttacttctaaattttattttcggtatcataagcaactaaat

SEQ ID NO: 77910 - DNA, 583 bp, Cannabis sativa
atgtatgaagtgggtgaattttgtttatgacattatgtcccaaagaataatatttctagggtattggctctcctaaaagtcaattgaatatagacaaagaaaaagaatctaaatgtcccatttagtggattttactaaattatatataattttaagcattttaaatatttatacatataaaaaattatgattcaatttttttttttgaacaaatgattctaaaatattttgagtgataaaagtttgggataaaaatcctacctatatatatactcttaaatatactatgtctaatcatattacattgtggagagtagtcaaacataatatatagctaattaatttttattatatgtatattcttacaccattagtgaaagttaatatgagaaatggaaacattaattgttttgactttaattaagaatatcaacgccaaaaaaaagtaggagaatattatgaaatggcacatatatattatatagaataattagcttttttagtccctgtacttatgacactatactatgatgccccttaatttataagtgtagttaaaaataccccctaaaatatatcagtt

SEQ ID NO: 77911 - DNA, 619 bp, Cannabis sativa
ctggtggtaaggttggagttttaccaagaccaaatcacctagcttaaattcaatgtcccgatacttcttgttggcctagtatcgcaattgatgttgtgctttttggagattttgtttcagctgcttgtgacatctgatctcttgtaagaagattatcttctactgcttgaatggtggtagtacctcgagtgtaggaaggaatggtaggtggagtacgaccatagaccgcctaaaaaggtgtcgtgccaatggtggagtaatagctcgtgttgtagtggtattccacccatgaaagaaatttactccatatttttaggtattcaacagtaaatgctctcatatattactccaaataacgattgctagctacagtttgtccatccgtttgagggtgataaaaagagctcatttttaaattagttcccattagctcaaatagtttcttccaaaaggaatttgtgaaaatggggtcacgactagaaataattgttcgaggcatgctgtgaactcgagtcaccatttgggaaaatagatcaggcactttggtagcagaatagtgaattggtaaggcaccaaagtgagcatatttggtgaatcaattaataaccaccaagatatt

SEQ ID NO: 77912 - DNA, 1507 bp, Cannabis sativa
taaataaataaatattttttttcattatccaatcttgtccagtccagtccaatccttttcagtctaatccagtccaatcctgcgtagcaaacgggccccaagtgtctaactacacaatagcgctatagtgtctaactacgcaatagcgcactacaagaaaaaattatgtactaaattagtataaatttaatagtgtgaaatttaatacacacgagtataatacataatttgatcttaaaaattaaaatgatatgaaaattctagaagagtgctcttacaacatcataataaacaatccattgcttttgtttaattttgtaattaacgatattatttatattagttaaaaaattacatcaaaattttttaaacaaaaaacaaaagtaacaaacaaccaccaccataccaaccaaagcaccaactgaaaccagctttcaccactaaccggcttagtttaaccaaacccctaatctaagaagaaaaaacgacaaaataaagaaaattctagtattttgtctctccctcagtaatttcgcctatgtccttttgttcatcatttccctgtcgtttctctattacatataatatttactcttttttatatctttattactattattatttacagcttgaattttagtaccctatgaataacccaatctccaatattagccgtaggatccatcgaacggtcatcgatcacattacggaacatgcattaggattttcatcactgaacatttgaggcgcgtggtaagggtccataggaacgccgtagccattgttcatcggataaccgtggttcgctgcgtagttgtcattcacgaacgcctggtgcgcgtgggcctccataacgtaacggttgtgagccgaaacaggatcctcgtaatacatcgccgatggctgaccgtacccaaaatactccatcttgttcacaatcgtagccggagccacgtcggccggggcggcggctggggcttttccatcggccttcttttccccacctccttctttcttctcttctttcttcttttcttcaccggcaggtgcaggtgcggcatctttgccctttttatcaccggcaccggcgtctttcttatcaccggcgggagccttagcaccgtcgtctttcttagccggcggaggaaccacgtctacgcttctcttgagcttagtttggagataaggagaaagctctttcacgtccatcgtgcccttcacggtaaccaaatctttgccaccatcaatctctactgattcaactcctgcattcataaagttttacatcgttaacacacaaaattactaaactacccctcactttatttcattcaactctctgccgaagggttatctctgaatttttttttaacgttaccacaaaatggtacatttaacctacttatgagaaattgaaccaccgcctaactcacttggcttctaaaagggtaattctactcatatattattaatttaatatataaggcggttcagtatatcaccatct

SEQ ID NO: 77913 - DNA, 897 bp, Cannabis sativa
tggaaggacgtcttggataggcacaaagcctactagctagaacagattatttggaaccccttcttggaggaaacagctatagccttctaaaacccctttcaagataacagtcaactttcccgttccacaagacttttttcagatggacaagttagccttccgaaacttcttttcggacggtgactaactttcttgaagactatttgagatatttttatttggagaaactatgcataccataaattattatataaaaaaaattaaaattaaaattattcagatatcgaaaagagaaaatgaatgtgaaatgcaccatgggaatttataaataactttgtagaaagtgaaagagaaagcaaaggagagggagactgagcctttagccacttttcatagccgtttcttcatttcgatgtgttttcggatgtaaagtgattcttccttccttctatagtatatatatctccattccatgcaaaatacatataataatatcaatatacataattctatatattatatgataattctaccgcaggaaccaattttttattttttatttatttatttagacttatatgtgtgtgagtgatgattctgagttcatctactaaaaaaggtgtattatatacttactatataaaatctgtgaaataaaaaattatttgtacattatttttttggaaaattatctgatatattatttttttaattcttttttttaatttataatttagattgctccggtagtttttatgttacggatttgagttgcgatctaggattcgatccgttagttactataaaagtttttgcgtggaattccgtaaaaatacaaaaaaaatatatatatattttaaagtataaaaatatcaaaattcctatttcttatttgtc

SEQ ID NO: 77914 - DNA, 2046 bp, Cannabis sativa
ttttttttttgctgtttttgtttttctcttttttttcttctgaactctaacaaagcttaaggttatatagaccattctactgaaactcaaattaccattctgtcctctgaccaaaacttcgctcatagtgtacacgtggcggattctcccgcggtcctagttttgattaagtttgtatgatttttgaatcttcgggtttcaagtattttcgccacgtttgtgggtcccgtcgattctggtgattgatcgtcaccgtcaaactttctctcgtggtatgattttactatcttgcccttgctgacgtgtatgtagggtttttaatagtcgttcgggcccaatgttctggtgtggtgtgtgtcgttttgtttatgactcaaaagtaaacagagttaattattgaaacgagggtaaaatagtaaataaagagtaaacatgaagattgaatatctctagcaagtagtgaagagagagcgataggaatattctcttgttggtacttgggaagttgggatagattcacgtgttggagagtgtaggataaaaagttggaggagtgtgaggtttcccgtctagaatcatgacacgtgtcactatcttgaaacggacccacaacttctttccttcttagtagtgcggttagtgataagtcagctttgaatcagctaggacctcattcaggtgcactgggtcccacctaaccttacatggtaattcacacctttttttgtagctgaatatggtaattctgattcacacaattgagctgtaaaaaccatcactcctctccttttttactcacacaattattgttttttattttatgtatttaagaaagaaatattttgagtaatttgggcatgtaactcgcaattattattttttttttttgaatggaaagtttaatttcttgcattaatattaatatttaaattgtaattttaaatttttttttaagtatttagatattaaatgttaagtaaattattacatgtaattcttaattgatggaagtcattaattttttattttttttaaaaaaaaaaattagtttaaatataccgtaaataacatttgaataatgatttaatatacttatagagttctataaatataaattaagccaaaaattaaatttaagtatttatttacaatctagagttaaacatagatattcataccttaaaatactcaaatatttttctaaatcaaatataaaagtccttaaatgggtataatttaaatgttatttttaataatattaatgtatgacaatgtttatcatattttgttaagaaaaaaaaatgacaatatttatcatatttattataaattttcatttcgaccattttagtaaatttattgtaaattattttgaattatttaaaaatttataactaatcttaaaaaattattataattaaaagctctcgtaaatgctaaaatagaaagtagagtatagcgaaaaacaaaaatagaaattatatctatttattctttgtggtgaaggcttctctaatttgttgtgtaactatgaacaaagtggcttacttatggtgtgctcgaggcgcaccggtaatctcttatatgctctttgttgacaacagctacatttactgtaaggcaactgaggaagaagcgtacaatgtgaaagaactgttgcatacttatgcggtggtttcagtgcaaagaatcaacttctctaagtcttccatgtttttcagcaataatactggaagtgcggtgagggattccatttgtgttatgttggaaatttatgagggtgataaaaatggctattacctgggtcttccgtgttcggtggggagaaataagaatgctatctttggttttctcaaggataagcttcgaaagagaattcaagggtgggaagggcgtattttatctcgtgcgggaaatgaggttttgctgaaatttattacttaagccttgccgaattatgctatgaatgtttttctcttgccttcagacacgtgcaaggagttaaagcgacttatggctaagttttggtggcaatcagattcgagt

SEQ ID NO: 77915 - DNA, 2801 bp, Cannabis sativa
tcttcttcttcttcttcaatttgggctaatgtgtaatttttttaaagttttggcctttaattcaatttttcttttttactttaacccctcaaaaaatggaaccttgtaaaaaaaatgctatttttgagaatggcattgtgagaaattttatgtatatactgattctacttcttcattgctgttattgttccattttttattttttttattatttgttattatattattattcaatttacagaaaagtttggaactttgaatgaatggtactttttttttcatcttcatcttctttttgttgagctttgtgtttcaattttgttaagtggtgatgggattgtgtaagtttggtgtctcttgttcttttggccttttattgtttttgtcatttttttcatttgcacttttcttggtttttaagtgaggacaactgttatgaaagtggggttttgtaatcggtaaacacaaatttggactcgtttaccattggatacaataaattgaattttttgttattgggtattagtattactcgcactttttattagtattatttttttaagttatataagagtgttagataccacttttagcaattctcttcataagtataattttttactattttaaaaaatacaaattaaatttatcattttcaaaatgagtgatccaatcatggtcactgagtttagatttttttcaaatcggataaaaataaatggtacaaaaccaaaaggaagaaatgataatcaattgaagagattaagaatgataaaagagaacaaaaatcaaccaaaatttccaacaatctattttagcagatacaaaagatttaacgattgactctacaaggtggtaagagagaaaaagaaagagaccctttaagctttggaaatcacttggacaattttgtacagaagaacaaacaaagaaaaaaaagtcagaattggtaataaatgtactctttgcacaagtggagtggtggtgatggtggcggcggtggtggtgggtacttctacaacacgaaaaaggagaagaacgaaataatgtgcctcatttacatgtcattagcatggagtttatgacgtgcatgaggagtctgatactggttatctcagcaccgttgattgtaggcaagttgcgttgatggtgcagtatctgatacacttgctcgaagattggtcttacgtgcattgcgatcatcgggtctgtagggtttatggctgctgcaacgtcggtcatccatcctagctttcgggttgtttctttgttgatatcgcacgctaactgttgcaacagcgaaagcaacactccttggctcagtggaagtggtgacattgacaatagaccccgaagatcaacctgtcaaaccatgtattttctcatcaatatctcaccgaaaccacttactcgagttctcctttgaaagggaaaggaatgaagaagaatacctgagaacacaaccatgatacaatcgtcaagtcggttctttgtagagctccagtgaaggcctcctcatacttctgttcggaaatcaatcttgacagttccttcgttggatccaagggaacctcaatctattatagacaacaagagtgagagcaatatcagtaatatgttgctgaaaaactcaaaagggaacttcaggagtaagagcaaaccttctcatggagaccacccaaaggaccgttacttagttgggtcaccaagggatttactccacctgcttttgctccagcagcagcaagagctatcagcttccgttgaccatcagccaactctccacttaatgtttgagttaccgatgacgctgcattcatagcatcctgaaaatacattcaataccatacaatgatttcagtaagtcaagcaaattgaaaaaccggtgataagacaaaacagtatacacgcacccttaaagtaagcgccaacggagagtgtgaactctcaaagtgctgctgagttgcattagaatgttcagccattcccttttgaaatgtagcatctacttgttcaaacatggctttgcatgacatctcaaacgcagggatcaccgaagagtcaaagctagatttcaatgcctcctatgaaaaagataaaagacaattcattaaaccatgatattcttagcaatcattgcaaggaaaactgcatcaatgttcccttattcgtacctgaagagcttgtttaccggtagtttgaaattgtgcttggatttgtctagcaactgtagcttcgagttttgagttgactgatttctccaactgatttactgccttgtcacctactcctctctgaaagcacaagcatcaagtcagatccaatccgagcacaacattttcctaatagaatgctaaataaattcaaaattcgaacctgaaaagattctgcaataactgaagatatcgttttctcaatagccggagtaattgctcgaattacagcaggtccaactgctgaaatttctttcttcagtgtcttatctaacaaggctggtaagtccttgcccattaagttactaatcaaactaacaatttgttgagttcgatcccgatatatcttatcatttttcgcactctcttcttgaaaacgagcccataaagcatcattactggccttaacagccttctccatgcttcgcccaatagcagcctctagtcttcttccctcctttgttactggaactgcaaccatcatcgacatatgcttctgcatgtctttctgcatggtcattagctgcacaaagtgatcaaagaaacaatgattagacatgtataccatgaaccaaataaggatttaga

SEQ ID NO: 77916 - DNA, 520 bp, Cannabis sativa
aaatcaaacataaatggaaagataatagatcctctctttcagattggatttagactattgtttcttctttgtctcattttctcaatgcctctatcgacttcatccctagagatcaaaatgttcttgcccataggctgacgaagagagctttggaaacaaatggagaatatgtttggaattcatgtggttccaatgtttcatttttctgattttgtgtccgtgttttccatttccttctctttttttagttacagatcagtttccaaaaaaaaaaaaaaaagttaaccgtttgaaatttatttttctcttcgtctggaatctaaactaaagagtagtaaaatgtgatcgagggaatcttcaaggttatagctatttgctatagccatgtaatcttagattcagtttagaatgccactaattaataatttttcgaaaaatcattgtctcttgttttgctgttaggagaaattcaaatactaaggtcatcatcaattttaagctatagtttcacacactaaaa

SEQ ID NO: 77917 - DNA, 530 bp, Cannabis sativa
  modified_base (302)..(316): a, c, t, g, unknown or other
tatataattattattaatatatatctacatagaattattagtttgtatctgtagatcattgtacgtaggaccaaaccaagtgacaataaatatgcaatgaacaagagttagccagcttttcagaaattccatttgactatgattatatagtgacaaagtatttggttacatatatttattctatataaattctagttatttattaacagaatttttaatttaataatatttttaaattttttatgttaatagaatattctaattacacactgaatagaatatttttttttattaattttatnnnnnnnnnnnnnnnatatatttaaaaataaaaataatatagatattttaaataaagaatttaatttaattttatatatttaatcataaattaaatctatatataaaatatatatgtatttcaattttaatttacaacaaaccttttgttttaaatataattaatgatattgttcaaaaaaaataaattaatgatatatatatgtttataataatttatacaagatcgg

SEQ ID NO: 77918 - DNA, 504 bp, Cannabis sativa
gtgaggactcacacactggaccactacacgcgcgcacgccgccgccgtccatccgaccaagctgggttgggttggtgggtgaggtgtcacttaattttttaaagaaaagctatttagttaaataaagatttaatttttttatttttaacacgtgatcagaagaaaacgcgatcagtcaatgatccgctttttactctcatgatccaactcctcaacgaacgatagcattaccgttttcttactgtttatttttggatcgacttctatataagtcgtatcagaacaacgtaagaacatatcttttccaacattaaaaaaatcttttctttcttccttacgatttttctcagagcaaactttagggtgtaacagagcgatatagttcggtacagaacatatcgtatgtatacagaggttgttttatcatggggacaccgtggctgctagactgccgtgtacacttcgggtagagccacgaaacgtcttaaagagagcgacattttc

SEQ ID NO: 77919 - DNA, 2500 bp, Cannabis sativa
taccgccaaaaatacgacttaggtatttatctgctactcggcataaaacttaggtatttatgccgcaaattactctttttaaaattactattgatccttagtacttttcttttcggatttttatggtttttctttgagtttaagtatgtaatttttagtgatttggttatgtccgaaccctaagctcttagaagttattttcttggccaattttaggttgtttggtgcttagttgagctggttttggtggctaagtgagtggttgaacaagtttgacttcaagaactcaaacttggttcaataatagcattttttgattttgtgtgttttactggttgttattacttgggttttatttattgatgcgtaaataggtgttctggaacttggtttcaagtttggggatggttttagctcgaattgagacttggtatttttttgcagtagaaaacggcagaccgtgactggcagattatcgagaaaaacggcctaccattttttctagcagttttctaaagtctcgttttttcatgtttcctcaatatttaagacattgtcatgctacttatcgatagagaaacttctaatttttagtttaggtcctcgtaaaggttttagcaagttgtttacccattttgcgtgactgtgatatagagactccgttcagcgcataaatttctattcacgttaaccgacacacttaaatcagaaaataaagtaatattagtataaaatgtgtatgtgtattatatgaatgtagtattatgtgatttatatactagcaacactagtaaggttacagtactgagtgtattggtacagtatatgatgtctaagggtacgacacagtcttaccaacaatagtacgggaagagtacgtagtgcatgtggtataacagtcagtggtactcggggtacgattcagccctaccaacaccagtacgggacaaatatctagtgcatgtagtacagaggtcgtacttctgttaagaacgttcttgatgcatctgaagccttttaaataggtgtatggccgcctagatacaagttgttattatgttataagttttgtgcttttgttacttagtttgtcgactcacagttactgtttacatgtgtaggtaaaggaaagacgaaggttgagcaccagtgagtcaaatgcttgaggagattgtacatatcaggattgttagacttggagagtttggtctcaggacgacttgggcctttattttgtagtcgcagagcaatgaagcaacatatttacaaaatgtattctgaatggttataaacttttaagacgggatcccgacttttatgtacggttgtaaatttataaaagtttaaagtttaattaaaagtttaaatttgacatgattttcaagaaatcctttgattagcaaaggcatgcacaataattagaaaattattgtagcgtgcctaaataagtaaggcattacaatttagtaccagagttgccaagttatttaccaaaaaccatcaagatatgtataatcatcgttagagacaagctcaacttacggttcagtaagcctttacttgtttggtgatttatttggttagaaaagcatgataggaagcatgttagtaatatattaattgaataatgtgttgcctaaaatcctatgtatgcagtaatttaattgtacatgatcgttgtttgacctacttgacttatgggttcacaggctaagtcatatattaaggacgcccagtgaaatacaaggagtcagggtaatacggttgagactggagatagttggggaggtcgttatcctctaaatctttgtggacgcggcaaaggccgtggtagatttcaaggaagtggttatgaaaatccattacaggctcctcaagattgggagaaaaggtttgtaaaaatgcaagcccaaattaattagcaagatgaagagatccagagcctgagacagtagggtcctcctgctatgcctccccagcaaatgacattcgctttggttctagtggtgccagcagaataagatgttgctagtaaccgcatcgatcctttgtatgagaaattccgcaaataaatgcctccaacttttctaggaggtcctaatgtcatgaaggcagaacaatggctgaaagtgattgaaaggatcctgatcctgaattttatggaattttatgggtgtttatgggtgtcaccgaaaatgactgggtgacctgtgccacgtttcaattctagggggacaccctcgtgtggtgggaattggtgtccctcacatgggacgtcactacaatgacctgggaagagttccaagatctgtttaatgctaaatattacaatgaggcaatttgtagtgctaagagaaaggagtacattgagttggtttagggagagaccatgttagtgacagagtatacaactaagtttgatcgacttgccaagttggcttcaggtatagtacctacagattttagaaagaaagaaaaatatttggcaggtttgaatgcc

SEQ ID NO: 77920 - DNA, 2062 bp, Cannabis sativa
atcaactacttttttttaaatagtgctatataaaatatattgaaaaacggcggacaagtggcatatgctataacctacccatctgatccattttccaaaccataatacttgactattccaaaatgaatatcgaaaaacataaataatatattttcacaaaacctatagatatacataattatttaaaatatatacatggtactattttaatttgaactattcatacgtatctataactttcgatatattatatcatcttaatcttgaccaaacccacccaccaaccaacaactgaactatatatagaggtggctcacaagatcaatataaagcaattcaatctacatacaatagagtatatacacatctctataaataagcctaaaactccctttataaacatacccatacaccttatatatcctaaatttctcatattattaatccatggcgccattttgtgttgtgaggaaagatttcgagcttgtaaagccctcaataccaactccttcagaggttctttctttctcaaccattgataacgatgttaacatggaaacaatctccccaaccatcttcgtctgccaatcaataattactaccaataataataacaacaacgccgaagaagacccagctaagttgatcaaacaaactctgtccgaggttttggtgcattactaccctttagcagggagactcaaacgacacacccacgacggaaggcttaggctcacttgcaacacaaacggcgtgccgtttttggaggccacagccgactgtacactctcttcactaagttacttagacgatctcaacttcgaaatagccaaagaattcgtctctacttcagccccagctgatttcatcgacgaaaagaccggttacgcccctctcattatgcaggtcactaaattctcttgtgggggtttcactattggatttggtctctctcactctgttagtgatgggtttggcgcggctcagtttttccaagccatagctgaggtttctaaaggtaaaaagctttcggttaagccggtttgggaaagagaaaggcttgttggttcacctattaaagagcctataaaggttgataatgggttatttcctgctaaatcgccttatttaccattttctgatgttgttgatgagtgtttttatgtgaagagtgaaagcataaagagactaaaagaaagtttagctgaagagatgaatagtgttcattgttctttaactactttcgaagtacttgctgcttatgtatggagagcaagattaagagcattgaaactcaaccctgatgggataacaactctgttcttcgcaactggtttaagaaaggttataaaccctcctttgcctgaagggtattatgggaatgcttttttgacttcggctgttgagataactggcaaagaacttgatgagaaaccgttatctgaggtggctaatttgattaaggagaagaagaaagatgtttttgataataattacattagaaaatctattgatgtgttggagactgagttggtgactagacagaatgagaagattaaggccacgggtgcactcatggctgttactgattggagaaatttgggcttagttgttgaggaaattgggtttggttggaaagtggtgaatgttacaacgttgcaatgggagtgttttgggtccgttgatttgtgtacttttttgcctcctccaaaatctgacccttcgatgaaaaatgccgttggggttttggtttcacttcctagaccagccatgaccaagttcaaggaagagatgaacgatcttatggttattaattaattaaattattcttgctttttttattattacttttaatatgttgcttaaattttcggtttgattatttatatataaattattactgtttaattaatcaaaaataataaatatctataattaaatgtataaaaaagcatactatgtattagaaggtacgtgcttaattaagggaatgttttataaagtacatttttaataattatgacttttattagcttgagtgttgatgaagacttttgtacat

SEQ ID NO: 77921 - DNA, 803 bp, Cannabis sativa
gcatgttaactgttatgtaatttaaaaaaactctaatgccaattattttgtaggaaacaaatattgagaagagtcaaaataatgaatgatggaataaattttattaactgttattattcaattttaaaagataaattagtttacataataatgttttcctttataatcaatatatgacaggattgtaatttggaagatgaagatgttgacaacacacatgttactggtgccggtgaaagtagaaagagaaaactcctcattcttgatgatgaagatgaagaagctggtgatgatgttgaagatgaaaataattagttaattagtgtttattgttggagttttgaggtggttgggcctgtaggccacttttatttgtgtggttttagtgtgattctggtttttttatttccttatgtgtgtttagtgtttgtctggttgttaggcctttaggctatttctctttgtgtgtttttacattatatggttatgtaatggtactattttcactttataaatattttaatcgagatttaatatgactttaaatattattttattttattaatttttacaataacaatactaagtcatttataaattaaataataattaataatacagtaaaaatgtaataaattatataataatagtaaaatatataatatataactataaacttaattataaaactgtaacaatgattatcatatctaatttgtctttcattttcaaattttaatgttgaaataattctaagaatctaataactacagaaccaattattaaattaaaaataataataa

SEQ ID NO: 77922 - DNA, 1493 bp, Cannabis sativa
tttttttttttttgttttaagcgtttatatattacaaccatgttttacttgggactcgaacccaagacctccaagacacacacccacttatggccacttgagctagtctcaagtaattttttttatgactgatgttgatattcaataatttcacccttgtatacaataagttttttttgcttaattctcatgggtggttgttctctaagactttataaaaataaattaataaaaaagtactaattaaaagaaacaaacatgttgctagggctagtctgcatgtataatttcatatattttattaatttaataattattataaaataaacgctaatgatatatattaactttttgaaaatcgcgtattttctaagtaattagtaatgatgaataatactcaataattaaccatattatgaatcattaactaaatgtaaactagtgtgcatattgttatattggagttaaaataaatggtatttaaaccaaaatatgagcactaaatgtaaataataacaatagaatttaaagagatttttcccgtattgcattttattgatctttattgaaggtcgagaatgagctcttgaatgtaaggaatgaaaataacagttattttgctctttgagtgataatttttggatccccttttcaattatgggtgaccccttatataaagaaaatagtatatgcgtctcatcaagagacgcgcgaccttggtgctatctatgtccaaatataggcaggtgtccatctcacccgcttaaacatacctttggagttagttactcatcttaaagagtgatcgcttaaacgtactccggcgggatagttactcactctaagaaggtaattgcgtaaacatacttttaggggtagttattcaatctcatccccgtgcatttttcaatgcatatattgtgtgactttttattttatatatatatatatatatatatatattgtatttaagttcattttataataaacaaaaactggccagtttaaaatgtagacacatctcagtaatatttaatttatccttactagtcctcttatgataatttaatttataaattaatatgcaatgctttgaaaattttgtttttgggaggagctatatagcaagtagaccggtcccccttttaaaaaaaacaattgtcataatcatcttcacataatatgatatatacatattatttaattatttttaattaattatatatattctgattataatttttaccttctcaattttgaaatttattaaattatccctttcaaatttttcaatgcagaattatattgagattgttagattagactagatacaataattgttgatgtactaaattatgttttttaaattttttatatttataaaaattatgtctctgaacttttatcaacatcattctttagtaaaattattagataaaaattcttaaatttagtaatctaattaagatgttaaaatgatgttaataaaattt

SEQ ID NO: 77923 - DNA, 3983 bp, Cannabis sativa
aaaacatcaaaatggacaatttttgaaaatattttttttgtctacatattatattttacatttttgttcatatacccggaccttggacgcagaccatggaactcggagcccaaaccccagacctcagactcggaccccaagatcggacccaaacttggaccctaactcggacccagaccatgaccccgaacccgaacccggatttggaccaggaccgacctcgatctcggacccggacctgaacctgaacctggacccagacttaaacccaaatccagatcccagaccccgaaatcgggtttaggttcggatttgggtctgagtccgagtccggatcagcattcgcgttcaggtctaggtccgggatccagtccaaagttggatgggttcatgtcatggggtatggtgtagaatattaatgttatttttagtaaaaaaaaaatctaaaaatatttttaaaaaacctaagccaacaccattaaatttttaaaaatgataaaaaattctaacttttaaaaacacgattctaaaaactaaaaactgtaaacaacctccaagattttggttattacattcaagattgatttagtttagatttgttagtgtccacatctttcttttaaatccaacctttttcatattaaaaaaaataagaaatttttacaaaaatactgaattttgagcaaaaaatttataattttactgtcacacgaatttttttataaaaatactattttttttttataaaataactataataacaaaacagaacaattaaaaataatagtagaacaactaaaaaaataatagtggaacaacggtaaaaacttaacacagtatacagtatttttgaaaaaaattctaaccccacattaaaaaagaaaaaagaaaaaaaatgaaaaattaaaaattaataaaaaaaaaaaaaaaacaaacagtaaagataagaaagatgtgctttgttatgttatagggccatcatcaagcccaatagccgcctaagtagattgggcctggaatatcagtagactgtaatgtataataactacactgtatataatgggacaaaagtaccatgtacttttgagttaagatcagagatggtggagaccactttttacaacttcaaaattttctactaaaaaatatctattattggttgataaagcctctgctgctggattttttatttatatattttttaattattttgctggaaaaagaagatctgtttggtactttcttggtgtgttttggtaacagggaatctgtatcatttgctaaccattataatactttttgaaaaaatgagacaacaaagtaaacccattaatgatatatcattttatttacccttgacaaaaaaaaattaatttaaaatgactaaaaaaattatagagattgtaaaatttgatagattcaagagtacaatttttatactcgagaaatcgctagattcaagaaaatcattttaaatgatgttaaaattatgtaaaaagaattagttttatttttttatttattaatattattttaagaatgagtagctacatgtgaatggaaagaagtgattttgtttggcccccacagtttcattggtacagccaatattttaaatcaaatgacttattttttaaagaggtaaaaaagatgctgtgacatagctttcatggatcccaccatgactgcccaactgaccaacccaaaagatccctctgcactgcataaacacagtacctcacattattccaaaagggtttgtaaaaaagaaagattttaaaggcaataaaagcaaaagcattccctcttcttattaattacctcttgccgtggattatggagattagagataatatattattagttttggtaaattttgaaaaagagaaagaaaagaaagtaaatgggagtggaaatggacaaactaaaaatgtatcaactttgacctttagacacaaaatctggttgtcttcatttgcaggaggtcaagattttttaaacctggaagataagacctatgcttcaaaaaattattgttacccaactgtttcttcttgactattgttctctttctctatctcataatttgaatgattaaatacaaaaaaaaggtcacaccattcggaaacaagaacaaattgacaaagaatacccttttgtttctattctcccatccatgtgctattttctatccaattgttaaaccaaccaataaataaacaaactaccttattatatgaatgtgaactaatgtgaaaccaaacaagtaaatgctattgagtttagttacacgtgcaatgcagcatggttctgtatatttggttgtaatcagattcagactcagcaccattgatgaaaaaagtcatcacttttggaaataaaagactctccttgccaagaagggtagagtagtacaccaaagaaaaagacaaccaaattatatataatgataatttaacatcatgatataagtttggattgagcaaaacattgatcaagatttaatattagaatgccttaagagtaatgtatcattgtgttgtgtcaatgaacaagatatgatatacataaacagtaatggcacaaggccaatcatcagaatcactgaattagcatcacaaaaataattttcaaaaagaagaacaattaaaaaactaacccaactcctggccaaactcttctagtgagaaccgattcaaaattataataatagtaataataatcacaacacaaaataaataaagaatatacctttctgtctctctctccctatctctctctctttctcactgtattcactcatattatcatacccctaaggtacttttttccatccatggcaaatccaaattcagagaagaaggcataccagcttgtgaatctgttgaagttgaaaactttcccttcttagaccaaagccagatcttggaaacagaatagctttcacctttacttacactgctaatcttctttccctccatatctccatcatcaactgtagtaggattattaccttgttcaattgctttgcttaatcgatcagtacaaaagggtaccctgagaactgagtcatcaagtacatattgataagatcccattgaaaaacatcttcttgcatccaaattactactactggtttctccaatcccagattctcctcctgttgtttcctcagcatttacctttctgaatttaccaagcctaacaggcaaaacaccctttttattattaacaacagcagtttcttcaatctctactgttttctgagaagaagtgtacccaccaataccattattgttagaacgcacatcatcttgaaaatcatcaaaatcaaacattgggttttcaatagaatagccaggagtgaaaagggttcctctacagagaggacatgttgagtttgagagaagccaagtgtctatgcaactgatatgaaaagcatggctacacacaggaagcaatctaagcttgtccttttcagaaaactcacaaagacaaacagcacaatcaaacggttctttaagacccacaatctctttataatgaaaaacaggtaaagcatctataaaagcttgatctaaaccagaatcatggaggtggaagagttgctgaagctgtctctgaagagcatcagatgtagaaagttctgggtatctattagattgagaagaagctgatgaagatggatgctttatgagaaatctaacgagcaagtgaagcagaccagatatgaagaaaagcacagccaaaatcacaataataaaaagaacagcaggacttatttttgtaccagatgaagatgatgatggtgttgatgatgatgatgatgttggtgttggtggttctttatgaaaaccaccactatatggagcaggaacaaatggaggagagtaacccatgtaaccatctttttggagaatatggagttgaatccgagacattttcctctttgctctatctcattccacaaagccaaatgtaaa

SEQ ID NO: 77924 - DNA, 2872 bp, Cannabis sativa
tgcgggtgcggtttggaaaattagaaaaaccgcatgtgcaggttggtttgaaaaaatagttaaaaaccgcaccacccgcaccgtgaacacccctagcactaaatactaaaattctacatcatgtaaggtagtgataaaaggtggtgtgttgccgtgttggtattggtgtccattaacaaatattctttattttatgagtagtgttagctacaacaaacaatgttgttgtgacatgtattttaaaatcaattattctatactacattttcaatatattattattattattattattattattattatgattttggcaggcatatgggctgacagaacatagctgcatcactctgacccacggggacgatcctgccaatgggtatagccgagcgaagaagaactcagtgggtttcatccttccaaatttggaagtcaaatttcttgaccctgatactgctcgttctctccccaaaaacaccccaggcgaattatgtgtcagaagccaatgtgtaatgcaaggtatatacgtaccctatatatgatatgatatatcccattatcatttcatttcttatatatatatgggttttatttgttacaaatttatgttacgtaggttactacaacaacaaagaagagactgcccgagccattgacaaggagggttggctccacaccggtgacattggctacattgatgaagatggtgatgtcttcattgttgatcgcatcaaagaaatgattaagtacaaaggtttccaagtaagatccaatatatatatataatcataatcattctaaacaaacaaataaatattgtcaccattatatataaattccgtcctttagattataccttccacctaattatttatacacgtataatatgtatgtttgactaagtttcaatttccggccttatgtagttaaaaatataaaataataaaaagttttgatatatattttatgtttaaatacaatttttattattttttttaaaaaaaaatcttgtaaattattctaattataaaaaatatatgctaaaaaatggcacaattttaaattaaaaaataataaagaaaaattatttttttatatacttctagatgaacattttttaatcctatgaaaaaaaaaacttaaaagcttagccaaaaaagaatgttttaactagtgacctaatcataattaattatagtaattaacaacatatataattcaatcaggcacaataattacgttattcataagaagtaaatttttttaaaaaatttaaataatagatcaaaaattaaaaaaaaaaattataaaaatgcagtaatatatatatatattttccatttttactctttgcactattttaataaaaataatatattatttctttaattattttataattattgtgaaattattttttatttatttttaattattttataatttatttatagttgatatagttgtcctaagatttatttttcaatatttttgtactttttgttgagtaaagtatatgtttttgtaattttaaaacttaccagtatatttttataaataaaaactttacccgctaaaattgtatataatacataaaaaaaaaaggatatttttgaattttttattcttttgcatttaatttgaatagaaaaaaaaattggggacatgtcactcccctcctagatccatgtcaatgggcaacttaaagtgtcctaacaccaaatgtactatatatagcttaccgctattaatagtcctaatacagttgtactaattatattaatggattgggtgatttgcaggtggctccagctgaactagaagccattcttctgactcatccttctgttgaagacgcagcagtgttcccgtaagttgtggtcgttttttttatgatgaaagagatactttaatatacatatttaggttaattaatattattaatgaatattatttcagaatggttgatgaggaggcaggggagatcccagctgcgtgtgtagtgttggccccagaagccaaagaaagcgaagaagaaataatgaaatacgtggcttccaatgtggcccactataagaaagttagagcggtacattttgtggattctataccaaaatcaccttcgggcaaaatcatgagaaggcttctcaaacaagccatggccaaaattcacccttaatatctatatctatatctatatatagaattatatttaccacatacgtaatccaaaaataatgtatgagtaacttaatctacaagattatatgtgtaaaatctcatataatatattcaataaacttaattattacttggcgacctgtattttatttttaactctttcctaggatcaaggcaatattttgtaggatataatttccccaaaaaataaaataatattttatgggatagctataattgcaaacttttatattcatttagaaatacaaaacaaaataattttgatacaagaatattatatatatttatattcttgtggtgatcattatatagctttttgaagaattatggttatttttcaatagtcatgctagacgtgagtttcaataaataaataaaagtaagtacagttatagttggaatacaaggaaaatttcattaattatgcttacattagacaaaaattaattctctaaatttatatgtatcattattaaaaaaaaatgggtatacaaatatttaagtactcaaaatactaatttataccgccattttctcttcactctctttttctcaacctcattttcactcattctatctaacaattcaaactaaaattttatttttagttataaattaaactctcaaaactactacacagtgctaaaagttcgaggctttggtatgagac

SEQ ID NO: 77925 - DNA, 662 bp, Cannabis sativa
  modified_base (373)..(373): a, c, t, g, unknown or other
taccttggatgagaaaacttgttcttcaacttaattgtgtctctttcaattaaccaaaaagcattgcaaggaatcgtaatgcccaacatcatcttaaattcttaatattgatttgtgcaattaattattggattccacatattatatcaccatagagctaaaagggatgattacatgaggcatcattttttataaaaaaaaatatattttttacgtttaaagaattttttttatatttttacagttttttatagaaacaacaaaaaaactacataaaagcaacatgaaaataatatttaaataacatcaaaacaacaacaaaaaatcaacaataaattaacaagagtacaataaaaaaagaccgtattttctntaaataaaataaaaaaaattgtaaaaataattaaaattccgtgaaaccttatttttgtaatttttttgttgtttttttgtgtatttgtaaaataatcccttaatggaatgccaaaatattagtatgcattactatattttagcacacttaaaaaaaatattgttattggacaccagtagtgctagcggtatgacactaaagagggtgttaagcattactaccaatagtgcattttagcaattctctaagaaaagctactattctaatgatgttcgaaaaagtgtactaa

SEQ ID NO: 77926 - DNA, 605 bp, Cannabis sativa
aaaaaaaaaaaagcaagattgatgttctgcctaccgtattaaagaatataataaaaacattttttcatataggtgtggctggctaaaattattagtagtacaaattcaaaatattatttttttgaaaaattaaatcaaactatttcaaaattaatatctatatacaactaagaaagtaatttaatttttttagtataatagaaaaaataaaatttattaataaaataaataagaatttaaaaaaaaaattatttcaaaatctaataatattaaattatattatgtgattgtatattattcttgttaatttatttattggaaaaagttccataaaataagaatatttttttaattcatcacattattaatattattcataattattattatagggtgattttacatgcaccccactaaaatgggtgtactgatgtaatccctaactgtttcagcatctttaggaattttttagtctaaatttttgtatagttgtgtacgttattgtaatttaagacatccttcaaaattttaaaaaattcaaaataatttacaatatagaaatcaatgttcaaatcgtctaattcacatgcgtataaaataaaaaa

SEQ ID NO: 77927 - DNA, 533 bp, Cannabis sativa
caaaaaaaaaaaaaaagacgtaatagatttggttagtgcattagttcctaaaacataaaatgtcacaaaaccaacactagccacaactaatattaaatgagaaacaccattaacatattaatagaactaattaacataacatttttgactttaagtattattaatccaagaaatagcagactccaccttaagcacactataactacttaataatacttatatataataaatagataagtatatataatttgaatacagctaataattctaaaaattataacagtagtacaaatttaattattatatgatgaaccctagattttcggcaattattatatataatatggacaaaaatatcactatataactcaccttcacctaaagccataaattttagttgaaatgaaatatcaataattatagtaaatatataattaatgtacctaccatatatatattcatcataaaataaaaattaaaaaacaaagaaaaattaacaattaataagaagtttttcattatatatttcaaaa

SEQ ID NO: 77928 - DNA, 1201 bp, Cannabis sativa
aaggagccaaaatccaacaaattccaattaccttagctataattttaagagttgccttgatatagatatatactacttgtcccttgtgttttaaggtggtggagtcttccactcttactctttgggcatgttgtattcaccacgattctttctattatcttatgctttagctgtttcgtgtttaaagcaaaaggagttcgagagattgatcgatggtggtgaatatatatagtgttgcatgagcacacttttctgaaagttgacccggtggtagtggggcttgactaccatgatcgattttctcaagcaacatttttgttcatctcctcaagcttggcggtttggtctctaacatttatctagggatagtcgaagctatatttccatacttattgaatatgattgccttttttgttgtgaatgctttgaaagttaaaagttgtaataactgtgaatgttggaaaaaactattgttagagatgtcataattattgtttgtactgatttttttaatgtttatattggttatacatagccctcatgtggtgaattatgatgtgtggtgggctgactgcttttatattgtcttacttttgttataatgaatagttttattcatcaatgtgatctctttgccactgctttttccctcttgagactctctcttgagttttaatttcaatggggccggccaagcttttcgaaagatgaaaaatggtactagaaaaactatgtgcattgtgcaacccatttttcccctttcattttatatggcaagtgataaactttaagtccaaacatataaaaatgaattttatatatatgagacctttacatagatcaaatatatatatatactaaactcctgtcctctcattctttaagggacactttcttcatatcattattactttttgagacaaatgctttcgatctaacatgtcatatatactattattatatgttgtcatgttggtatgaacccctagtttggataactagacagaacagatgtaaggcttttagacccaataattcacactaactggccctccattaaggagtactacgcatgcgcaattgcatttctaaaaaaaaaaagaaaaagaaaaaaaaggcactttcattacattaacatttctaaacttttttcactttgaaattcatcacaataatagttcacaattttttaagaacagca

SEQ ID NO: 77929 - DNA, 583 bp, Cannabis sativa
aatctcttgtaggttttggtcaattgggaaattattttatatattattttttaatttcttttatatttacggtttgagttgctttgttaatgtaggttactatgtgaattttagtcacggttctttaaatttctatgcaaattttagtcgcgatttagattgttctttaaattggtatgcgaattttagtcgcaatttatattgttctttaaatttatgtaagaaatgtaaaaaaaaaaaaatactaatttaaaatgtaaaataataataataaaaaaagtactaatttttatcctatagtattcataatatgtatggtgccgagtacctactacctaattagcagttgttttttaattattatttaaataaaataaacaacattcgatgttaaattagttacagtagcacacttaattagcatcaacacaccacacaagtaagaatttttgttagagcctgatcagcctagtaaatactaaatatataattatattttattcacaataaattagtcctgtatctccgtatacatctaagaattctagtagaattatacgtttatgtattatgtgcatttaat

SEQ ID NO: 77930 - DNA, 716 bp, Cannabis sativa
aataataataataatatgagaatagagggatgacctaaccttatttatttatttaaatcaattatctcatgtttttaattttgtagcagtgaattatttcaaaattatcttattataataacaaaagctataaaaatatatagctatagttgactagatatcctagaaaatatgaagtatgaaaaatatatataaatggatatattttactaagcagtttatgaaagtttgcatgaaaattaattaatattataattttgcttgggtcatataattgtttatgagactatcgttttcattaccaaaccaattctgacaataatcttgtaaattttgtttgtcgtatatatatatatatatgacgcattataatttattttgaagaaaagacaacgtaacattgctaaagccctataaataaaaaatgttttaccaacaaatttttagaccactcacaacaatttctctatctattctatcttttgatataactcatcaaaactttactcatttatttctccttatatttatatattatattatatatcaatttttctgtatcatttaaaaataatttattttaatatattttattcgtttcaaaaaaataattaataaatctaataatatcacacatatattaattagtattaccttctaacttcaaatttcttacttttacacaccacatgttaatttatatatatatatacaca

SEQ ID NO: 77931 - DNA, 1642 bp, Cannabis sativa
gagctcgacttttccaggcccatatggatgatggggcggacgcctgtcatcaacgcgcccgcctcatcatctttactcgacagcttagccctagcacttgatactagggctaccgcctcaagacctagtccagggaataatcaacaacataacaacccaactaaccgacattttttagagtcatggattaccttccaattttctcgagaaaatgacgatgatcatgacgatgaaaatgacgatgttttcacgaatgctttaaacgacgtagcattaggaggaggaggaggagatcatgagcggcgtcggcggcaatcggccgagctgatgatggaagggttgggtagagttagggttacggaaatggagctgagaaaggatccgatttgtcctgtttgtaaggaggagtttgagattggggaggaagtgagagaattggcgtgtaaacatttctatcataatgattgtattcttccatggctaagactccataccacttgtccggtttgtcgttacgatattgatgaggatagtaatgatcatcgtgatgacgtgtccaatacggtgcgtttttggtggactcagttgctttctctttggccttttcgtgctttattcaatggttggagacataggatgaccttatttggttatccacatgaggatcaacaccataacctttcttcaggtacgtacttaattttttattttgtcttagaataattttatgagtaaatcaagaattaatttcagttaattatatgagtactgcccaattaatacatgtatttaattaattaattaattattaactttttgttgcagctaacaccaggtggccctcttggctcattatatgaaaaattgaaaaatatagggcgcagaaaaagatttggttattaaaatgcttatcattttagaaatcaattaattaattaattaataataatattactcaagctaactgcagccacgaaatggtttcaaattaaatttatcaggtagtatatatatacaaaggtatgccactacatatacacgatgatatattattcttttgaagacctaaaattcttgtattttgatggtaatatatttgcatatatatataaatatatatatatagatattaataataacgtatttttgtcctaggaaatatatatcatttaatttacgttcagtttaggaacgatttatatcttttataatatttatgcatacacataattatatgttacttctttctaacgcaattttgttttgcagttctcgtttaagttggagatgtgtgtagcgcatataagtatatatatgtaaaacttaatttttatctcttttatttattgacaatgatgttgttgtaactttgataaaaatttcataaattaatattggatatacagtgatttcgttttctaacaatgatgagtaataacactcttatctctttctaagcatattcattcatattacacaatcacgtgccaccttatgggaaaatatgttattttttgaatattttttttcttttctagttgataaaaaagttgttgttgatatatatctccaaccttcttctattataaaaatttgtgataaaaatataaaaattgacgtggttctagccttaaaagattct

SEQ ID NO: 77932 - DNA, 509 bp, Cannabis sativa
agagcccatttcgaataactgaatgaatacaacttcactaatttggatttgcatcaatctcttagcgttgaaagtggggcagaatccagaagacatgttccaagatcttaggacagctatgggttaacaaaaatagttactttctatttttttttgaaggaaaatagttactttctattggtcccacttagagctgtaaatttgtcactgtcgttctactcatattttttcatacatttcaaaatataagtcgttttaccgtgtcttaaaaatatatgagtcgtatcgtgtcgtgccacatttttaaataataagtctagcatagctcgtaggcctaacaatttcgtgtctcacgtgctcggatttgtatcgtattttgctcgtattagccaatttttttttttaaacaggtcagcccatatgttgttgaatctaattttctcacttaaaaaattgggatattttcaaaaatatgggaaaaatgagtcatcttatgataaatatggcaa

SEQ ID NO: 77933 - DNA, 681 bp, Cannabis sativa
  modified_base (51)..(61): a, c, t, g, unknown or other
acactaaaactaactaaaattaagcaaacaaacacattttcactactcttnnnnnnnnnnntttagtttaaaagcataaaaataactctataccaaagttatcaatggaatttcatccgtgctatgataaacacccttatgtattggtattcgtaactagtttttcattaagaaactagttttaattacaaggaagtaacatgtttatttattcattgccttaataagattatttttaactggtttcttgaccaggaaactgaatttgattatatagaagtaaaatttttgtatgggtttttaaattttttatggtattctttctcatttgtgatgatttatattttaagttttttttcttctaaaaataccatattttgtgcaattaagtttgcatatggtatataaatcaaaactttgcctttataaaagtaacttatacagtgacagtatttatgtaaactcttggggttttttcagcatttatgtaaattccttttttttctaaatatgtttttaagagcccaacgaccccattgggatggcccaatattattcgagtccagggcccaaaaaataatgtgcctcacaatcctatttgcctataaaacgaaaattactaattattaattattatgttgtaaaactcagctcactaagaaagaattgtgaaaggcaatg

SEQ ID NO: 77934 - DNA, 1793 bp, Cannabis sativa
atttttacctctttttttaaatattgtacaaattttgcccctgtcacttcaagatattctctatgtgactctcttatatcagggtaattagggtacaatatatataaaaagatgtatgtttcaattaaatataaaattagagataaatttgatcaattgattaataaaagtgatattttttaacttaccccataattatgtgggccttaacccaccttatagatcaaactatattggcccaactcaacagaaatcgttttccgttattcacaaactcgaacacgtaagaataattttatccgaacgatgctgaacaaaggcgcgcaaacaaccgaaaattcgcatttccttaccttcacaatccgatattttcatacaactgccacgtgtctcaaccataaccaatccacataaatatcatttgtcaagaacaccccacttcttccaccattgctaaccaaataaaatttaaataaataaaataatatactaaaattaatatctgtaccgatcagttgctgacgaattggttcactggttcaactttcatgctctaacgccatgagcgccagagctcttctctactcattttctcccaagcccaacttatcgctacctgatatttcgggccacagaaaaagcttcgtgtccgatttcagaaaccaggcccacgttcggatccgagtacggtatggcccaccatccgggcagggtcggtactgcgttttcagtgtctcggggaggagttcgggtaggaagagaactgggaaagtgtgggcggatgttaagtcagaaagttttgaagtttcagaatcggttccagaaaccgtgaagcttaaggatgcttttaacgacgtcgtttcggtaaaggaggattcagagggcgtgagtccctggtgggaagaatttcccaaaagatgggttatcgtaattttgtgcttctcggcttttctcctttgtaatatggacagagtaagttggtcttctgccatctatttctctctcactttttttttttttcagaactaactgccactacaagaccgtttatatttaaaaagatataatttttttttagttacattacactgatcaccaccccattggctgtaatgagttttattgtaataaacagtaataataaaggtgggcacctgacattaatgattttaaatgttcgaactagcaatattgagtacatactttttgacaggtaaatatgagcatagcaatacttcccatgtcagcagagttcaattggaaccccgctactgttggtttgatacagtcttcatttttctggggctatcttctcactcaggtatggtaacatggagtttcatgcattaattaaagtcactgtccttgattttttccatatatacattgaggggcatatattttgctcaggcccttaattagagtttgactcaaactcactctccgcgtattttaagacacaaacaaaatgataaaaagaaacaaacatttgaagggcacctctgcctttcttcttcttataattgtagtgaaaacagattgctggtggcatatgggcagacaaagtaggtggtaagaaggtcttgggatttggagttgtttggtggtctgttgctacgattctcaccccatttgctgctagaatggggttgccgttcttgcttgttgttcgtgcattcatgggagttggcgaggtaaagcaattttctttaaacttgaggatgaaattgttaaaaaactttctttgttgtagaagtaatgatagcaaagcctctgttttttttttttttttt

SEQ ID NO: 77935 - DNA, 794 bp, Cannabis sativa
actcaaatggagcaatttcgtaatgtacttgactgctgccacttaaatgaagttccatatgagggtgacccgtatacatggatcaaaggtagacaatcattaaacacgattaaagaaaggttggattggtgttttgtgaatgattgttggacatctactttcactccaattgtgactaaacatttagactactatagcagtgaccatcgggctatagttgtcaatgttaacctgaaagactccaaccagtagcagcatcatagacgcaccaggttcaggtttgagcaaatttggcttcagcatgaagaagctactaaaattattgaacagcaatggttgtctcaaggattggggtctgccatggaaaatattctgcaaaaaattgcagcttgctcttcctctctccaacaatggcatatctctacttttggaaacatgaaagaaaaaatagctactgcccagaaacaagttactcgattgaacaatcaaccaacaagaacttcaatactggttgaagatttaaaaaagtctgaaagtattttggatgagttattggaacaagaagaacaatattggcaacaaaggtcgcgtgttgattggttaagtagtggagatcaaaataccaagttcttccatgcatatgcttcatctcgaaaagcttcaaatcgaatttcttctctcttggacagtaatggtaccaaaataatttcaaaggatggaatctcgaacataattacgaatttttttgctgaactttttactgctacaggagctgatcaatctgctatacaagc

SEQ ID NO: 77936 - DNA, 842 bp, Cannabis sativa
ttgtgattaaaaaattaaaaaatataagtgttgccaaacgacacctatgttaattaatttttttttttcctgtcatgtctcaacgaatcggcttagaaatgagccttgcatcttgcataattattggatttccactaattccagaactaaggtaatatacgagtaatgttatttggcactttaaaatacttaatattatactaatgtgaaatcttataatttattagtgatttctcatattatttataaagttaaaatatataaatttcgagatcaaaatgtattaataatgatacgccacgttttagagcgtctctaattgtggcacttttcaaaagttacaaaaaattctctacatcatctaataatttaatattttattttttattttattttttattttaattttatattttatattatttttaatattcttccttttaaaaatactctaatagtaaaccctattcaaatttgttactataatatcataaattactatttaatatattatttaaaataattttatttaaaaaatgagtatggcattcttattaagttttggcatttacctttttaatttggcatccaaatatctttatagttagcttcttctaagcatcatcaaacatcttctccaatcaccaccattaataatgcctctcatggtgctttagcattagtcaaaagaatagaacaaaaggtattcaaagatatacggctaataagtatagaggatttttttgaaacttaaacaacaggattttctatatagggattttttcaaaaatatacataaaatataaaataattacaaaaataacttaacaaatctcaattac

SEQ ID NO: 77937 - DNA, 1873 bp, Cannabis sativa
accctctacttaagaaacttgcttggaagttaaaaacaaattataaagtaattttaatcttaaaattcttcaatttacatgggatccctccccttgcatataaatatacagtttttccactttcctactctgcatttttgcaactcttttaacagtggtcagcatttcataaaatgcttactgtaatcttttcacctgaatcattaacagcaataatcactccaatagcccatttacttacgaatgagcttttgcagcatctaatgttataacagaaacttcatacaactaactattgatttggtcaaacttctaaaatttaggataaaacccttttataaattcaatatatttaacaaaactccagaaagcacccataattgattcaaccgaaaataatagctctccaaaatctaaaaagaaggtcaagaaatgatttcctatgaaaatgaaaccttgaagtcaaacgactaaaaatagacaatcttgaaaccatttcttctgtttttaatgtctacaccattcatttgaaccaaaacttaaggtggtcagaagccattaattagctatctttattttattttattttggttatgattactatttgaccatcctcataacaaaaacagaccttgttaaaagagatgaaatctttaaaaatattcaaaaacaaacaagatggccaccacaaacaaacacaataaaaagaaaaaaaaatcataacaacaaaattaacatattatcaactataaactaatgaccccacaatcatatctacgatgacttgattaacaacaatagcttgactcacaaacataaattattttctgacctttatcatttggaggatttctctgccagtcatgttgtagtttgttgctttgtttctcagagaagttcagttttgagagaatggaagaaattgagatttttttttcttttgttttatcacacgagaaataagagaagagagagaaataagagaattgcatttgtataaatagaaagtgtttgactttgtcacacgtgacctgcctgtgacttactgttcgtttttttcattgcgcgtttctttgaaaactacgcgtgttgccgacgacttttcttactcctaaaaataaaaaattaattactcaaatcagaggatgcaatgcagctaaataatacttaattaaaatataaaaataaacaaaattttgtatttttctttctttatgaaaatggatttatcatttaataaaaggataattagcgcatatatattaatgttttaatttaagtttgcaagcataaactcaatgtttatttaatgattaagaattcgggttttacatgtgtcaagacaataacaaaatttgtattgacaaaattaaaaaaaaattacagtttttaaaggtacttatactgctaaaaataaacattaaatttatacagcttacaaatataagattttagatacttatcaaactatttatcttttcttttaataaaaatatagccaaaatagttgaaacgttaagctaactataatcagtagaagataaagggttttgattcaatggatcataggaaaacaaacgtgatcaaattaaaagtagaaaaacaaggtatggtacacgtggagtaatcctatgatttgacccattcagattaagccacctgtttctgtaatctagtttactatttaattattctttaatctcttttctttgaattgtattataaatgaaaagaaaaagttaattatgataatagtgtcataacagttggtatatgagcttatatgtggtggccataggccatacccccattttacagcaattgaatcaaagttggtaggtgcacccacatatactatttttatttcatcact

SEQ ID NO: 77938 - DNA, 608 bp, Cannabis sativa
tcacgattttcaataaactcattgattagcaacgagttgcacaattaagttaaaaatcacgttaaaatgcctaaactagtagggtgtttcattgtaccctgagttccatgtccaaacttcatgcaatagcttctttaatgggatcgttttccaatatggatcaaatgattggcgagccaatgactgggagttatctcctttaaatatgttcgatatttatgatatcactgaatctaggagagttagcgaccccctattatcaagtctcctcgcactgagttttctccacctcacgatttttctaatttttctaattatagcttaggttgaatttttcacacttttgtttgaagagtttatatgttattttcaatgcaagatatgctctttaagttcttcattaatcactttttctttctttttgtaggaatggagttagatttggaaaatatccttagtagccccgtagtctctgttaagtgaggcaagaagcaaggtgtctcccaggttgaaatcgttgagaagtagccaaaggctccgaggaaaaaaaaaggcaccactcagaagaatgctccccctgcctctagcattattttagagaaaaacca

SEQ ID NO: 77939 - DNA, 1879 bp, Cannabis sativa
ttccgtgaaaccgtatttttgttatttttttgttatttttttgcatttgtgaaattatcccataaacttatgtgtaacttagtttgctggcccaagacacaagtggtgtaggcttacaacacttgggctctttaggagatgggcccaaaccaaaaaaaaaaaagactattgaagaaattggtgcattttgtaaagaaaaatttacatacagatactaattttttaaaaaaatttacatttatattttgacaaataatatttatattttctttacttaatttttttctactattttttacttattaaaaagcttcaaaaaaaaattcttctcttctttatattttttttgtgagctaaaattcttttttttttaagtcatttactaattttttactctctctctttctctctctctctcactctatttttttctcaaactattttttttatataaataagtatacatttttatatcttatttcattttgacaatctttctctctcttacaaaaaaattaagagcactcttcctattgacttagaaatttggacagagattttcaagccacacccactcgttaaattgacaagaataaaatatttattaagtataaatgaagagagacacaacaatttatgttcactctctgcatcgcaccagtaatagagctacgcctcatttgagattttatttctcatgagatggtattacagaaaaatggcctagtgtttcaactctaatttctagagagaaaaactaaagagagatgctctgatattgtgggtagttttctgaataagaaaaattgagatagaggagctctccttttttaggtgaaggagatccttgtatcgcgattttaaatatttgggtcaaaagttcatcctcaacaaagttgcaatttttcccgcaaataactcgaaaacaatctaacagaagagactaaaagtccgaaaattaacgattttcaccaagagtcaactttaaccattagataatcatgagtcgtcatcaatggtcaagatcagcccaaactaattttttcatatttttggtctttttcaattactatttaataggaactcattccctataaaatgagagctcttctagttcatttttcatattctgaaagtcccataaggtcaaagcatctctctctactttctctctctagaattttgagcctcaacacctagtctactctttgtaattctcgtgagaaataaaaagtcaaggtagatgtagctctattactgtcgcgtcacaggaagtgaactactataaattcattgtgtctctcttacttaactttcaatacgttctcgccaatctaacaagtaggtgtaaccaaacatttgtatccagatctatgcgtcaacaaaaattagatgaaaataaataacatctacataagttataacctacatataatggaaagctatttggtgtaaacatagaaatattttttggcaaccggtaaataatcatctcttgactaaagatcttataatgttgagtactctcatcaattgctctactctattcattaaaatatctcaccaaaatttaactttctctattttacctcacacatttatattacaccatacttccgtttctatatatattctctttatcatttaaaaattatattttttttaatatgttttattattttttaaaagaataaattcaaatacacacaagtattaaagaaagttttaaaatattaatataatatttatagctcaatgcatagttcttatctacatgtagagatgtgctactcatagtgtaaaaaaaatgtataatcactcaagtttcgttcatttgatggaattattagaatattttatatatggaagttattttcta

SEQ ID NO: 77940 - DNA, 597 bp, Cannabis sativa
aaactccttgaaacaatcaggaacgtcgcgatccggtggaagaattccccgcacagcgagatgttttgctttggcgtggatgaaatccacgccggcgtcgttgcagtggatgtggacgtgaccttcatcatcggtaattaaacggccggcgagagcagggaaatggaggagagccacagagagggattgtttcagagaattgattaagtcattaatagagtgagttggtgaattgaagaagagaacacctttctggatgtattgacaggaaagcatagggatatcagagactgaaagctttagagtttcgatcatggagttttgttctggaacaactacacattttgagactagaattatggaagaggaaggcattttttttttttataaattagttgactctttttaattataaaataaaaattgagagagaaagaacgaaatagtgaaaagttgaagaatggagtgtgtgaagcactgagaagaagtagaagagatcataggggtttatatagaggaaggatgagaggtttgattcatgcacttagcaaatgtggctgggattgggaatgggactttcctttttttttttttttt

SEQ ID NO: 77941 - DNA, 779 bp, Cannabis sativa
  modified_base (41)..(54): a, c, t, g, unknown or other
ttagaattcatattacgatgttaatgaaacatacttggtannnnnnnnnnnnnntggtaaaatatttccaacaccatcaccatgtaatgggtgtcaaataaaccagactggtccaccaatttggagaatatcttgcaccaagtgtccatcatcgtcttcaattggtcagtagtcagagttctaatactcgaatcgaaaacaaacaccttccacaactcaagattcgcctctagatccacctaatgtttctgtcggtccaagaagatgaccatgtatatgcactctatatccttccaatatggcatgaattggattggatccccacgaacgagttccaagatgaacttatcccaaacaaaggcagtgtggccaataatttccttttaagcatctcatcgacctttcaacgttgctgagttgattaaaagaaaaagagtagatatcaatagaggtggagtttgatcgtctcagtttagtctaggatattcatagttcaatatgtatagtaatgttgttcaggactataaagttttaatttcttaacttagtaaatgtgtctttacattttgttaaatagtatacgaataaagtggctcatgactctagggcgagcttctatctattatgctaattgtgtctatagtggagatgactattcttactagtctttgcaaccttgattttggatgacttagtctaatgaagttgcatatcttttggaaaaaaggaaatatgagttagttgacaacaattaatagtccatttcaaaaaaaaaaaaa

SEQ ID NO: 77942 - DNA, 566 bp, Cannabis sativa
atttggatattgctttgtgggatagctcgaaatctgttttacgagtagatgtccgaattgaaggatttaaaaagatttctacttttttgtacaaaataaggattagggcttgatgtgctctaagttatttatgttcatgaataataatgcaataaatacagatgcaattaagatcatgcaaggcacaattatcaaactttacgttccaaaccttttcgatacaaaagattaatacaaccaatttcatagtgtctaatctgtactcgagacttaacagaaatcaatctaaatacaattgatagctattttgatctttcatgtttcctcttcttttttcttttttcgtttattgctgcagtgtatcaaaagaatatacatttaatgaagttgccacaagatacatatcatttcgatagaaatggtagcttagatggcacccgcttcacaaagccatgaaaagtaacttaaatttatgagtctgctaagtgctaaccaactagcccgaagccatttttctaatagttactgaactgagtacataattaatgggcttttggagatattgc

SEQ ID NO: 77943 - DNA, 678 bp, Cannabis sativa
tcaaactactgccattacatccaaggtacatgctacttatactcatgccacacacacaccatctggcccacttcaaaatgttcataatctcccaatggctggtacaaacatcaccactgcaacaaatgcttataatacaaaaggtgtcagtttacaaaatgaagtagcatctaagtccatttcatcaccaaatcgtaatctaccaatgttggtttcacatgttgcaaccacaagtatgtatccacttcctgctgctactacgggcgcttccacaaagtctcaaaccagtgatgttttctcagatctgtcaggagtcttcactccattcgctgtcatgaataatgatccaaatgtgtttgctacttatcctccagcaattaatactctccatcgcaatcaaactggacagcttcactccccaatacctgccaacacttaccatttatctcaatctattgttgcttctggtgccgaacagcaagggggtaaggaaaatttgtctccaaatcgaatttcaaaaaggcattccaagggtattaacttaaggcaaactttgaaaagatgtcgcggtaaccaaactcagttgttcatttctccgttgtcagttgaaattgaacccgaccttgaagtttctatgaatgatacagattcttctggtgcatgcgacaatgatgcggt

SEQ ID NO: 77944 - DNA, 3114 bp, Cannabis sativa
ttataaataatctaagaacaaaatataattaaaaagcgaaacaatcattttatttctttaaattatgaaccaagattaatgaaatactttatgttttgataaattaatctctaaatatgtctataattatcaaaattccaatctaatatatacagtagtaaccaatagattaaaaaagtataattatttaatagatttaaaatctcaaactgtgaaattaaaaatgtgcaattctttaaaaagtgcaattctttaaaaaaaaaaaaaagaaaaagaaaaaaaaaatggaattttcacacatacattttcccttaaccattcccgatcaagaattttagaagccccggcgattcagagatggagtacgactcacccgaccccccaactcaggccgtcgatgcccaaattctgactaccgatctcgaaaccctaactctctctactgatccactaactgaccagttcggatcgctcaacgatctcagccacgagctcgcttctctccaagacctcgctctccgcggctcatggcggtctgtactagacaaggtcggtcgtgcccgaaccctctccctcctacagaagccccatgatcacctcacctatctctccttcaacgtactcgcccttatgaaactacgtcgtttctctgaagcctctaccgagcttgataccgtcgaagatctcgatggatcccataaccgctacgaatcttacccgaatgtttacccaaaccggtctggatccatggtcccattctccctccgttggctccacgccattgttcctgccaaattgggccgccgtcaagatgggttggaccgcctctacgttctacttgactttgtacggacgaaggtaagcgagaaggagaatgcggagggtttgagtgtctctgcgactgtgtggaagaagagggagttttttgtgacgaactccatcgtggggctccatcttagcaacaaagaattctccgtgtgtttgagattgatcaaagatttgcttaaacgagatggttcggacccaattttgttttcgaagctaggttacattcagatgcaaattggggatttggagggtgctaagaattcgtttaatcaggtggagggtttgatgaaggaaatcgagaaaagcaatgggtcgttgagcgaaatccagtttaagaatcttgtgaataggaacaaagcattggtttatttggttgggaaagattatgtctcggctgtaagggagtacgatgagtgcattgagagggatcataccgacgtagtggctgtcaataacaaagctctttgcttaatgtacttaagggatttgtctgactccattaaagttttggagaatgcgcttgaaagggtacctacggtggctttgaatgagactcttgttgtgaatttgtgtagtatgtatgagttggcttatgttaatcactccgatattaagaggacgcttagtaactggattgccagagttgcacctgatgattttgattcctcatgcactcgtatttaaaggtagttttagttcaatgtttctcagtttgatctaatttattcaattttttgagtctatacaatgcattgacactgctagatggactgatttgttttccattctctgcatgtgagataataaatgatttaactgtttggtctatgattgcctgcttcttcgtggtttttgaactgtgaaatatgtatttcttctggtctatgctgtatacctttttctctattccgattttgtgtttcaattcattgttatgtcttttaacaagaaatggatttcctgtgatgaataatgcttgggaagctcacgagggaggttgttcatagttgctctgtgaggatgctgaggatggatctctgttccaataccaggggatttaaatatttcatatatcattctaacaattaatctacatgatgagattgatatgattcgggttgttgagtactcttgttgtgattggcttcgatcaagttcatgtacttgatgaactagtcttggtatccaacatggttcattcatcatattctttaacgtgttgctacagtcatttcaactcatagaatagtttattgtctcttctctgtgtagtttcctagtgagctttgtttagattttataaaaagaattccttcttgtcatcattgtttatcttagtcaggtgactgtttaccatgggttaattcatttcaatacttcttactggatatccataataactattatgctgacatctgattagctttcatatttttcaccaaaattgacttacttttgctacatgatttaagatgatataacgggtgtaaatgccaagggaggactagtgtatgtcttttttgtgtcctgaaatatctatggatttggaaaccttttaatctttccctatttagtaatgtgagatttttgaagaagcctctagacttgtatgtcatttttggttcttttggataaaccatgactcataatgagcttgtggtatcattgataaacaagcaccaactagaaactgaaatgaaatattgatattaggatgtgattgtgaaaatagagtacacactcagtacacaatacacaatcaggtattactattgatctcggaagaatgggcgatacataaagtattagaaagatatctgcatgtctaataaggccctaaagataagtgataagcagcgatttggacgtgaattctgccatcaaccattgattctgactgctcatcatcagaagcaatgagctctgtaatagaagttggtgaactggtggttgccgatggctgaaggcaacgtacgataattttggaaaagaagtagaaaaaccgaattgagttcttactgatggcaatcaattacttggtcaaactagtgttgctatccccacttcgctgatttgattggatcagacgaaacaaccacttgctggaaaagaagtagaacaaccaaattgagttacttcttagttcttacttagtgcaatgaattataactatactcatatttattaattaaaaaaagaacaatcagtatttttctcctgaagttttgacactatttgattttgctttttaaaatatacttgttgaaaatttctcataaaatataa

SEQ ID NO: 77945 - DNA, 517 bp, Cannabis sativa
agaacgcgaacccaaactcaaactcaaatcaggtcccggacacataccaagacccagacccacacttgggaacaaacactgaaacttgaattggaacctgatcgagatctttgaacaggaacgagatctatacccaggcctggacccggaaccaaagccagcctcgaaccctactcgagaccgaaacccggacctgaacctcgccccgaactcgtacctcgtgacttgaaactggaatagaaactagaagcagatcaggacctaggaacaggaccaggaccaggacatggacccagacccaaaactgtaaccaaaccaggatccagactcggacacaaacccaccgtgggattgggtccaaaacccagacccgaacccagaccagaacctggtccaagacccagaccttaagtaggaccctgatcgggaccccaacccggacccgaaaaaagacttggactcagaccaggaccagaacccagactcaaaccttaacccgtacttcgacctaaactcg

SEQ ID NO: 77946 - DNA, 5348 bp, Cannabis sativa
ttatagaacatgcttttgaaaaatattttcacttttccacttttaaaaacaaaaaactgattaaaaaagtgttaccaaacggtaccttaaattttaaaataaaagttttccatttaataaccacatcatagttacattttaatataaatatacacacctgctaaattaattaatttatatagtatatcgcaatcgcaccactatcatgtcacagataagaacactagttttattgaagtttttgaaatgtattttttaatatcttcttctttaatcggtagtttaaattgcagagtatgtcatatgtgagtgactctacacatatcaattattagttttatatcttattcttttcccaacgcctcagagatccaaaagaaaagaaaaaaaaaaatcaaccctaattattaagaagttaaaatatatatgcatgcatgtgtaaacatgcagagaatctctctctaactgtatcagaaaaatgaagtttactgggttaattaaacataaaattaccaagtaagtatatacactaactttctgcaccatgtcagaaattttaaattattggcaactaaaaagacatgggtcctcactaggagaccttgtgggattgaaagtatcataaaatatgcccattttttatccatgttttatgatgaatattagacggtggcccaacatggacaagtttttcattatatattattattagatttagagtacaaacaaattataagatatgacttcaaacttcttttttatgttcactgtctattgataaataaataaataattacaaatttcgataaattattagagtaataaattactaaaattttaaactttattttcaacaccaaaaaaaaaaaaaattaatgtgtagaacatttgatataattacaatcagttacagatttagaattgtttttgttaggtggaggtttaattgttataagaaatttttagtcattaaataaatattatgtttagtttgattttataaaaaatataaataaataatttgtgctgactttttattattctagtaaaattatctaatttagaagaatggtcgattttttaaatgtaataattttttttactagtccctattgtgatgtaagggtttctttaattggacattaaaatttcaaaaacactagattttagatacataattcttctaatagaactctaaatgtcattttatatatcttatagtgtcacactaaaaatagtgagacactatagactatactcattttttttttactattaaaataatgtgattaaatttgtatatttatataaatattataatgtgagatagtttaataaaataatataataataaaaaatattttttaatgtaaattttagtattgtggaattggaagtaaaaaaattttaatgctaaaattatactttttttactgttgttttgacactatacttacatttgtacattggagttgccttaagtccatcattgaattgtggttatatcttatttaagtatctataaatatatgatttatcacaagagtgtaaaagtgtgcactattacgtggccattaatacatatatcaggaataactacaaataattttaagtttgttaggttcttttaacctatattagtagctttgcatgtgcagagctgatgaaagattgcccatatcatcatcaaaattaatatgaaccatttgatttaactaaaatttatatctatatattatgaatggtgactactgatgatgatcaacgtggcttataagaaagaagtttcctctttatttcagtcagattctgaatggtccaaccacgatggacagaccttttatgcctgtctagtcgccattgaacctaaagtacactctaataactaatatataatattaataactattagatgcaaaacgagactatatagtgtactagctactacactattcaacttccctccaataattaatgttactttctttaatttatagctttttctctgggtttttgtttgtaggtttgttctgatttgatattatatagctatgccaaacacacaagcaaaaaaaagcctaaacttaaatctctgtttcaaaaaaatcaagctttcccaactattctcccaatctcttcctatgacgactccacaaatcaccccagaagatcacagccgtccattacctcaacccaaatgctcatcaatcttggtcagaaacttcaactcactttacgaaaatacccttgatttttccacctccaactctccaacatctccttccgcactctccgtcgacgacgatgataacgacggcggtgcagtcgccgtcgccgccgcatttgcttctagtagattcttcttctccactcccggaaggtcaaactctatcgttgactcgtccactactattaccgcctccgcagagcccgatgaggcagtctcctctacgctcttcggaaacagcgtggcggtgccgacgatatcgccggacccctactcggattttcgaaggtccatgcaggaaatggtggaggcgcgtgaggttggtgacgtggaaaaatctaattgggagttcttacatgaacttctcttgtgttatcttgctctcaatcctaaaagcacccacaaattcattattggcgcttttgccgatctggttgttaacgttttgccttcgccgccggaaagtggcggtggccgccgggaatctgatgtagtcgcggatatgtatgagaataagaggtagatgattttgtctctttgctgggttcgtttaattaataaactttactaattaattacataaaatatgagatgggaactgaagttggtcccccattgattatttaattaatacagtgttattgtgtgttaattcatgattatattataagatgtttattcacttgttccagcttttaattttatttttctttctttcttttttctttttgttcttatgtataaagcagtacacactcaagtactgtacctttggtaaattaatatacaacagttatagacttatatagtattattgaagaaatctcaaagtactatataagttttgaacaaaatgccacttagccgcagcaaagctgcaatgtctaatttcttttacaacccaaatttacaactcaaaataaattaaaaaaaaaataaggcaattactaatataatatagggtaattaaaatttttgacccctgaattttcacatataacaaatcattttcttgagtttttaagatcgttaaaaatactccttaaactattgagattgttggatttaatgatttatgcctaatttcattcaattttactatttcagtgattgcttatgtactaaatcatatttctcagactttaatatctatcaaatcatatccctcaaactttgacatgtacgcttctgaactttcatccatgttagactttttattaaaattggataaaagtctttaaattcaacaatctcaatagttcaagggcatttttaataaccttcaaagtttaaggaatataatttagtacatgtcaaagttcgagctacataatttagtatgtacatttcaaagtttacatccaaaaatcgaaattaggctataatatattatcaatactccaattgtttaaagccttcataaccaactctgaatccttttccaccatcataaaatcacaccagttatatatacataatatataaatacaagtatacataattttggaggagaacgctctggatcaatctttcatggccaaaaaacataattattaatatatcgaagaaatctcaacattattttttgttggaaaatgcacaggggccctgtttaaagatgtatggatattaatcgtagcagcataagatctttattgtaaagtttttaattaagtttaaattaatgcatggttgcaaaataattaaatcagaagtttaatttaataataatttatattgattcttaattaggagttttgcagagagtataataattaataaaattaagccacatgtgagttccagatagatcgatcccttggattggagctctgatcactctcagtctcagacatgtatatatgtataaattgaatttctcaagcaaaaggaatatacaatacgaaagagaaaaatgcaaagctataacattttcactatcaaaccgatttatatatatataatctacaattcaacttataataactaacataggaacagtaaatcctgcggcgaccactgcttctatgttctgatcaaatggttatgagtagctacttcacaccagtacggtacactattaattgtacggacggcttcgatgagtgtcactcataggtaggtagaaaatagcagccacactgtttggatacgaatattaggataaaggttgaacatctgatccaatttttttttaaaaaaaaactgaatctaaaaaaggaaattttaatatcaatacataataaaactttcccatatcaaaatttatatcttgaattactcaaattgcttttttcatttaatttttctctttctttgtccttctctcttcctctcgtttctctatccactcaacccaaacattgaccccttaacacgttacaaaccaagggcacccgaccaccgtcaccaccagggctggccctaggtataggcgggcagggcccacacttttcgagggcccaaaataaaaataataaaaaaaatttattaggcttttatttaaataaaatttaaatacattataagcaacaaatatttatagcttagttggttgagggccggccctagtcaccacacaccacatacctatcttcctccctctctctttctcccttgtctttctttttctcctcgtcctttgtcgcccaaccaccgacaccacgacgccaccaaaaacccaaactaacccaaaacacgaaacccaatcgaaccttaatgaaagttcgaaaccaccaccaccattttgagtgttgaacgacgccaccatcaccaataacagagttgaaatacatatatttaatttatttttttgatatattttattaaatacaataataaaatattttatttgtttttaattcacacaatgtacaataataaatattaacatattaatacaaaataataaatcaaatagtcaaaactaattaaaaaaaaatgtaatacaaaaacatatcaagttgtttacaaattgcaattaaattattgttatcattttttgttactttctaattatatatatatatatatattgctaaaatgtaatgaaaaatttgattttctatacttaaaaaacttaaaaaaaaaaattaaatacattttacactacaaaaaatat

SEQ ID NO: 77947 - DNA, 694 bp, Cannabis sativa
tgctcctgctcctgctccatcagaatggtcaagaatgtggtacggtcgaaaaacagatttttatttttcgttaaattctgtttggctattattttaaaaaactttttaataaataatttaataacgattaaatattattttgtatcttgtattttgtaaaaattattaatcaaattttctattttgtttaatgataaaatttttaaaatagtataaataagattctgaattaattttttgtcaaaataaaacttaataataatctcatctaaagatattatgacaaaattgattgcatttgttttatccgtgttcgtgttataaattgccttcaagttggttattaaaaaaataaaattttcaaaaattaagatcagtgtcctatgtttgctattttagaaaatataaggtctatttttccatttaacaaaacaaaaggtccaattattattaaacttttttacaacaaaaaaatacagggtccaaaattgtatttactttgaaattcaaactcaaacttaaaatcaaattaaggaaaaagttgtcttcacctaaaataaattattgttacgcagattatagatccagtttgttcaagtctcgacaggttgatggtactctgggttggtcccccgcctgaggagtgggtcaagatcaactacgatgtcagagtcggtgtggaaaccatttgtgc

SEQ ID NO: 77948 - DNA, 633 bp, Cannabis sativa
tatataagtgtggagcagccctatggatcaaattgaggaccaaaatatatataaccatatatataggcgtggcttatttacttgctcgacagcgttatatgcataataataataataataataataataataataatgcttgtgaccgtaattattttgtgttaccatttcaagtagctaactactcagataggccagggcaggtccatatcataaaaaggtatgtgatcataatataataatatatgtcccaccattaaatcatcagattctcacctttcaaaataataataatataaaaaagccatccaaataattaagttgctttgagtaatttgaatgtgtatctaagtctaagattagtcatagagatgagtattttgatgtaaacatgtatttatgtatagaaatatctagactttccttctttgcatgtaaattattattaggacgaaccagaaatcgcacataggcatatgttagccacaacaacgtataactaacttaaaaaaaaaaaagttatgaggttgtttggctttatagtttaaaaattgttttctgttttttaaaaatgaaaacagtttttaaaaattattatgagtcgtttggaaaaaaattttaaaaactgttttt

SEQ ID NO: 77949 - DNA, 610 bp, Cannabis sativa
gctaacaatgtggcgtttggttggaggcaatcaaatggaatgaaaaggaactaattttcattttattaatttgtttagttgcatttcatagtattattagaacaatattttaaagaaatgcccttttaactattttagtgaaataattattctattttcaaatgaaagaaaagatcattctaatataatactacaaaataattttttttatcattcatattcttattttttcatcctaaagaatttagtaacgaatattgaaggatagataagagaatctactggtagtgctttgaacggctaaaattttatcaatgcgccctgtacgtactagtctttggaaacagttaaaataattcaagtttggatttttataattttcatccttttttccatgtcagacaccttgagaagagcatcactgtgcagctctacgtaaaaaagaggtgaattgatagaaattaaaagctttgtttgttagtccaaccaaaatcatctgattctgatcaatatggaccctgcaatagtgttgtatccagcaccagccataggacacctaatctccatggttgagctttgaaagctaatactcaccttcaaaccatcactc

SEQ ID NO: 77950 - DNA, 1605 bp, Cannabis sativa
  modified_base (30)..(42): a, c, t, g, unknown or other
  modified_base (97)..(129): a, c, t, g, unknown or other
aggagtcatattattccactgcacccaatnnnnnnnnnnnnnaactttatatttgtttatttcattgttttagaaatttcatatttagggtgttaannnnnnnnnnnnnnnnnnnnnnnnnnnnnnnnntaaaataatttccaacaattgacacttcaactcaataaccatgctccatatactgcactaatttactcaactttggtaattaattagtattttacctctctcatattttttttaaaacaagtaacatttagtttatgatattaagaatattaaattttaaaataaaataaataaatgtaatgtatttgaaccctctacgtattcatatttatgataaatggaagtggtagtaataggtgtaagagaattgtaacattaggtatttttacctctagaaataaaaataaagtatttaagtatataaaatctaaaatattaagtatttatgcgacaatttaccaatctacaatggatgcatggattgtcattttctacgacttcttaaaatatttattgaaaactggtggcctctcaggacatctctaatataattgctataagaaatatacctatcagtgaagtgcgacctttctacataatttttttttacttttcaatagaaacattagcactggccaaagtagctggtattggaagagtttggtgaggctcaaagatcagattaaggagacatcgggcaaagctttactacaacaaaaatacactgtgtctcaagggtatagcttgctgaaaccagcaggggcaagcctaagcaagtctggagcaggttgaactcacccaaacatagctttgtgctatggttagctatgcaccagaggttgaaaaccagagataggattttcaggatgaaaattgtggaagatatctaacttgtcttctttgctgtacgcactaagagattgcagagcatttatttttcgagtgctttgtaaccatcagctgcctacagacaatgaaaacctggctgggttggaaaactactcacacttctcttttcaacctcattaaatggattggaagagctaagttgagtaagtttaggaagatgacattggctgctactgtggccagcctgctatacaacatttatgcttagaaacaaatgcttatgggataaggagaaacaagaaactgtcaacttggtaaaggagctcaaatcaggggtaactcatcggattgagctattttgaccaaagaaaatttcagaggaagataagcaatggttttttagtttgtgaataatgtaaatgcatagaaacaaatgtgttttgtgatttacatgtatagatgattttttaggcccttggtgggtgctattagtttgtaaacactttgtttttgagccaatacgtattctgattcataaaaaaaaaaagaaacattagcatcggtgtttcttttcagcaccgttgctttctttattttattatctttaattttattgaatactttataattaaattacattcaaaacaataagaagtcatagcaagaaacactagtggttgtatgcattgtagatgacaacgacttgcattattatggctcatattttgtttttaagtaatttaataa

SEQ ID NO: 77951 - DNA, 581 bp, Cannabis sativa
atatcaggagtatgtgcacgtccttggcaagcctcctcagccactgaagctccaagtggacttcccaacaggcccttagccccaccaacaccagactctcggggatacagaccgtatctctagaagttggatgtacaggcttgcctcattatattcctcctaataaaagagaggtacatgatacgattggctctatcccgcatctggagggtggtgatggagcatttatatgttgggactctctgaaaaaggagatgacaaacttgctgaatgtcccaagcaatgaattagttcttggcatgtcctcccacctttgacaagggcgtgctattgctatcagctaaccactggtagccaatctagctaaagtagaagtatcttgttcggttctattttgggacaaacttcaagtcaaaaaagtacctatttcgtaaggggaaggttgaggccaacctaattcgacgtaaaggatgaacatcgttgaagctactttataccttttggggtgatttaggttgggcaaactacaaagtatgtagcactgtctctaaattaggggtgtaaaggcaatacttcccttg

SEQ ID NO: 77952 - DNA, 1300 bp, Cannabis sativa
tgtatttttttgaaattatccttgtagtttttcaaccactacaatttttacggtttttctctcacaacacaactatatatatgaccactcttggcgggatagtacatacataatcactagctacgtaccttaacatttccagcttgtttgatagcatccacaagcttgagttgaagaagaatatggtggcttcgaacatgaacacccgaaatggcgcaaatgacaacatcgacaagtttaacagcgttgacgaggctttgatggtcattgaaagaagcagagactagtgttgctcctttctccttgaacgacaaaagcatttgaactctctcaatatcaacattcgtctccggcctgtgaaccacataggtctcatgaccctcttctaaacttgccttcactagcctcttccccaagtaaccagttcctcctactatcaacactttgcttttccccatctctttctctacaaatttatatgttgctattcacgatgaaatgttatatattaaattgcttttataatgtcttaaaaagtgagatgtctttctctctctcggcaataaatttctctcaatttaataggtgaattattgcttcaattatgaattcatagtactacaatacgataatatgtacaaaataatgacacaatttacaaattattacttcaattatgaattgagacaacatagtactctataatatgacaatatcatgtgcaaaagaatgagataatttacaaattattacttcaattatgatcaatgtataatgaatgggcgtactatatataagagtgttcattcgacaatctacactatcactactacaaatattagaattcgcgaccgtcctaaaaatgattttttcggggaccgtcactaaaaaaattaactatagtataggcgacggttttaaaccgtcgcccataagggtgtattaaaaaatcatcacctacttctcgccacattttctacgtgcccacctactttttttctatttctcacatgtccacctatttcttctccatttcccacaccctaaaacgaaaattttccctccaaaatctcacccacgcctccgcaccatcgccctgctctcttgtcgtcttccttccctctcttgatctccctttcttctcgtctctcatccatcgatctccacccacccctcctcctgtcggtctccctctactctccgttgcatacctaccacctcccgtcggtgtccctctcatcttcgtctcatacgtcggaccaccaccacctcccacccgtctccctctctctctctctct

SEQ ID NO: 77953 - DNA, 1748 bp, Cannabis sativa
atcaacttctttatattttttccacatcattcaaatataatatttatattaattgaagttaaggaaataaattaaaatataataaacaaatgctataatgaaagaaaagaagataattaagtacaaaagaaaatattaaaaaataaatagagaaatattaaagcttaactacatttagctaaaaaaatttaggagtttgaattgaggtatttcaactaaggattttaacctcttaactattttgttttagctcttagctattataaagcatctattagggatgctcttataaagagctatttttagaattttttttgctctaaatattcttcgtaaactatagaagttgttggaaatattcttcctacagttacattctgtttattttttttaagcaatttgttaatatagcactaatataatgttaatttgcttgccacgtattatggtaaaaaatatgtacaaaatttacccccaagttctaggtcacaattttttgagttgggacttgtatttatttgtgactatttcagatctctcccaaaggatttgaagtgtaactgcacatgtaggtgaaacacttctactcatacgcacgcgccacgttctttattgtgaatgactttcgcattagcgtgtcttttattcctcgattttgatgatgatggttcgcttccctgacattaatcctcaagaaagtcataaataaagggttagtcagatactcgagcacataaatgtccccttataaatgggtttgtttagggttctttccaaccgttggattggggtgtatttcttggaatttgaaaggagtcgtaggataattaagaggccagtatcatgccctgacggctataaatagcgacttcctcctcactcttcacactttgttttctgcttcatttcttcagagcttcaaactggaagaattcccaagcaagccagattttctcatatttttcctcagacgctgccaagcttcgtgttatcgccattgcctgttagtgaggtcaggaggcagggacggagggacttaggccataatgtaggcttaagccctcactcatatatatataaaaaagcttatacattatattatattagtttaatttatttaagtttttgttttatatattaagccctcattcaatttgcatattaaaccgacactcactttatttctatccaatcctaaatgtcaacataataaattatatcactaaaatttaacaccacttttataaaacagtcaacattttttttttgttgctaaatacatatgtaatactctctttagcattctttttatttcatttgaatttttattattttttaaaataaaaattaaaatcatttgatttaatttttattcaagcccttgaaaaataaaatattcaagccctcagtcagataaagttctggcttcgtcactgtcaggagggatggttggatccaatcaaggtgactttggtcaaactcgaggaggggaaataatccctcttgaacccaattttttcacagaaagagacggagaagatgaggaacgagtgatagccatttatatagaaattgatagaagaaaacaattaaaaaaataataataaatcgtggttggaacatcaacggcagttatagatcgtgggatcaatttttaggtgagaaaccttgttttgatcatgttaaattaattcaaaagaaaaattgaaaatgagaactaaaataaaaagaagaagatatataaaaaa

SEQ ID NO: 77954 - DNA, 578 bp, Cannabis sativa
accacgatacaagtgtttcgccaaagaacacacaatatccagcaactgaccgtcgatcgtctgggcagcaagttcaatcggcatcagaaaagccagtgagtgtcaagtggtcactcggagttatgtgtattccaaggtgtattgtaccctttaggtaccttaggattctctttgctgcattccagtggactgttgttggttctttgaggaattggctgagcttgtttacagcgaaggaaatgtcttgtcttgtgtggctcaagtactgcaaggcaccaatgatgcttctgtagtgagttggactattaagctgttcaccatctgttagagataacagtttccctgctgtcatgggagttgggactggttttacattctgcatgtcatatttttatagtacctcagagatatacttagcctgtgataggtatatccctgtggtgtctcggaacacttcaattccgagaaaataattcagtgcaaccaaatctttgagggagaaagttttgttaaacttgtgcacaaagatgtcgatctctctactattgcttccggttattataatatcatcgacataa

SEQ ID NO: 77955 - DNA, 746 bp, Cannabis sativa
gaacaagcagaagcatgtatttggatattgatcttattcccgttgtcctccaaagtttgataagcattgccaacatggagtaaccacaactgtgaatttgcttccagtggtactctccaatcacgctttattttactttcctcaggaaatcgaggaagcaagtaaattggcgttttgattttgtctggatttactgataatgcctctatcattgggctaaccccacttactgctgttattgcacctgtccaatattatatatacatatttttcataaattacataaaaaggatcataaaataaaatgaaaaaaaattaaagttgtttaatcaccaagaacattaagtttgattctgttggcaaatattatgtagtaactgtcggtaaaagcccaatcgtgaatcattaagtgctcagatatgtgaaactctttcttatgcaacaatttgaaatttgagtcgaattctgcaagatgaaaaattaaatgttgcattatgattagtattgcctttttttaaaacgataaaactcatcagctttaactgttagaacattattataaattaatctatgtattattttaccataaaatgtaaaattactgcggggaagtagcatatcttctgcattgcatgacacggtaaggagcctattcctttgaatatccagcttataatgagataacaatcgtttgggaggcatcttgaacactcctataaaaatacacatataattcatttctaaat

SEQ ID NO: 77956 - DNA, 696 bp, Cannabis sativa
accagtggcacatgccataacatgtggccaagtgtctagtagcattgcaccatgcttgggttacttaaggatgggcgggagtgtcccggctgggtgctgtaacggtattaggtcgttgagcaatgcagccaagacctctaccgaccgtcgagctgcctgcaactgcttgaaatcagctgcaaacggcatcaaaggaatcaactacaatcttgccagtggacttcccggcaagtgtggtgtcagcattccttacaagatcagcccctccaccaactgcaacaggtagcattttatagtattgcattttattagttatactttaagggtccttttagtacgtaggatggacgggattagacaagctaatttgttcagtccaatgtttagacatgttggaagtatggataattaattcagctaatctcatctctctgggattacttatctcatctagcaagatggattaaataatctcataaaagtgaatttttatttatcattttttaattttgattttgttaatatattttaaatttaataagaatttaaatgaaagaattattacaaatttatttataatttttttatcagaaatttatttattaaaataagtaaaaatgtataattttaaattatcatacataagtttttaaaatttaaaataatattaattaaataatagttacttaaattgat

SEQ ID NO: 77957 - DNA, 632 bp, Cannabis sativa
tatatatatatatacatataaagagatgataaaaaataggcattttaatataaggggtcttgtgcaatgacccaaactgtctaatacttaggtcgactctgtataggggcgttctctaacacttttttaattattttttataaaagtgaaaatatttttcaaaactatattatataaaactattttttactttttaatttgtttattgaaaattaacattttgaaaataaagaaaaaaaatcacttttaaaattttttcaaatacgttttttattttttcttaatcaatattttaaactttgacctcaacttggaccttagaacctggattcgcacccagaccttgaccctggcccaagactcagaccgcgaccctgaacccagaccccgaattcggccccgaactctgacccgacctggacctagaccacgagcccagaatctagcccaagacccagacctagactccagccatggctccagactgggaccatgaccctggactaggaccccgacctcggcctagaccccaaactcggacctcagacccatacctggactcggacccgaatctggccccaaactctaaacccgacccgaacctagactcggcccagaacctgacttaggac

SEQ ID NO: 77958 - DNA, 1179 bp, Cannabis sativa
gatcattttatttatattaatttgggatatttaaaaggtgataacaatttatgaaccacatgtttaaaataaagattaatttatcagtggtaattggttactaaaagaaaaataatagtggtagcatgttaccaccgcacattaatttctattttaggaaattatattctttaagatatacccacttttatagatgatgtccctattatacctcttaagttaacataaattatatgctagacttaagtgggggtgagaatatattagacaatctactcacaaaaataagtatattttaataaaatataatatgaaattatttttgattaatgaatataaaaaaggagatattcttcaatttatctctttctttatcatattctgaaaagaagtaagaaaataaaaactagtatgataatcaataattttaagaaataggatctaaaacagaaatggcaaaaatgccacatgtaattttcacatgaataaatgcaatggatgccctttcttcaattgggctttaaatccctaaattcggtccaaggcccaaaaaagggttggactcaacaaatcgtcggcctttgatatatttagtccactacaaatatgagagatttgatttttttttttttttttttaaaaaaaaacagagagatttgataaattgatattgttcaacaaacaaaccaaaacctgtttggtcgtttgccttttttgtctattctaaagaacatattttgtaatgacagaaggtttaattattattgatttatttatgaatgctttttttgaaaaaaaaaaaataaacaaacaaacaaactaaaaaaaatagaaattgagtgatcaattgtatttttgttttatcacgtgtgttgtgtggtgtagtggtagagattacatttacgggcatcttgcttgggtcaagagtttgaaactcaccacaactcttcttgaaagaaattaaaaaaaagtttggtccttactgtaagtggtattatctgtgtgatgagaattcttgaggtgactaccgataacccaattaaggcagactgagatataagccctctatagctgacacgtggtttttgagattgtcagaacaaccgaaggaatagagaatgaatctataacacgtgatccccttattttttaggaaaaaaaaattgtattttttgtttt

SEQ ID NO: 77959 - DNA, 630 bp, Cannabis sativa
atttttacactttaaattattttatttacaaaaattcatctacggtagaaacaatacattatttttttttattgttttatggttgtattatagttattatcacattgtttttatttgttttataatttatttatagatttataattattgagattaatttcttattatttttttttcttatttcagttaaaatgatccaattttaaaaatattaacacttataaaatagttggtgaatgttataaattgtgtaactaataataataatatttaacacaatatttgcactaatatttttttaaatttctttctgttcgcatactttttgtttattcttttagataattagtgaactaattctcgtggcgatcgatcgatcgaggctaaatttaattaccctctaaaataatgtcctaccaaataattatgcatgcaaagaaaattgatcctctcaccaaaaaaaatcttatattatatacatatatatagatataacaattttattgaacaaataataataggatgtaattttgtatatttcattaatgcattaagttgtaacatatataactcagatgaccagattgtcaaaatttattatgttatttttttatgataattaattaatta

SEQ ID NO: 77960 - DNA, 573 bp, Cannabis sativa
ctctatagcaaatgacagaatcggttttgatgatgacatcacacatgtaactaataaattatgccttatattattttattggcggctaagaaatagtaaataataatgattacacataacatatattatttgacatacttgtgcaatttaagaatatctctaccattactcatacatatagtaaattaatattttttttaaagaagaaataaccattccttttaaagaaaaaaaaatgtgtttgttttagtattttggaaagtttttaattcatttatttttcgtaattatgtatggtatacttatttaagattatttgtaaaattttagaaaattctgaataattttttcattatcagaataaaaataaagttcaattatttgctatgcaaaataatatttataaaccatttaaatttttttttgaaaatttattattattaatggtcctaaataaatataacatacacaatatcataacaaaaaaataactaaaaacataaaaaatatacaccagaataatttttatttcagggtgtaatataaaattaatttttttgtacaaaaataata

SEQ ID NO: 77961 - DNA, 1239 bp, Cannabis sativa
ggaaagtatgctaagaaagtcaaagcaaagacaagaagaaagatgcacgagcaagaaaatccattggaggctgatgaattttccggtatgtggaaggagtgaattttccggtttgtgttgaatggaaacagaggttggaagccatgttgtatcttttctaaaatgtctactttggtcaactgttttgggatagtttcatatccctgctggattagcttactcatttatgagaaaacaattttgtcattggtgtttttctattccttagatgaatgttgaacttactaatatatttatagggaaattgacagcgtaaatacttaataaatttatttgtacttaagtgtttatgtgttgcacttaaatatctaatttttaattttgatgatataaatatttaatttttgaaacataaaattaggtcaatattggcatttaaaatatttaagtagcctaaaattattagaaaaaaaaaaagaataattaacatttttaatatatacttactttttgttaggtattttttaccattaaaaattagtatttttatttttgaattttgactaatataaagttttactttttttttttattaaaaaataataattttatggatatttttatttgtgcattttgtatggaaatacactgagcaatttaaattgtaatcacaatttaaatagtagaaaaaataaaataaaataaaaagttaaaaaagtggtacatgtggtgattctactaaattgttcccatagccctcaaaaattctactaaattattaaaattatattagatttaaagtttttttttgaaatccgtttaattttaataaaatatgtctaacgtataaaaataatagttgcaaaactataaattaaaaagttaatctcacattataaaaagttcgaaaaaaaagtttattatctttagcttttgatattgatctgagttgtactgaaatcttaattatgcttacataataataatttgattagcaatagactcatcaataaatattgattattcttttcgtaataattttatagttgtctttttatatatattttcttatattttatttggcaataagtataaactttgacttattaaaaaaaaattatgagtaaattaaaaattaattatgtatattattttcatttttaaaagggtaaatactattttggaccctctgttttacaaaagttaccaattggactctgtgttttgttaaatgacaaa

SEQ ID NO: 77962 - DNA, 532 bp, Cannabis sativa
aacagtgaagaaaagaaagaatgcttgacaaagattggaaccaggtgaacatcaaaatgcacttaccaatacaaagtaaaagtaggagaaaaatctttcaataacatataacaatttcactagacctaatccacctttgaaaaagagacataaaaaaaaagtgttcaccacaatcacagaatcacataaaagaacagtaccaaagatatgggagaagaaaaatgctacaaactttggtaactagcccaaataagagagctaaacacacaccaagtaccgtcccaaagacacatcatctctatttcttaattccagcaaactaattgacactatttatgaaataagcaatccccatgccatgataagaaatttccaaggcttctacaagaactgttagtcaccacattaaatgcccaaccatcatcgaacaatctttattcctgcccttcatagtttctttcttgtaagagctatcactctggttctctacttttgacaaaaaaaaaattctaccaaaagccacttatcatcc

SEQ ID NO: 77963 - DNA, 568 bp, Cannabis sativa
ttacctaatgtgttaaatacatatagtgaaagtaaaaggagtttttggtaatttaattggttaaggaggtgcaaagcaccagttcattaaaccgggaaaacaaaaacaaaaacagtgaacgaagttcatcacagaagcagtaaacacatacaacgataaaagaaaagaaaaaaaaacagtctaaccagcaacaacaacacaaacaaaaaagaaggaagaagtactagaacggactaggatcatcaaaagaacaaggaccccattagcccggatccgggaaccattcctagaagtcagaaacgacctctccgtcgatagcaaaaagctcaatttcacctatagtcaagttagctcccgcccatttagctgagttatgggccatgaagttgtccttccttgggatattgagcagcttgtagcaatccagggattggcaagtgttagagaactgagtggcagcatcttccaaattaagattactcctttccttagcacgatcgttgaagaaggtgatcacaagtgcattgtggcagtagaaaatgactttttgaaactgctttttgactgc

SEQ ID NO: 77964 - DNA, 1980 bp, Cannabis sativa
atttggtaaagtaatagagtagtagtggaaaaacaattcaaaaatggtttcatggatattttgaagaagcattcaaccataagatgttgctttaaaatacaattgttttaaaaacccaaaacaatagctatcttatcctaagtaggtccattgagagataatacttgtacacagaattgaatatataagaataaaccagtccagttctcatgcaagtttaagagtgaagatttctaactattacattaatctggactttgtttccataaaaacatggttgtgaacccagttattgcaaagattaaatttaaaggctacacttaatagtgagcttatttctcaaaaccaaatgggtttcataccttgtgtagatagaacttaacacttccaacattaatgactatgtcagttgccagctctgttgccacatacctggatccacaaagtagttgggtcatgttaaagagtaagaattagaaaactaaaagtaagcaaccttgagaaatgtaatttaatggaaagggaatcctatgagtaatcttcaagcctcaaataaataagatattacactacacaatttagttggaccccaccattccattttgtaaatgtgttggatgaaatgtcaatagatacaatcatagttcttcaaattagaaataaaacaaatacaaagattaaatcaatttatcttttttttcttgtaaagctacaagacttgaacaatcaagagagaattaatatgtcaacagtccaatttttttttactatacttattttcaaaacaaaggcaaaaatgagtttagtatcgcaacccagaaattacatatttttctagaagaagcaaaaaaaaaaaaaaggaaaaacatttcaagaaggatcacatacctaatattgtctccatcagtctgaaaagaatcaggcttagatccaagtttcataaacttcatttttggcaaggaaaagatctgattctctgacttcctaaagaggttgaatatcaacttctaaagagcctcaaacagtttataagttaaccacaacaccaactaaaattaatgcaagaagactctcaaaggtattgaagggttgaatagttgtggagattaagatagaaataaaaatggatcctaaaaactctgtatctgtatttgtttctcttagtatgaccgaatctttcccacagaccaaggaaagagagaaaatggtataaggatttttttaatgaaatcttcacttgaaagagaagagaccaaaataagaggatgcttccccagctggtaacaaagcccaaggagtccgggcaagagagatcagcttagcttaggagacactgccaagtgccaaatgactaaccaaagagacttgtatttgtatataaaactcaatatcagagacacccccacttgctcaaactgacacaaccgaccctttactaattgtttatagtagagttacttttgcttggttttgccaacgaaatcaaacaccaaaacaaggaccttttccccttcacaaagtttcacagcccaaaacccacataaccctcattcctttaatgctataatctctttttatacctggctggctatcctgtctcagtgtgcaagccaaaacaccctgcattagaagacagcatatctcggtgttagctgagattaagaccaaatctctagacaaaaagcatccatattgggtggatttccataaggaaggctatgcaaacaaacataataccaagtacccaaaagaattttgttttcacttaacaaactcagaatgtaaaacaagagattaatggagaaactaaattctgcattctgtccaacatttactttcaagagttaaaaatcagctaaatgagcattaaacacatcctcagcttgaaaacaaaacccgaaaacatctcttttgtgtcgtattattgaaacagatgtaataaatctaacgtaacaaaaacatcagtgaaaattgcttcat

SEQ ID NO: 77965 - DNA, 2185 bp, Cannabis sativa
gatagagtggattggcattttttgacagctatgttatctagattaggattcagtgataaatgggttcggcttgtcgatgcctgcctctcttcggttaaatataatattgtgagcagtgggtatactatgggtccaattattcctagtaggggcttcgtcaaggtgaccctatttctccatatctgtttcttatttgtgcggaaggattgtcagctcttattcaacgctatgaggaaaggaagcttattcatgggtgcaaagtggctaatggtgctcctattgtgtcgcacatgctattcgcagacgactgttttctttattgcaaagctactgagagagaagttgctaatgtccaacaaatgcttcagatttttgctaatgcttcggggcagagggtaaattttggaaagtcttcggcttttttcagcactaatacgactagtcatatgaaagagaccatttgtaactgtttgagtattagagaggctgaagagaatagcaagtatctgggactccctagttcgataggaaggaataaaactgcggcgttcagttttgtggtggacaaggttcagaaaatgattcaaacttgggataataagtttctctctagagccggtaaggaggtccttattaaagcggtggtacgggcattgccggcttacactatgaatttgttccttctccctgtgggtatttgtcatcaaattcagagtgccatatgtagattttggtggaagtctaataattcgaaaggtattcattggttgagttgggacaagcttacggcacataaagttaatggaggtatggggtttcgcgatgttcgggatttcaatatttcattacttgccaaacaagggtggcggctgttgtcttgtgaggatactctagctacaaaagtttttaaagctagatatttctcttctggtacgtttctcactgctactttaggcaataatccgagttaaatttggcgtactgtgttggaagctcaggatttggttcactctagagcaaggaatttggttggtgatggctctcgagttagcatacttcatgagccatggcttatggacgatgttaatccttatattgagacatctagcccgagccttcaagggaaaatggtgaatgcattgatgcaaattgataaattggaatgggataatgaagtaatttcagatgtgttaaatgattgagacaagaagctggtttggcgtattcctcttacagtagctggtagggaggccgattggtattggctaaaagatggcaaaggcttgttttcggtcaagagtgcctataggattcaacatgagaataatggacatatcaaccttaatgttcctactgatttgtggaagaaattgtggaatatcaaagtgcctccgaaggtgcttagttttctctggagagtgagtgcgaattgtctttcgacgaggtttcttttgtcttctaaacatgttcaagttgatactttatgtcccttttgctctgctgcccctgaaactgctctccatgtgatggtgcgatgtaattttgctcgttcctgctggcggcagtctcatgtaccggctgtagctcctgctgcaatgatatttaggagttggtttgaggagggtttgtccaaatggagtgaggttgagagtattgaagcggccatgactctttgggcagtgtggaagatgcgaaatgaggttgtttggaattctatttctctttcaagtgaagaggtaattcatgtagctaatgtgaatttttcggactcgtgcaaggcacaacagttcgaaaaagagacccttctcgtgcatacaagtgtggtgtgtgagaaatggtgccctccaaactttccttgcatcaaagtaaatgtagatggtgcaattttcgctcccgaagttcggtttggggtgggtatggtggctagatgtgcggctgggatggttcttcaagctaagtctgtactaaaaactggtttgttgcagccacatgaggtggaggccctcgggttcaaggaagccttgagttggataaagtccaatggttgggtgggagttattttggagtcggattgtttaagaatgatttctgatattcaaagtaataaaagtatggtctctccttatagccatattattttagaatgtaaggctttatgtgccgagattggtaatatctctttgag

SEQ ID NO: 77966 - DNA, 4380 bp, Cannabis sativa
aatgtcaaaactggggagaattttgccttgacttcatggaaaagcaatagtgacccttcagttggaaaattcactgcagaaatttcaaaattgaaaccaccacaagctgtcatttggattaagggatcaacgccacactggagaagtggaccatgggctaaaactaagttcacgggtataccagacatggatacagattatggaagtcttttcaatatcgtagaagatgcagaagaaggaacgataagtctccaatataattgggactacaacacctccaatatggcagtgggaaatttattcatttcatctagtggtgttctaacccttgcgtcaaaagaaatagatggaaccggtttctgggatacggactgggaggcaccagcgactctgtgcgatgtctatggagtttgtggaccttttggagtatgcaacgactccgggtctcccatttgcaagtgtttgaaaggttttgaaccaaaattatttgaggagtggaacaaaggaaattggactggagggtgcttgagacgaaaccaattactttgtgacaaaaataccactggtttagcttcacacagaggtaaaaaagatggattttttaagataagtaatgtgaaacttcccgatttttatgaatatgttgagtatttggagttttataattctggcaaagagagctgtcaaaaatggtgcttgaaaaattgttcttgcatcgcatatgcatatgtacaaggaatagggtgtttagtctggtccaacgccctcattgacattaaggggtttccctatgatgcagaagaccttttccttcgccttgctcacgcagatctaggtgagaaagaacaaaggtttttccttggaaaaattatgaaatttgaagtgtttcttttcctctcttctccctagctaatttcaatgtgttgaataattgtttagttggaggacataaagttgagaggattatcatctgtcttgcaactctttctacagttgggataatagttgtcatattattatatttgaaacgacgtagagatagaaaaaaaggtaagaaattaagatgcacaaaatgttatttctttctcttaaggcaaacacgtgcatacacttgatttgcctcatcttgtagatagatacaaatgatgccattagcaaaataatccgaagatgagcaagtctataggaaatatagaagttatgttagttaatccctgtactaacaacataagattcctttcttctctctctgcaatttctttttaattctctccatatcacaatatagattcctattggtaacaatagcattcactctggacattactgacccaaaaaaaaaaatgtttaaaacaaaataggaaacattatgaaggccacagagcacattgacttgatgcagtcaagtgacaattcaagagataccctccaattatcatcacaacaagatccctccgagctacctagttttgattttgccagcattttatatgtgacaaacaacttcagttcaacaaacaaactaggtcaaggaggatttggttctgtttataaggtaactacattatttctttaatatcgattaatggactgtaaataataaaatatatattcacatacaaatttgagcccaatttgcagggaaaattgccaaatgggagggaaatagcagttaaaagactctctagtagctcagggcaaggcacagaagagttcaagaatgaattgatattgatctcaaaactccaacacagaaatcttgttaggctcttgggctactgcattgagaaagaagagaaattactagtttatgagtacatgcacaataaaagcttggacaatttcatctttggtatcggatttactaattgaacaacatatcttttcttatactttgctattctaatttatactctgttttttttatctaaaactaactttgtcataaaagcaagtaaaatgacattattatgtgatgtgaaataggaaacaatgcattaattattgactaatctacttggtgcatgtgacttagatcgaagagaaagagaacagctgaattggggcactcgggtgaacatcatactgggagttgctagaggtcttttatatctccatcgagattcatctttaagagtgatacatagagatttaaaggctagcaacattcttttagatgagaagatgaacccaaaaatatcagattttggattggctcgcattttccaaggaacactagatcttgcaaatacacaaaaaattgttggaaccttgtaagaatgtgaattattagaactagaacaagtaatggttatgcctaacaagcactaatgaattactgtttcgattaagtacagaggctacatgtctcctgaatatgccatgggtggtgtcttttctgaaaaatcagatgtctttagctttggtgtattgatcttggaaatcgtcagtggcaagaagaactccaacttccattattacgagcaaccccttagccttatttctcatgtgagttcatattataattttctcttaagaattgatgtgcacactatatatattctaacttcgttatgactgaatgaattcaggcatggcaattatggaatgaaagtaaagggctagactttgtggatgatgcattgggtggctcatgcattgcatcagaagcaatacgatgcttacatgttgggctgttatgcgtacaagatcataccacagatagaccaagcatggcagatgtagttttcatgctcagtaatgaaacaaatcgtcctcaaccctttcaacctatctttactcttcagagctctccgatatcacaaaaggctagtactacatgctctgtgaatgaagcaacggtctcaatgattgaagggaggtgaaaaaaaaaagttaagaaaataagagaatttttttctttttcttttttgaaaagaaagtgttttgaacctactttctcatgtaaaatgtttgtttccgtgtaaacacaaatcatgtcaatgcaatatataattatgtaatgttatagcattttcgcctacattatttttgaattaattgtttgaccttattaatgaaacaataaattccctaagaaaatgaaactactattcataagtactatttcttatgcagtttaagaaaaaaatactatttttttttatgagactaggcagtcaagtgaccatattacatgatgattgtacatttgtactgattctatttttttttaaaaaaaaaaagaaaagaaaagaaaaaagataacagtggtggaatgcaatgcggaagaggccatagcaggcaacgcccaaagtcttcaagctcagagaatcatcacattccctactctctattcacaccacacaagatcttaatagtgtttttttaagttaacttcaagaaaatatactattaatatttttattatttttataatattattatatatacatatttaaaagtaaaaataatataaatattttatataaaaaaattaattttaatttaaaatacttaaaatattttattttcatctcatttatgtgtatatttatttaattgacgagaacactaaattatatatttaatatataaaagttaaatagtatttcatgatgaagaactcttattgtgatagataggtaatatttaaattgtaatttttttcaaaaaaaaaaattgtatagttaataatagtacttatattcttgagtaattaatcaatcggtcaactatgttcttgctaatgcattatcactccattatccacaaaatctttagtagttttgagtttttacaaattggttgacaattcttgttttcataattttgtaaaattataacagaaggtgcttcataattttgttttgacagtatgattttgtaaacttttgctttaactttcccgaagattgaatttgttataaaacttcctatgggaacacattgcacaattgaacggtatattataaaaagttgactacacgaaggtattaaaaaactttcaaagggtgcgtttctacgctgaatgatgataacgaatttagattaatgagactctaatgtgagaattactaggaaactgcagtgttttccgtgctcaactcaacttcttcattattattttataaaagaaaaaacatatggaaaattgctggtatttgacttttttattttgtttgttagaaaattgtatttgaattgggtttcctaatcaaaacgttagtttgtcatctctgtctctaaaattctgtgtttgtgcccaaatgggtacaaaagataaaaaattcatagctttgttcttccgggttatactaatctacattttttcatctaaatcctgctccgcagtttataacataacatcatcccaagctt

SEQ ID NO: 77967 - DNA, 1326 bp, Cannabis sativa
aaaaaaaggcttggacagtaaaaaagaaataattgtcgtgacagtattattgtaaaatttggaaaaaaaacagtaattttgtaagtttctcttaatttctgtgttcactcttagtttgagttggtcaattcataggacaacataagtaagatacgtgtcaaaatcccacaagttgaggaattgtatagtttgggttcttgggtccctccagctggcaaagtatgtgattgtgaggggctatttccttccctatccaatatttatcacaccttattcgtaaactctttgttaaaagcgtgtgacattacttcacagcctgacttcttatcaccatgcaccattccaattttccaatacaaaatccgtgttctcttttttctgaaatgtaaactaacatatatatcatcatctgatttgactgtttattattacattcacatctatgatctatatatatacatacttacactattatataaacacaacaccaacaaaatcatttttaattttttatatacagttatcactatcacttaaaaagaaaaactaactaaagaaaagagagttactactcagtcttgatcaccattccatggataatactttcgactctacaacttcaaatgtttggtccatgtcacttatgaactcctccgatgaagagccggctcttctcttggcttcgagtaatcccaagaagcgagctggtcggaagatgtttaaggagacacgtcatcctgtgtaccgtggcgtaaggaggaggaataattcaggtaagtgggtgtccgagattagggagcctaacaagaagactaggatttggctaggcacatttcccaatgctgacatggcggcgcgtgcacatgacgtagcagccattgctttgaggggtcgctctgcttgtcttaactttgctgactcggcttggaagcttccgtctcccgcttctttggaccccaaggatattcagaaggcagccgccgaggccgccgaggctttcggtccacagaagagcacggcggagacgaagtccgagacggtatcggagaatgtgttctgtatagaagatgaggtgtttgggatgccggggttgctgacaagtatggcggaggcgatgctattgcctccaccgcaatgcatggatcaatggtattatagtagcgatgacgtggacgtttgtgctgacgtgtcactgtggagctattcaacttagtcagtgtagtgttttttttgtgttatgatgtataaagaaagatatgtgttgactctgatttgatagttgtattagagctgtgctagtcagtcggaatgtgttgcgttagtcac

SEQ ID NO: 77968 - DNA, 4595 bp, Cannabis sativa
ataaaaagttcttagagagttgattacaaaaagaaatataattatcaatattctaaatggagtggattcctttaagcgtcttaataatcttctctgaatcactctcgaccaggataaagtcatgcttcctcgaagcagcagtttccaaagcaagttaacacgcccccgtcttgccaatcagagaatttgtgaaattgagtaggttggcagcaccccacaaaactgtccttgagtgatctctaaccaaggccgctatgcacatggaattactacgaaccttaacatcgcagttaattttgattcaatcttctgaaggaagagactaggcgagagacaccacctccaccgtcggggtaagcaagcaagcagtgtaatgtgtaaagtaattagagatagagccatcggcaattttattgttactcgaagagtaattgtgcactttattatgttgagttctccagataatgtccacaacaataaatgcatagagatacagcttgtccgtgtcaacccctttactcttcaagttccaaagaaaagtgtaattgtggtaatgttgtaggctggaggaggcccatcttaggtccataaatgaattttgggccatgtggtggaggttgtattgtatataatgggctaggctagcccaaagggaaatcgactcacccacgttgatcccaagaaaagaagtggtaaataatgccaatggtttaaaagtctaataggtatagcgtcactgcacagaacaacacagcacaacacagcacagcacacagagaaagagcaaaagtgaaagggcttttctgtaatttcgtagtttttgggtttatttttcaactgctacacgtagatgccgtaagcagcaataatatttcacgccaaatcacacgcaatctctctctctctctctctgatcacctcttcttcctcctccgacacattcagacatacccccctctcatcaacctttccaatcagacgcgttttcatttccgtaagttttttttttttccttcttcaccctttatctcatctttttccttctctccctgttctaatctattgatcttaaagtttttttttttttttaaaaaaaaaataattctaaatgtttttagggctaaattctttgattttttaattttcttcttttctttgaatttgggaatttgggttcaatatgggttttgtagtttcctctttggattgttttgaatatgctttttgtatgaattatttcttacatgtttggttgctgagaaaatggaagacttgattagattggggtttaaagtttgtttttcaaggtttgaactccaaatgaaagacttgctttttcctgttagctatgcagaaaactttatggtgattgctatcgtacttactagttctgttttgttttgtttgaatttgctattcccaaaatgaaagttttgttttttaagttatttacttttatgcctaactttgttttgacatttctgcatacatggttttgctccagtgaataaaggtttttctctgcgcgtgacccgttctcttctccaattctccacacacatttgctagccccacaacggctaacatcctattttccattatacctccaagtatatagatatatacatatacacacaccctttaaatctagtaaacatatttgagtacccaaatggaggtcaagctctggaacgacaagcgcgagagagaaatgtatgagaacttcgccgagttatatgccattataaaagctactgagaagcttgagaaggcctacgttcgagacataatctcctctacagagtacgaggccgaatgccttaaactcattgcccatttcaaaaccttaagttcctcactcaaagacaccatccccagcatagagcgctttgctgacacttacaaaatggattgctcggctgccataaatcgcctggtgacatctggggtgcctgccacggtggagcaccggaccgcttcttcctcgtcgtcaaatacatcagctgctgccgtggcagagtgtacacagaatttcattactgccatggattcattaaagctcaatatgtttgcagttgatcaggtgcaccctttgctctctgaccttgctacatcgcttaataagttgagctttttgcctccggattttgtggggagggtgaagttgaaagagtggattttgaggctatcaaagatgggtgcagcagatgagttgacggagcagcaggctcgtcagcttcacttcgatcttgagtcatcttataactcatttatggcagctttgcctaacgctggcacttgattcgtttctgtaagtatgtaaataagaggatatgatctctgattgactctacatattttgttatggtgttaattataggatatatgcttggttgaacctcagtgattcctttcctagggatgacttactatttttgtggatatctgatcttagatgaaagatctgattttggtacaatcatatgttagtagtactagtacttgattcctaatggccttttattggtactatattcatcgtgctacttttcattgtactatgctttaatttcattcttcttatctttaaattggtattactgcttacttgaaacttgttagtgaatatcttctgcaacatttattattgtacatgattctttctggagtcaattgaactcaacagtttgggttcaagacattttaaaagtcaatataacgattatatgactactttggtttgagaaagcaggtattctgtgcccttaaatctttatgctccatccattgattgtttgcttgggtggaagtaggccaaaccgttataagtctagtaattttggcaatgtggatacatgcttaccttttgcttcatatactccttatttgaacagccttgcatctgatttgtatgctccttatttgaacagccttttgcttcatatgtttccttatttgaatagccttttgcttcacatactcctcgtttgaatagccttgcaactgattcagatactccttatttttttttttttttgacgtacagatactccttatttgaacagccttgtatctgattcaccaagccttgatgccttactattaatatattagctctgattcattgagccttgatgccttactattaatgtattagctctgattcattgagccttgatgccttactattaatatattagctcatatctaaactttaggaattaaccattaggatttcaaagtgggtggattattggacttcggcttaagtaaacaagtagttgtgtttgtctgcctgggtgtcaaacaaggactatttaataagaagaaagccagtgattttagctgttgagaaataatcggttttcctttcatttttgcatcattttacctttatttttctattctaacagacgtgcatctgttcagcactcgatttattcgaataaattgttgaatattacaagtattactagtaattttatgagtttaatagttggggttatgagcaaaatgactaaattttgactttttttttttctttcctatgcaaactgaattttgatgttttggttgtcatatacaaagtataattttgatcatctaattagactaatttccttccccctttatataaatatgttttgatttcttccccctttatataaatgtttggttgattttcacaaagagcatggatattagagacattaatggtgtcaaaaactatcgtgaaatatatgggagctgatatttgattcatcttatcggttagaattacactcaactagcctaaaataaatagaaatattctttcattactattcttttttcttttattttttttttgaagaaatcattactgcaattaattagccttcattcaattgaatgtcgaaatattttaggatatatataaattaatcaaatatttttgtaaattaatgtggcaaatgtgccaaactgagcagggaaatgactattaaaaaaatgtgtgaaatatgacgcaagtgcagtctccataaatgacaattttgatcattttattttcttaataaaataaaataaaatcttctcaatgaaacaaacgcattcacaaaattcatttaataaacttctcacctaatattatctctggtctctcgatatgtagaagggtggtggatgcagtggtaaaaatataattctttgtttgacaagaaaggttatttgggacagtgggatagaacaaattcttaaaatttgagttcgaagtatatttttatctaatgaaagaattgtagacaatttttttatcagaaaaataaacattggttcgtagtttttattctaattctgtatagatatatagttttcaacttacattcccatcttttttcccaattagatatggtttggctttggcaaacgaattcttcgaaggcctcataaatggtgcttgcttgacacaagggactagtgtcaatagtttttcttatagtatttattaatttaaaatatatagtaatagcattccatgctcctttcaaatacatcttcatttaaaaaatttagaaaatgactctcaaaacaatctccattctaaagaatttatc

SEQ ID NO: 77969 - DNA, 1585 bp, Cannabis sativa
  modified_base (44)..(56): a, c, t, g, unknown or other
aatgatagattttaaaaaaaaaaggtaaaaataaaagaggacannnnnnnnnnnnnatagagtgtaatttcctctttatattgtgttttgctcatgcgtgtccacctatttttgtagacagaccaacacattttcatatttgggctctaattcatattttacttactaaactatatgcatattttataattttaattatatttatataatttttaaataatattttacaaatactcatataaaaaaataattaaaattatttaagtttgaatatttacttataaaatctcaaattttttattaaactctataaataaattaatatatagttttagttttatattttttaataattttaattataaaattataatatccaatattatattcaaattttattattattttaacttatttatagttaacaaatacatatattattattgtaattattaatttatagtttttttaatgtttcgtgtcgtgcttttctggcttgttgagtgtcatatctttcgagctagtctattcgtacttacgtgtcgtgctctttgtacttcttatgtcatgttatgcttaatgacatattttttatgtcgtgttgtgttttttcgtgcttattgtatcatgttatacttaatcacacattttttgtatggtgtcgtgttcaaacctatatttttttgtgtctgatcgtatcgtgtcaaaaagttctcattgcgccaataataaccaaattttacaattattgtaaagttactaaataccatcataaccttaacctccttattttttttttgttagtaactctaataaaataggatacacccttaaccatgtttggtacaattaatcaaacaataatgtacaacgtatttgtttattgaatggtagatatatacttgtctttactattaaatacactatttttttttttttgatttaagcttttatatattacaatcttgtttgatctaagattcgaacacaggacctccaacacacacccacctatagccacttgagctagcctcaagtggttactaaatacactattattagtgcttgacaatttgttcttatacaatcattttgaacaataattttgttttaattttctgttttttcttccctttcatattctaaatacttttcaatagaaacttcatacctaaagtttagtctttttacatcataaaattatagtggatgatatttttcttatataaaaattttcacatatttattaaatatttgatattaatttatttattttttatttagttgatgttcttttagtgggacaaagaaaaaaaaacacaaattaagttttttttttaattttttttatgctattaaaattttattatctaatttttcacttaataaattttttttaattaaaaaaaattcttttaactcaatgtagttacttttattattattattattatctttttcagttacccttaaaagaaattactttcaatatctttctatattcttcataaaattgttaatataaaaattcattttataattaattgtttgctcttactccttaatgagattatttcataattat

SEQ ID NO: 77970 - DNA, 816 bp, Cannabis sativa
  modified_base (53)..(59): a, c, t, g, unknown or other
gagacagacatatgtctcgtcaattctagtttaatagttattattcttgtctnnnnnnngactaagtagtcagtgagtttgaacatttctataaaacatgtacttaattggaacgagttcattcaattgtatttaatgatacaatgtcattattatatgtcttgagttgattaatattccttctgtaggacacgtgtcagcttctggtacatagccaaatttcgggtttaacaattacgataattaaggatcatgtatatttaagaggtttcaatagaagttatactagttggtattggaatggcaaacatttagctgatgatctatatccattagggaagcggagggtagaagatattgggggtaatgatttcgatgatcattcaatggacttgcttgacgaagcacaggaggaatttcttaatgatcttgaaaaattcgataattttctaagtgatgtagataaacccttatttgatggttgtaaaaaaactaagattaacaacaatggtaaaattttacaacatcagtacagaaaatgaagtgagcgataaatgttttactcaaattttagctgcttttaaagatatctttccatttgaccattgctttatagaatctacatatgatgtaaaaaagactttaaattccataggattgaagtatgaaaagatccatgcatgtctgaatgattgcattttataacgtaaggaatatgtagatatggaaaattacccaacttgttgtttatcctgccataaaataaacaagagtaaggagaataggaaacttatcccccaaaaagtgatatggtac

SEQ ID NO: 77971 - DNA, 507 bp, Cannabis sativa
ctccatcttgacatacatgtctactgcatattgttgcagtagccgaccagagagtagcaaaattgatctttcattttctcttatttggaacttgaagtaataatattcacgacacgaaacttttgggacttttatttcttgggttgatactatatcactttaaattgaagaaattgtaacaatttagatgtgaataaattgtgatttatatatatatacatatttaaggattgattaccttcttcttctgctgctaataattcttctgcgattgatgattgtcaagggtttgttgtttgagtttgttcgatggatcttgattggttttctccaatcctttcaattcctttatgccaaccaatatcaccatgtggaaataacaacgaatattgttgtgagtcataacaatcatagtaatattaaactttgaattgtctaccagaatggttatatagaaagatatcacgtcttccattttgattttcgtcttcattttcaacccatatt

SEQ ID NO: 77972 - DNA, 993 bp, Cannabis sativa
caataatattaagaggaggacatacgaactgcatatataacttcatttctattttctttacaatttgatttgaggacggaggaaaatagtatagttaactattaaaactacttatatataggcaatatcacatatctattacaatatttctaattaaggaataaaataaagaattgattttatgataaataaatattttatatttattgaattttgataaaattaattacataatattctatatatgatcagatttcaatattcattacttgatttgattttctgaattaattatcaaaatattctgacaattaatatagcgcagatactgatagagcatctcacatataaatatagtgtctcgttttttgagctctttactcattctgtttatgatagcagaatttcatctaaagagaattaagctagagcaagaaagcctgaatatatttaatatataataattattatattcagtttaaaggctaatacaaaataaagaacaataattattatattcagttttgatattctataattttagattagtttttcttaaattttcaaaattttctttctttttaaagaaaaatttaaaaatttataagtggtttcctttaatttataaaattttaatattattgcttttaaaaaataaaggtattattagtaatttaatttacatgtaatttaatttgcttaaaattttatatagtattttcatttaattctctattcttttttttaaaaaaaatactattatgttttcattttataaatatcacttcaattaaatatctttcaatataaaataatattgtttattgaataatatctataacttttttattagaaaaagtaattatacaattaaaaaatatatataacctaaaaaactaagaatatatactattacttaacaaaatattctttattaattttataatattattattatatatttaaaaatataaattttgtaaatattttata

SEQ ID NO: 77973 - DNA, 2080 bp, Cannabis sativa
aaaacatgaggagtcataccttgaagccaatcgcctcgattcgccatttgatcaatcccattagaggtaatcatgcctgatatagatgcctgggatgatgaacatgatgagaaagagtagaaaggatgatgagtaccatcatgatcatcattgtcttgataattaatagtatcatatgtttcttcttgccaatgtggaagtagagaagatatctcctcttgaatcattttagctatttcaaatggttcccaatcagttatctccaattcttttaccatctctgtggcaacatctagtggagtgtcactaacaatgtcaaaggggaaaaatatgttcctaggaggacctgcaagaagtagaatctgttacaatttgatatatataacagcaacaaaaaagaaaaatagtgaagtagaaacaagttataaatttgaaaagtaccatctttatcattaaactgaactttgagaaagatggtatcatcttcaggattgagcttccctgtgattttcatctcagtccggggtaaaggatcactcagtcttaattttctcatttctttgtcattcagaaatggtttctgatttcttcctttttgcaattcgatatcattttcatcattgcaggcaagaaaaggatcaagcaagagttcttttgctgataatctctttgaagcagtgactaagcatttcccaatgaaatgttgagcttcaaaatcttgaatcttgtaaaatgctgctggcagtttcccctgaccaaatgaaagtaacatgtttggtaatctaaagactaaaaaaacaaacaaaagggttctttcacatcagaaaactcagcttaccgaggtcactttcttgtaaatttgagctggattggaacattcactgtaagggtattcagaagtaaacatctccaaaacacacatcccaaatgagtaaacatcaactaactcattgtaatcttcctcatacaattctggtgccatgaactctggagtgcctaaagataaaaaaggtagaaattagaggtacaagttttggcactactcaaaaatttatactagttacgtagtacctacctataacactgtgtgctgattgagagccacgaagaactgcagcaagacccagatcaccaatcttgacctgtccaagatgaccatttacaaaaatattgtcacacttaagatctctatgaataacaggagggtcatggccatgaagataaacaagaccctttagaatctgtctagcccaattcttaatggccttgatatcaagcctcttgtattttcttctgtatctgcaaaaatacatattagtacttagagaggctaatatcaaaagggtattattaattatggtaagtaatgaaggtaattacttactctcttaaggtcccagaagtgaacatttctgtgatgaagttgaaagttctattatcaacatcgatccaagaggtgtagaatcgaatgatggagtcatggttgagtgtgctgagtagatgaacctcagaataaagtctctgtaaatcatctggtgatctaaggacttcattcagtttgacttggctccatgccacctccattcccagcttctcatctattgctttgtacactgttttcattgctcctttcccaagaacttcttcaatcttttccagaaagtttatatgaaaaaaaaagattaataatttatagagagtgtaatcatggcatactaattataaatttataataataatgataataatcaagagcagagctagaaagttaattcatcatcaccagtcaccactaccaacttattattgcatataatattgaaccttcatatacttttttacttctataaaaaaaaaacattatatattatctgggtgggaatagatacacaaaaccaaaaggaatcaataaacaaagaacaaaaaagaaaaagaaaaagatggactaataagaacttaaattattaattaatttctccaaccacataacataactacataagtataccaacccaaaagaaaatcccagaactgtaatagtttcagggaattataatacagaacaaaacacaagtagtca

SEQ ID NO: 77974 - DNA, 801 bp, Cannabis sativa
cactacaacaatattggatataggtgacatttaattttgtgacatttgctaaaatatgttacaaaaataataatttgatgacatttagcaaaaaaatgtaactaaatgtattctactttctaaacttaatttttaataacatttttaaaatgttactagaaataaattttagtaacattttaaataaatgtgagtataacttgattttaatgacaattagtaacatttcaattagtaacatttttaataaatgtttcaataatagtaatttaatgacatttggtaaaaaatgtcactttagtaagaataaataacattttaatttgtgacatttttttaaaaatgtgagtataagtatatttagtggcatttgacaaaaaatgttactatttgtaaatatattttttttttacatataataaatatttataaaaaatgatatttataaatatttacacataataaatataaatatcattttaaaaatgtcactagaatattttaataataacatttgtaaaaatgacacaaaataatagatttaatggcattttaaaagtattactataacacaacaacacgatttcaaatatattttgtttaataaattttttttagtttataattattattaaaatttgtatttatttcaaatatttataataaaatttgaaatgttatatataacctaattcatttgatgtaggaaaaactaagtaatgaataatagcaaaggatcataataaatttttttgaaaaaaaagttgaaataatttgtcaataattattaagagaaaataa

SEQ ID NO: 77975 - DNA, 926 bp, Cannabis sativa
accttccgttgaggtgatacttcaccaacttctgtgtcatggcttgagtggcacctttccagttcattcccaaagtatatcgcctttattttgggtggtatgtttaatctgctcagcttaataaatctgcaccaacactagaagagatcttgtacttccacaagattaaatcccagcctatgtagggtcacaaggaaaaggtgggattctatagactggagcgccattccaagagtgtagcttgccccattatttccacaaagtacaagcacgacttttgggattactggttctacacttttgacttcccactaaagagagtcactgcacttaacttggactttaatacaacaagtaagtgtttcttctgttcttgggtttcacgtctctttttttccttttgttatattttgatttacatttcatgtcttccagattgccttccataatttccactgactctagagtttgaggagataatcactttctataattccttattatctaaggagttgcaggtggctcacatggtgaccaccgagaaccttcaaagagttggcctcattgctcctcattaaaaaaattattcaatgtcagtccaggagtcaattcaggaatcacacaaggggatcttgatgaggtgaaggaggccattgcgaccataactattgaatagtccttaaaagttgtgaaggttgatgaatagtggctagctgattggaagagcaaatttctagaaaaaattaagcgaggttgtagagctcatgatccgttttaaggacatagtccccaatgaaggtgctgagggagcgagcactttttttagtgatgagacaccctttcatataattagggttccttccttggcagatttaagtagtactgaccaaggggcatttgatccatatttcttaagcttagacaag

SEQ ID NO: 77976 - DNA, 1725 bp, Cannabis sativa
ctgatatagagcaaagtactggtgcttctttaactcaaaacacaggcttcatgtcccaacccgaactgcaagatattgcagcacacaataaacctgtcattcagcaaccttctcatcttatgatcactcggtctaaagtagggattttcaaaccgaaactctatcttatccaagcacaatggcagtggaaaattgatgaaccaactactgtcgaggaagccttatgtcacccaggttggaactcaactatgggcgatgaaatgtcagcattgagaaggaacaaaacctggtacttggttccaaaaaggccaggtatgaatatcattggaaacaaatggatattcagggaaaagaggaatgttgatggtagttttcaaaggttcaagctcgattagttgcaaatggttttaatcaaagacccggaacctacagccctgttattaaagcttctaccatgagaattatacttacaattgatgtttctaaaggctgggaaattcgataattggacatcaaaaatgcatttttgaacgagactctacaagaagatgtctacatggtgcaaccacagggttttgaagaccaaagtcagcctaaagcagtgtgtaaactcgccaagtctctctacggtttaaaacaggccccgagggcctggtatgacaagttaaagacgactcttctcagctggaattttcagaattcaagagcagattcctccttatttttctacaagacctctagtactataatcatggttctcatttatgttgatgacataattgtcacagggaatgatgttgctaaactccaaaagttcatcaagaaactaaatgagatgttctctctcaaagatttgggtcctctccatttattccttggaattgaagttcatagggatgaaaccggattgtatttaaacgagggaaaatatgtcaaagagctactgatcaagactgagatgatgcatctcaaaccgtgcaacaatccaatgacagtaggaaaacctttgtctaaatctgatggtgatctgctttcaaacccgatagaatatcgaagcattataggtgggttgcaatacttgactcacaccagaccagacctttcattcgcagtgaacaaactgagtcaattcttgcaatccccaaccacagcacactggagtgcatccaaaagagtgcttcgatatctgaaggggacagcctaccatggactccacataaaaccatcagatagattggctgtcacaggatactcggatgaagattgggtgtgttgtcctgatgacagaaaaagcattgcagatcacagtgtttatcttggagatacacttgtatcattgtcatcaaagaagcgggcagttgtttctcgctcaagtacggagtctgaatacagagcgcttgcacaagtcgctgctgaaatagcttggatacaagcattgctgaaagaatttgagtttcctctgccttgtactcctgtcacttggtgtgacaaggttggatacaaccctgtgtatcatgctcgtacaaaacacatcgaattggatgttcattttgtaagagacaaggtgataaacaaagaaatcgaagtaagatatgtaccctcaagtgaccaaacagctgattgtctcaccaaaagtttaactcaatccagatttcatttcttggtagacaaacttggtgtggttgaaacaccctcaagtttgaaatgggctgtgaagaaatgaaa

SEQ ID NO: 77977 - DNA, 1391 bp, Cannabis sativa
  modified_base (1302)..(1333): a, c, t, g, unknown or other
tgcaaaaaggcaacaatgccccttccttgcttgcttgcatgagcacccgaccaggcacacatccccctttcagggttcgtggctcgattgttatagagggaaatatagcagtctaacttgcccagataaccgtcttggtcgagatcccgcaagcgtgcctcggtaaccttggacggagggctcacccatctagcgcccaaagcaccttgccttctatgaggaaccgcgacagtaagttcctcactggcatagtccacaccctcagccaggacgtcaccatctggatcgaccagctcctcagcctcattatatcccccaaagtttgggggtgcaacctcctcctcttcctccgtctcgaaaggactgttaggacgaacatcatcatgttcctcaatctccaggacctccgcatccccttcatgatcctcctcctcctagactgacgaatcttattcggcattgggtaaggtgacatgccaggccacttgagggtcagatgcgtcgattctacgcattgtctttttttgtacgagccatcatcctatggctggacgagagatttaagctaaaatgtctgtcgctcgaagagggtggactagaacgaagacgaggatgatcctcgtgcaagagttgaagcagatcttggtcgatttggtgttcgctttcccaaaactttcctgggttcatctacaaaagacaactcacaagatgagtgtttggtcaggatatcgaacattaaaacaggcgaatacgccgaccaggagtactcaacagattaacgaaaaagaatattcgacgaaagttaaaactcagaagtttaaaattttcgtgagttagggcaaaaatattcatgaagcttagaataatcaagatgaaagacaggaatcgtgcagttcaagaagcaagcattatgaacgatgatatcgcatgaatcgttacaaaggaaaatcgcagagtttctaaacttagggtttcccacatatcttctacagcgaagttaaaagttgcattcagaaaataaatgtgcaaagtaaacgtaaaaaaatcgagaatttactcaaggatcgaacgcctggattaaggttacggcaagctaaacgagtagtttttgtgaaaacgcttcaacaaactcaaagctaaaaacctctcttttcgctctggacttacttagcaaagaaggttggtgaaaatgagtttgtgagcaaatgctcagtggtatttatatccaaacaacgaaaaggggtaaccatttcgaaaaacctcagaagcctctgttccctgtttggttttatgccctaaatnnnnnnnnnnnnnnnnnnnnnnnnnnnnnnnnttaataaagatcagaaataacagatcggaagagcggttcagcaggaatgccgagaccg

SEQ ID NO: 77978 - DNA, 1003 bp, Cannabis sativa
ttgaatcttcatcaacggcctctgattctagtctgccacacaacactccaatccttcttcaccaacataatcctccatcttccacccccatttccccactgcctcctgcccctaccaatttccaaagcaagtctactcaattacttacaccagcctttcacattaactcatcctccaaaactactttaattgatatatactctccagatattggctcttcatcgcgaccaacttaccctgtagctacttaccctccccctttgaccccagttatctctactactaaccctcctcataatcatttatctcctcggtctcaaccagtttacactccttcaacctccactacactttcgggtatccttccaaaccctttctctgttatggctgctgctaacaaagagaatttacctcctgcttccacccctaaacggcacaatgattctctcaccatgagacaatttcttaaacgctgccgtaaccaaggttctcaggctgatccctcccctttgtcattgggagaaatttctggccaaaacgtttcctgtgatgtcatggattcggatggcttcattgacaactccgcggagattgctttgcaatcccgcgactcattatgaaaatcttgagttggaatgctcggggattggggaacccgaacgcatttagacaccttcgattgcttgttaaacaacaatcgccccaaattttgtttcttatggaaacaaaacttccttcaaactccatctctcgtttcagacaatctttgaattttaataatggtttagaatcaccacgttctggtcttagtggtggtttaatgctcctttggcagccaagtattgatgttactttacttaattttgggcgtactttctttgactgctatgttaaggaggacaatgaagctactttccattttactgcattctatggtgctccgagtgctattgacaaggctgattcctgggttcttttaaagagattggctgatgtctctccc

SEQ ID NO: 77979 - DNA, 633 bp, Cannabis sativa
ctgaagcagatcatcacgtttccactgatgcagaaactcctggtgctgataatcaaaaccagtctaaagttgctctacgcagatcacaaagacagtccagaccaccttcctatttgagagattttgagtgttattcggttattcaggactcttcttctacacctcatcaccttgataaatttatttcatatttaaacttgtctaacacatacaaagctttcatacttgcagtgtcctctgtcaaagagccaaaaacgtactttgaggccatacaaatcgttggatggttaaaagctatgcaatgtgaattaaaagctttaaccgacaacaagacatggactatagtgccactgccacctaacaaaagagcgatagggtgtcgatgggtttacaaaataaaatacaatagtgatgggagtgtcggaagattaaaggcccggcttattgctcaaggctatacgcaacaagagggattagattttttcgataccttttccctcgtggccaaaatggtcactctgaaattattacttgcaatttcaactatcaagaattggcacattttacaactagacgttaataacacatttctcaatggagatctcaataaagaggtctacatgtctataccac

SEQ ID NO: 77980 - DNA, 831 bp, Cannabis sativa
agttcaggggacatttttaatgacgttaaaagttcagaggacatgatttggtacatgtcaaaattcagggagcaaaaatcctaattcaccttaaaattattttgaatgaaagtaaaactttatcaaatatcaaattatctttccttacaatcgaaagaaactcaggtgaaacaccattaacacccaaagaacgcctgaaccgtaataaggtgcccttgcaatacaataagcaacattattagtagcttgttaaacaaaataaacatacaccttagacaattcaccaattaaagcacgacagtcttcaatattcaaaccaaaaggcgacaccatgtgacttgaaactttaatcgcttggatataccaattagaaatttattagtgtcacaattataaaatgtgtgttgagtcattaaataaatatgttaaatttttgtagtctattttaaaataaagtttatgacttaaagtatgattgtcatgattttaatatatagatactaattagacaatttctaatttgacgagagactaaatagaaattgtttataaatattactaacagtaatatcataccttttttacaatcaatttaagacttcgtacacttttgctaatctttaattttattgtttaattctcatgaattaattaagaataaattcagattttatagtgttctaacatgtaatatcataagaaatccctaagttaattattgaggatttataattgtattattgtgaacgtaacttgaatgaaattattggttaccatttggataggcctgtcgaatatgaataattattattttatgtaatcgtttatgtg

SEQ ID NO: 77981 - DNA, 1446 bp, Cannabis sativa
ggactcggaattctataaaagtcaagaagcagggaaaattcaagctctaagggaagaagaaacttgtgaagagatggaatttgtaaacaggcaggcggcgggtgattctcagaaatcgaccgatgctttcacggtggtttctcaacaaaaggaaccagggactctcccttctccggcgacggcaggggctagctatggtagggcggtttggggaaggaacaaagcggcagagagttcaaaaactcagcgtccgtgcgatgatgatggtacgtccctcgagacagatagccgccctagtgatgcggatttgtcgacgattaagagtcccaatgaagagctacgtgattgtaggaggacgattcctattcagaagatctttcaacgtatttggagaagtttgaatgtgccacgtgtgggtgctccctcaatgccagctggacatttaaatttaaattttttgtggcagtcggttgggaaaaatctgtcttttgatgtgggccaagaccttatgggccgtccacttagggttagaatgaaccaaagagatgatggacttacaagccttaataagatggattggaactgtttgggcctaaaaaatagtagcatgggcttcagtatttatacacaccatgggccctacacgatgaaattgttgtaccacgatcttcagggaagcaagtcgacttcagtcgacaagaaggagcctctttccatggtcagcaagaagaacccagcccaaatcttttctgaatatttcgaaggcctcctcaagtctgtcaagccaaaatcacgacaaaaattccgaagtgccatcattcaattctggaaagaattcgaaccaagagaaagagattattcaaaggcagtgttgagagaatcggaacaaatcccagtcgtggaagaaccagtaagcaaacgctatgtcgtaatgtactccagaaaaaggaagtgcacatccaaacgcagtagagaagaaacaataggttcagatcgaacggaccgtattgaagaaatgatatcggaggacgacgatcccttgacaaatgagattctcgatttctcctccgagagcgataattcagaagaagatgatgatccgggattagtagaagatgaaggagaagaacaggaggaaattatgaaggatatcaaggctctttggattgatagtgaaaagcctacagaatgcccagtgagttatgaattaggtgtggaagtgggcgaggtggcagcagaagtttctgcaataggcgagataggggctgctcaaggaaacaatttggtgagagccatggaggagttgggactgaatttgataatgaatgagggcgaagaagaacaaacagtacaacagacaaaggctcggaggaagagcattagagaactcaaaaaggtggcctttaacattgactatgacagaggtcagaaaaaagagggatccca

SEQ ID NO: 77982 - DNA, 553 bp, Cannabis sativa
ataataatatataattggcagtaagttcgaagatgtgtttgatgtggatcatttcatcacatcattgagagacgaagtcaggatattaaagaagcttcctcaccatcatataattcatcataatccccctttttccatgccccctgtcagctggtccaacatgtccttttatgataaactggttggttttcccttcttattcattcaattaatatttctatctagcttacttttgttcttaaattatatatctttatacatatcatatataatatacacgtacagtgattcaaaataatcttacctataaaagtaaaataacccaataataagtgtgtttttcgattttcttgtgaactgtgtaatagtaacaattttaatatatgtgagtattagaccatttcgagaatttggtacttagatcaaaagaaaagaagcactaactaattgacatttgtgtgtgtgtgtatacatgcatgatttgtaggtagttccaagattgcaaaagtatggagtaattcatttcaccaaaagtgattcaaggcttgccaac

SEQ ID NO: 77983 - DNA, 2011 bp, Cannabis sativa
tcaagtttagtagaatccgctatattctcaattttcgcctttatttccttagatcgggcaaccatatcacttttcttctgcttgttccacttatttaattctttaccacagaagtgaagcaaccgagagagagattggaccggctggaatggcaaaggctgatcccaaacttcctctataatttttttgcactcctcattttccgcccaagcttgttcaaagtgaaagcgactcccccatttcctagtgaacccggtgccattagttcccaattgagcatcaagcaaaagaggtctatgatccgaattccaccaatttaagagggataccttgttcttcttaaattgccttttccacccttcattacaaagaactcggtctaacttttcaaaaataaggttcgaggtccttccattacaccaagtatactcacctccattcatttttagttcacttaaaagacaattagagatggctaagtgaaagttcctcatcaagtactccggtttaggaccccctccttttttttccttttggttgatgatttcattgaagtcgccgccacaaacccacgcacaagaaaacattgttttgagcctttccaacaaggtccaactatccattcgaccacccagatcgggacttccatagaaccccgtaaagcgccaagaaaagccaagattattatcaacaagagcatcgatctgagagcttgtatatgatttgatatgaacctcatagtctttagtccaaagaagagccaaacccccactcttacccttagcatccaccgcaaaacaaccttcaaaaccaagttgaattcgaattaattccatacgagcactattcaaacgagtttctgacaagaaaatcatcccgggatgatagtccttgacgtgggattttaaagagtttagagtccaaggattcccaagcccttggacattccaaaataaggccatcattgttctcggcgacccagactcgctgagttcgccgcttccaaatccatagcaaaggtcaaatccgacatagaaatttcctttgtaacatcctccttctccgttgccttcaaattcttcacagtagcctccacgatctctttccctctcttaattttacttctttttgggactaccttgcgtcttttagaggggcaatcaactttggtcacagaaacaccatcattgtcatatattataggaacatccacaaggttaatagggctattgaaaatagatttaatcaatgactccttatcagtagacgaaggcataatctctactggagtagatgaattgccaacaaaagtctctatctcgtctcgccaagagccatttctttttgtcttgctttggctttctattaacttctcctttatgaaccttccttcataacttaaagtaccttgagagatcatattctcatgagtttttgaatccaagacagcagtattcgaaatcacttctttacatttatcagagtgagtgaatgtggaaataatggagtgaggacaagaactcgcccctggattcgtcaattttcccggagtcactactgatggaggacccaaaatgatatcgtttccattgtcataaggtgttgctgttgaattattaattcttttctctgggaaacccggaggaattacaactttaccattcataggaggaaactcattcccaatcaaattaagctggacttttttatcgtcaactttcaaccacgaaccatagcccggcttgacatttcccattccatcctcaaatcgtttgattggttctgcacaaacccgagtatcatggcccacaaaaccacaattaaaacacataaagggtagacgatcatacctgaatgggagccacaattttcgaccttcgttcgggaatagaaatcctgggcaaatcgggtttgacaattcgcaccagaccttgaaagagaagaagcctttcgttgcaatcttggctgtatcggctttctgaactgcgatgatttcgcctgcgaagctagc

SEQ ID NO: 77984 - DNA, 562 bp, Cannabis sativa
atcacaagcaagagttagaaatggatttgtaccatctaatggccattctgatatgtacgatgaagtcggcaaaaagtctgcaggtttagaagatttgagagccaagtatcagaaagaaaggagaaaatgcaagcagctagaaagccatatttccagattgaaggtatgcacaaagcgaaccccatttcgtactgagccagatctaattgataattaatgttgtgtagcgtcatgtttcttcagctatatagaatatgctaactagttggtttttgcggctttgacttaataaccgaaaccaaaggtcaataatctgtcagtgcacatatattgttaggaaactagtttttcaaagtagtttagttatttctatctactgtgttttttttttcattgtttagatgctgtaaatgtcctgagcctcttttatatgtttgcgtgatattatttgaattttggtgtttttcattcaaataaagttggtagaaataaggtattacaatgtagttcttttatgtatgcaatatggttactaattcaatcataaactcgttctccaggg

SEQ ID NO: 77985 - DNA, 920 bp, Cannabis sativa
gggctacaacgtcttcttaggtgattctctcatatcatggaaattaaagaaacaagcaactgtcactcgttcctctgcataagccaaataccgcgcaatggccaatgccacatgcgaggtcacttggatcacgactctcctccaagacttccccatcactcatcatcttcctacaaatctctactgtaataatgctgcagctatctacatctgtgagaatcccgtattccacgaacgcactaaacacgtagaaatcgattgtcacatagttcgctccaagctccaagctgcaagctgggacactcaaactgctctatgtctatacaaaactcaactttgccgacttgctcaccaaacatctgcatccctctcagttcaacaatttattatccaaaatgaatgtaaaaaaacatttacatataatatttaagggagtattagacatagaatatattcagttagttaggtaattcaattagctagttccaattaactcctaccacttagacatggctatataaagaggattacttcctcttcctctgtatattcttttacaataataaagaattattgtttcatttctgttatttgtgagtgtaagaagtatataatagatataatatattgtgctgaggtttatttatttattttttcattagcttaatttatgactacatttttactaataaaatcattataaacatcatcatcgctacagtgagagttggttttgcaatataattaattaattaattacgcaattccctctcttttcactacatattacaaaataagagttattgcttttacacttgtaaaattaatgtttataaaataaatatttatattaatattagcattatctgaattaaaaatattaatttcacttgtggggggtgacggtagatcattgtgtt

SEQ ID NO: 77986 - DNA, 586 bp, Cannabis sativa
gtgtttatttctttaattactttaaccaaaaaaattctaattaatataagtttccattacaataaaaaccaataatgggcaaaacctcgcttcacacttaagaaactaaaggctttatgggtaaaatggtcaaataccaccaccccgtctaaactcaatattcaaaatatctcttatgtttgtcccactaagaattaggttctaaacctatccatatgactctaatggtcacccatcgtatttttcatcgtcgccgagcaaatatcataaaaattgcatatttcatatttagcataaataatactcatggagtttaataaaatctccaaaattgagaaattataactctaatgcccatttttgaaaatagggcttacaacataaatataggtatataactataagataaagataattaatgttaattaccctactaatccatatttaagttatgcggtcattacaccaccaatgtcaatgggaaacatgaacatttgggatcgttgctaatcctcatgactatcataactctgttaaatctggacaaataatcgcttaggtctgtgtcgcccatgtacagagtcat

SEQ ID NO: 77987 - DNA, 1082 bp, Cannabis sativa
actttcttatgcgcgagactaaatactcgcatgagaatggttcatctaatggcgcatcttcaacaaaaatcgcgacatcctcatcatcttctcctttgtccccacgagcaagcaattcaaagtcttgccccatatcctcaatttcattatttggagcagctctgggatggataaagcttccttaagaaaatacaatggattcgcttccttacacttcaaaaactgtcggtacttcaagttcttgaaccaattgagctatttcgccaataaaccatgaagcttgcaaatccaatcttgctagaacctcatattttgacagcaatgttggaataaagttgtcatcttttttaggttcatccacaaatactcctccatcagactcgaagatctagctacctgagagatcgctcatctaaaagatagaagatcttttcagcgtgttgtgcgtgcaatttcaagaaaagtgtcctcacatgcataagttgacaaaaataaagcatgtaaaagtaacattatagaaaaaaaaaatgcaaatattcatgctatttttcatatcccaagtgaaaaacctatagacatgtgtagacattcatagtattctaccaaaaagtgtgagtattcgtagttcattataaataagatgtgaatactcaaatcataggtaaaaaaaattcctgaaaaattccccttttgacttatttcttcttaaagagttatttcccagaacttatcctcccattttcatactatttctacccaaaaaactcagaaggcacgcgattattcaaagaagatactttaaactaacaaaaagtttttagagaaccaacctttaatctaaaagcctgttggagttcatgagtttgattgccaccttgaagaattcttcgaacctcaaaatgatctttagcgaaagaaaattcctcaaagttgactaaaatttcataaaagttcttggagttttaaagaatttttttttcatgaaatctaaaaatgagagggaaagtgaaaggaatcattttgtatcaaagaattttaaatacggatttagtctcattcgttaagatcatgatatgtggcgt

SEQ ID NO: 77988 - DNA, 683 bp, Cannabis sativa
gacgggatatctctatgtattttgaattgcgacttgagttgtgattcaagttcctaattaatttacgatttagggttgcaaagaagaagaatggtagaggagttttcaaagtgatcgaggcgattgcatatggttgtctatgaaacaaatctagttttggctaatatggaaaaaaaaaaaaaaaaagggggtcttgcttcttcttttgtttactaatgaaaattattcaactatttattgtttatagtggctgaattaagcttctaaaaaatcacaaacaaaaaaaaaatcacatacttaaaacttttttattactactttattactattataggacttctaagttccaatccaagttaaaaaaaagtccataatttagaaagaaataagttaaaagatatggataactttagaaatatagggcttgatcaatttgtccaatttccatgaaacatttatgatagggattgatttcacccgatactagccttctacccctacatatcagtgaaattgaaaaattatagtaaagtaaaaaatgacaataaagaataatgtataaataaaaatgaatattgtaaacgtaaaactaaaataataagtaaattataaaaatgaaaaaaaaattcgtcaaagtgaaaaaaaaaaaaaaaaacttgataacattcgtacaaatggtaatt

SEQ ID NO: 77989 - DNA, 3286 bp, Cannabis sativa
attaagaatatcaagttattgcattagatcaatcttaggttggaaaatgagtttaattcaagtacttggacagaagacattaaagaccagaacttggtaaacttacctggccgaagtgccataacatgtctgtaagtgcgttatagaaagcagatgctgtggaagagtccatctgctttacttcatcaaacagagactgagcttgaacccaaacattttccctgtagcccatgagaagaccgtgggcaacaccatagacctggttgtcaaataaccggagctcctccaataagattgaagcttcttcaaatgaattacatcggctgcatttattacgagacaaattatcctcttattcagtgagatccttggattatgcagtatgaaatcagaatattagaaggaaacagaaagcatatggtgctcaatatgctcattattcattacatcagatgattaaattgttattccatactctgtatcatcaaatatggctattgcatttaaaattaaaaatccatcatcccaattcagttaaccaaacccgacatttaggcaggaaaaactttatgagagaaaatagtagagaaaaaatgaaggacaatattttccataaatttgacatgagacattttttttaatattttcttttttatacatttgtaattgatctaaatttacaatacactcccctccagtctaattttttctgaaaatagaatattcataatttattgattctatccaagaatcctttggattttattttttttcctttttaaaattcaagaacgtccaaacaagggcttagttttagtctggagtaatatgtttagctctaggatcgcataagcaaacgtatatttttacactaacgtggacaataactagttacaaatataagaccagttgaaaccttcatgcaacgctgaatatattggaagatggaagagcataggaacaagaaacatacctgcaagcatttaaaattgcggaaaaagtgacaacatttggtttgatattcaacttgtgcattttttgaaagactcctagaatgcataagatttcttgactacccttcttattattcttccattgcccttctttccctgcagcaagttgcccaaacatctttataatttgactgtcggctttatttccaacctcactttcaattgcatcctcatggggatttgaaaccgaagactttgccttgagcttactttctacactggcagcagcatcaagtgaagaacctaactcctctggtcggccaaacgcatcaataattgaattataagtgatgacattcggcctaattccttcctttgtcatctcatcaagcaaagaaacagctgactccaccatcccatttttgcataaagcattgataagttcactataaagaacaacatcagcctttaatcctgcttgcttaaactccctaaaaacttccattgcctccttatacaaaccaccttttgaatacacatcaatcagtgttgaatacgttagtaagtttggagatagtcgatcttctttcatgtgttggtacattcttttgacttcgtcgtactttccttgctttccatacccacccaaaagagcattataagacacaacatccttagtgatcccagcattatccatctccctgcaaacactcattgcatcctcaaacctacccagcttcgcataaaccgaaagaagtatgttatacaaaactcgatctagagcaatagccatatacttcatgtcgctaaacaaattcaaggcatcttccaatctatcggctttagcatagccatcaatcatggtactataagtcaccacattaggataaatattctttgatggcatctctgacatgatctgatgagccaaatccatctgccctcctttacaaattgcatccaacagtgtgttataggtatatatatcttggtcaatctccctctccaccatctcattaaacaacttcctagccgtttcccacagcccccctcgactgcaaaccgcgaggagtgaattataggtaattcgatcaggttgcactccactcctcaacatctcatcaaaaatctccacaaccctcttaaaatctgctccccctttaccacacgcatcaatcacagcattgtaagtaaccaaattcggtttcaagcccgaccccttcatcgactccagcactctttttgcctcctcccaatacccacttcgtccataagcactaatcaaagctgagtaagtgtaaacagtattcccataaccagaatttaaagctgtttcaaacacatttttagcaagctcaacctttcctaacctaccaagtgtactgatcatggcgctagtcaatttcccttgttcagtcttcctcctctccctcgaaacagcaaactcaaaacacctaattgctttcctacactcacctctattcccaagttctctcaataaaaaagtgtaatcatcagacccacaaagcttggactcaaaactaagcaaaacaccatcaagacccacatcatccttaccgtacacaacagcctgctgcagagcctcctcagcaaacgaagtatggcgggagcccacggtggtcttggggcgtccccaatgcattttagagacgaaccgggtcgaccgacgaccggagaagacagcagcgagctcagacttgggagcagagagagggcaaagagactgaaaggcaggattttgagatagactagccgtagtagaagcgggtttagcggtgttccgaggcggaggcgccggtaaaggtttggttaaagagactttctgagaagtccattgctgagtttgacgattggtctgccgctgacttttgaggttggggttttgaccgtattggtggctttgatagggctttgacgccgtgattgagcagtgcggtggtgtggacgccattagaacagagatagagatagaaaaggagaagctttaatggagggtttaggtagggtttggtactggttagaaaaatgagctatggagagtagcccataaagaaaaataggatgatgggtaagattttagagagagaaagagagaagagagctgagttggctcggctttcctgattttgtgtttttagattccgacaatacattgagatttccgtctttcccttttaacttattaatttttcttcccataaatactgtatacccaatctaagaacgaaatcacttgtttagccattcatccgaaatacttgttacgtttgatgataacaaaacgcagcgttttagctgacgtggttgggtat

SEQ ID NO: 77990 - DNA, 1248 bp, Cannabis sativa
  modified_base (28)..(46): a, c, t, g, unknown or other
  modified_base (72)..(72): a, c, t, g, unknown or other
tttaattaaggttaaatttctctctttnnnnnnnnnnnnnnnnnnnagggggccattagtagtgggtacganatactgaacccaaccctccctcaaatgaataatcctaactatgaaggcccatttactttatttaaataattgtattatgcttattatattagtttaacctaattaaaattgattggcaacataattaattttcaaaatatatgaaattattttttcatcaaattattttcatatttgatagcacataatctctcaggctatagtcaggtggattacgaccattagccttgtcttttgcggaacctccattgttgccaacattggcattgtcagccatgactacttcttgttcaacccccactacactcctttctagcctcttgtttcttctatttttctaaaggtcttctaaattttaggatcagcaggcactattacactttctccctgacgtcgcataaactaccaatacttgaaatagaataagaaaaattgaaaaaaaaatcagttagcaacaagcagaaagaataacaaaagtagaatttaatctaattattgtaaaatcaatatttattcatttctccagcaatggtgctaaaaatacttattgcttaatttttataatctacgcaagtgtatgtaatctattgcaaataatactcgcacatgtgagatcgatccacaagaaattgatactgagtacctctaaattaggtttattatttttggtaaaattgaaaaatatagttgaacaattaattaactagaaattaaaagacaataaaataaataataaacagtgtagttgactatggatgaatgattaggaatatgaatccttatgtcagttacccagttgttaatgtaaattattaattttctccctttaagtgatgacaaattataaaagtaacctaaactgttctcagattattaatgtcctaaatcatattttatctacttgcatctttgaagtaaattaacaattaatttgcattaattacagaatttagatatcacataagctatgtaaatactctcgttttaaatcaaaacctatgtttgttctattagagcattcctaatattcacttcttagatttcattttaggatcatagatcatattaaagatggctagtctaaaacatgtattaaagtaaataagaataaattacacaatccaggaaagaaaaactaacaatcacattaattaaattgggaaatatcaactaaca

SEQ ID NO: 77991 - DNA, 1674 bp, Cannabis sativa
atttcagatgtaatcttaaaccattataacatatactcttattttagtttatttttatgttattgagttttattaaggttatgattaactgaaattaaaccaatgcttaatataaaccatacataccgaaactgtagccttaataatggtttcacgagaatatccaaacccagaattttcctcaacaacagacaacataacatcaatgaaatccttcttattctcatttgattcttcaccactcaaactcttaatatcatcatttttcttgatatgttcctcaacccaactcccaatcaaatcatcaacctccttcccaattctcttcatagatttcaaacgtccctgaatatcaatccatttgggaactgggatcaaatcagaaaccacaggaaccccagatatgtacataaactcctttataagcttaccaatcctctgagcctcaccatcatcatagattcctcttccactctcaaaatacctctttgaagcagtaatctcagttattatgttcaaagtaaagcgttcaatccaatcactaatcacaacaccaaccttggttgttaaatcacaacaaccatacaagtctttgatcaaggtttgaacctctgttttttgcacatgcttgagtttttcaagtcttcgactcgagagaagctcgaccatgaccaatttcttaatggttcgccagtacggtccgtatggcgcgaacccgaaagctgcgtagttgtagccgaggatggtcccatgagctgaccttggccgcgaggcgaaggtctggtcgtttgtggtgaaacattctttgacagcttcgtagttgcttatcacaagaatagggtgaaccccaagacggaacctgaagattggaccgtatttatcggcgaattctgctaaggttcggaaaattggcttctgggaattgatcttgtggagatgacctatgagtggtaaggctccagagagctctggggctaagttggtggtgggaattttcattgatttcctccatagatacagagtaagcaacaacaacagtcctagacctggaattgctagcaagtgagagtgagagtgaagattaagatccatttgggttagtggtttagaagagtttggtttggacatgaattttcttgtttagtttcgtacaaaattaataattgttgaataataatttattatatgttaagtattacatcataaattatttaattttagtaaaacaggataagattactatatttttgtatcttatcttatgaatgcgatttgttactgactagattgagaaagaaagcaatggtatggaacttaatatgttttgtgtaagtgttactaaattggtcgaacacttcaacttgtgaacttatggatatcatattagctttactctatcttgtggtgttggttgataagaaaattagaatcgaattttcaatgtagtatgttaatatcaattcgaaatgaataatatactttctaattttctactataatttcaactattgtattttctctctatctctcttactccccatcctctttaatctctccattcttcatactctttcttcctcccaccaaacgtagccttaaagttaattgtgatgttgcaatcttttttatttgatttaattttaattttttgtcaaataatctagaaattaagca

SEQ ID NO: 77992 - DNA, 1027 bp, Cannabis sativa
atgtaaaaataagagtggattctaattcttcggggcatatagtggcagaagtggcagggaaaggcttcctaccatggacgataacatgtttttatggtcacctggaggcggctcaatgcgaattctcgtgggaatttcttagcaaaatttgcagggagactcacggaccttggttgtgtgttggagactttaatgaaattgtaagcttggcagagaaaagtgggggtcgtatgagggggtcatctgctatggaagcatttaaaaaagtgttacaccaatggtgtttgttggactttagttcaattaagacaaaatttacatggtgtaatgagcatgaatcgagcccagtgatggagaggttggataaggggctctgtaattttgaatggctaagctagtttgaaagggcgaacatacaattattggagcggtgagaatccgaccatcgagctctggtgattgatttaccgattcaggaagaggggttgcaatgtggaaaaactaagcggaatagtacattccatttcgaggaggcgtggtgtgaggaggataaatgtagggccattgtggagaaccattggaagggagcggttgcaagtgtgtcagcatgttctttttatggtaaaatagctcgggtggggaagctattgcaagattgaataagaataaaaaaaaggagttcaatggtaggatcgtcaaggttaaaaaaactctcaatgagcttacttcggcacaacagcctagggtatggactggaaaaaaagttgagaagcagctaaatgtattgatggaaaaagatgagaagtactcgcgacaatggagccgagctctttggttgaaatgggtcgacaaaaacacaaagtatttccaccataaagcttctacgagatggaagaagaatgaaatcaagggattattggacactatgggggtgttgcaaaatgataagattattgttcgatacattgttgaggattactttcaaaaccttttcttggccacagaggtgaataatgtgattgttgag

SEQ ID NO: 77993 - DNA, 2664 bp, Cannabis sativa
aaaacggcaaccccattatcattggcctatgcaaaaggagtttgattgaaccagctgtcaatcttcgatagcaacgaagaagagtgagcaagctaagctaaggtatggtcttcaatttttttttttttaaacaaagcaagctacgtatataatatattatattcttgtctttcgctttatttttaataaaatatatagctgaaagaattgttgatgttcacttttgccattgtataggagagtagtggagttagctacacaaaaaatatcgtctttaactatacagtataataaataaataatttataaatgaatgagccaacaagaaagaaaaacaaggtgtaaaacaaaagactattccatttatgccaagttgtcatcatataattgctttctctctctttttttatctcccaacaaaataataataataaaaaaaaccattgtaatttctaaaatgataattataagtatcacacaaccaccgaaagcaattttggaccctcttaaaaataaacaaaaacaagttaaaagatgacaatatcttatctactactcattaattaattctctactcactcactctaatgtaccaaaaaaaaatactaaagagaaaaactccctttaaaccagaatcaataatgtgcataatggaaaaagaaaataagtatacctaatatttgaccccctaaccaaaaccataatagtatattttttaacatctctctctcaaaaaaagaaaatagtatattttttaaaataaataaataaaagaaaaaaaagaaatgccgcgtggactggagaaggcgactttatttccatctcccgctgttttcgaattctctttttaaatttgtttaatagaccgtagacaagtccaaaagtccaacctttttatttctccatctaaataataattaacaaaatcataaacaaaattatatttctctctctaacatttcattgtctctgttactatatcacattcctttactgccaagacaaagctatcattttttttttaataaataaataaattttgtgatatgagcttattctaatcctttacctttccgtacagtcctaggttaaattggtctctcagattacttctgtgtccatttgttttttcatctgtctagaattgattaacctcctctgtaaccatggctggtcgctatgatcacaacccttttgccgaagaagaagaagtcaaccctttctcggtaagtctctgtataatccaaacttttgaatttgaactgggctttgagctaagtgaatttggttgattatggcggttgactatccctgatcaccattgaaatgggcttgatttattaattaagaacttgattttactttctggggttcttttcatatgttaattaaactgggttatgtgttaaaagacttgacttttcacctgtttgttgaaattttacatgctatttatcatgtacaagaaatcctcgtgttgccgaaatttctcatagaaattatgtaataactacgaaggtcctcaattttcacgctgcaatacctaagtgagtctgaattatatatttatgttggttttatggtctgttataccgaagtgttgggtaccctaatctgatcagcaagcactgtgatgatcaaatgccatttttgtagtctgaaatatgagtttgtgtaaccaaaacccatgtggagtggagaagccggataaaaagggtagaggatttacttaccattagaaaaagacactgaatttagctgttactaatatctaaatgcatgcctgatggcagaataccatttagcgttccttttcttattcagaaaccgatgctaatttttacttattagtcatgactctttttttgtattcttcttaacaatgtatttaaggcaagtttttcaatgggacgtgttatacatgatgtttaatccgttacctattattatgtgatcaaaaaacttaacttccattcagaagccgatacaaatttagttcatgttttttggttcttttaccttgttgtggctccttccctactggcatatgctagttttctcattgtcccttctcagagaagaaaggttaaaaaaatggaaggcatacaaattcttgtaagtgtaaatccattttttcattttacagaatcctggaactgctgctacagccaataactcaaggttatctcctctccctcctgagcctgttgatttcaattatggcagaggttccacagttgatatccctatggattcgactaaggtagggccaaatccttactttgattgtttgatgcgtagtagcactattataggtgctttgtttaatatttgtgatattattttttttaggatttgagaaagaaagagaaggaactccaagcaaaagaagctgaattgagaaggcgtgagcaggtatctatctgagatattataatttattaatgcatatacattttgcatatatatgactggctttttaatctgagtatgatcattattcatgatgaaagatggaatggttctttcaaactcttcaagtgtgggtgctcaattctttagtaggatgttggccttcagtgttgtgaagcatacagtttgtttggccaaagatgtcctatgtatgtttgagcatgtgcataactttaaaggaaaacaataaat

SEQ ID NO: 77994 - DNA, 652 bp, Cannabis sativa
atacaattttattaatttaaccaaactattctcagtaatatataatcaaataatgaaatttgaatttagtattcataaaattttgtgacaatttgattgtattgataaaaatttaagtttagggtaccaaatatgtataattttaaaatacaaggtaccaaatacgtattattaaaaacacagtgtaccgaacttgtatttagataaaacacaaagtactaaatacgtggacaccaaaaaaaataataagaaacaacgtacatggatagattccttatttttagagcatcgttaacacattgctataatgtgtggcccatcaaatatgtcatagctttgatggtggcttgcctattgaaataacaaaaaaaaaattaccttagctcctgcaaaacaatggtaataattaaagttttttttatatttttattttattttatttatattaatgtattaatttttaaaatttagtgtgataatatttttattattaaaataaataatatattaaataatagattatgtaactataatgatcacttttagtgttagttagtcttagatcatcttcaatgaaagatgtaaaaatggtactatatttggcacaaaaatagttttgtagtaaatttacacaaaattttagctttactca

SEQ ID NO: 77995 - DNA, 568 bp, Cannabis sativa
acttaaatatattatcatcaatcaagagagttacaaatcagttactaacttgtaaactcttcataggttatattttggctaaaataaactaaatagtaaatatttaattttccaaacacctttatatattctcaaatagtcatttaatttatattacattatttagaaataaataatgtggaaaacactagtaattttagatgggcaagcacagatttataatgtggctagtagtgatggagaaattgcggaccagaactcagataagcaagtttattcacacatggataaaaattgtgttttgtgtggtgatgagattgaacacatcaaccacttatttttttgaatgtcattacacaaaagtttgtcttaacagattgaagaatgaagctactaacgttaatagattattactctgttggatcactaaattaagcacagccagttttgctatataatctgttagagggtaagaagtgatgtgatgttctttagtcacacatggtatggcaaatcaatcacactgtacagatgataccaagaaagaataaacttacaactttttgtg

SEQ ID NO: 77996 - DNA, 3397 bp, Cannabis sativa
  modified_base (3350)..(3354): a, c, t, g, unknown or other
agcggagagattgggtccccttggcgaagccctttctcccctttgaactttccttgaatccgccattcatcagcaaaagataacttgtgcttcgtaaacaatccatgatccaaccaataaacttggaaggaaaacagagagctgctaaaatgtcttccaagaacccccaatcaacggtgtcataggctttactcaagtcaactttaatggcacaacgaggggtgatagttttccttccataacatttgataagacctttaatgaaagccccttgattttggtccactaaccatggaaacactttagctaatcttgtgcacaagagcttagatatacccttgtatatggtagtacagcaggctattgggcgatagtctattgcacgagaaggacaatcggttttaggcacaagggagatggtggtttcatggagatcagcaggggacctaccattctcaaaaaattgtatcacagcagtgcaaatatctcccccaattttaggccaaagctctctataaaagcctgaaccatagccgtcaggacccggggattcggtaaccgggatgctaaagaaagctttctttatttcttttctggtaaaaggcttcagaagcccaacttgctaatgaagggaaagtttcctcccactgtccatacactccctgttaaacaaagaatgggtactactcgaactctccataaaccctttaaaatgctctaaaaaatgattcaccacctcaggaaaatggtccacctgttttccttcattgttaataaaagaaacaatattgttattcatccttctcttcttaagagacgcatgaaagtaagcattattatcatcacctttccttagccaagtaattttactacgttgttttaaggaagctatgatacattttaccttgagattcttacgcttctactgcccttttttcagcttcctgcagtaacaaattcccaggattggcctgagactcatgaagagctgaacaatacgtctccttagccaaggaataagacttcccaatgtcaccaactgtctctctattaaatctaatcagcttgtgtttcaacctcttcattttgagaaaaattctgtgtagacccgtgctagaacaaggctgcttccaactatccattactacatttttaaattcactgtgctcagaccaaaaattgtagaaacggaaaggtttatagccaataatctcaggtttcccattagagacaacacaagaacaatggtctgacagagtatcccatttgaacatggctgccgaattgggaaaaggatcagcccaatcttcattagcaaaaacatgatcgatctttgagtaaattcgctttcctcctccctgctcattagtccaggtaaaattggaacccgaacttttcaagacatccataagttgaatcgaaagccagttattagaggctaagagttctccaggagtaaccgggttcccaccttgtctatcttcaacattaaagactgaattaaaatctccaagcaagagccaaggtttaactggtaatttcgggtctgaaagggtatgccacattgatctcctctcttctacagtattcagcccatagacaaaagtgatgctaaccgccattgtgaaacctgccaatttaacaaaacaatggactaattgattagtatccttagtaacaataacacgagcaaaagtccttctccaaatcacaagaattcttccttctgtaaccgaactagtatagtagtcccagccatgaaatttcttttccatcatatcttttatttttttcccttcactttagtctccaaaaaagcgccaacaccaattttattctgtttacagaagtttaagacctcatcctgtttattcaacttatttatccctctaacattccagcttaagatgttgcaacaatccattaactagattgtagtggggaggaatctagtttcggatcgtcaatccactcctctgtttcagcttccaatcttcctggttgtaaatcaagaatatcaaaagcatttttatctttatccacttggggttccggaccttttacttctttcggcttatgagctattttcttcggggtaatccattttttgttcccttcttttttattctgagtagcagccgagatagtagagggattctctgccttagtatcatgttgcatcattacagaagaacttttaaccgctcctgttatctctactttctgagtttgcttctttttctcttgaccattctctgctttcctacaatccaccgttagatggccataaccagaacaggatttacattagacagggatccattcataatcaactgcttgctcaactaatttcccatactcatttaaaaactcaatggaccgtggaggtgtttcagcaatgtccatctctaccagcactctagcaaattgaattcgggaacgttctttagtaaatttgtccatcatcaagggcttccctattgtgctaacaagagcactaagacaattgttaccccagtattgaaggccaagtccatgaagacgaatccataaggggactgatctaatcaatcagattgagtatagatccttggaccaaggacgcacaatcacaggttttttttatcaaattgaacaatcccatttttaagaacttgatcacgggttgatgattcaaagaactttaccatcataagtcctcttgtcattctaataacccgctctatccccaatgtaccccatattcgtttgataaaaccctcaaaacagccatagggggattagcacctaaaaccatacaaataacagcagtatcccagcaagctgcctgagcattaacttcctcaacatctacctgagctattttcttgccctctttgagtaatggttcctcaaatttcaatttagcatcagtatttgggaacttacttgctgagaatttgctccaatggctttgagcagattattgcagatccatttctgcttcctcagcccacgattaagaggctcgagcatcaccaaaaccctcgtcctaaacttcggagtcttctgcaactcgaccatcctcgaccgctttctgattcgaacctccgtctccttcctcgaccgcatcagctagggcttcgcctaactcccccgactcgacttcagcaacttgcttctcccctgaaatagagaacgaagctaaatctggagaaaccaatcgaggcgcaggcttcgtggtgactcttttcttcctcgccatggaagagagaaaatcagcccctgaagcttttttatgttttcatactctaattatatcattttacttattagaaatttatagattgtattttaaatatttaaataannnnnatatttttgtagaaatttgaataatgcttaatttgagatattt

SEQ ID NO: 77997 - DNA, 720 bp, Cannabis sativa
tggtccttgtattgtattacaatagagttgtaatattttgattttcttccattataataatatctctaacataatacatattattctttataaatttaccattatatatattgtttgttgtttaagtataaccataaacatatataatacaaaatgctcaattactataatatatttctcatcctttctccattctttactataatatatttttcattactttatttcatttcatctattacttatattatttcccacatacattttcgcaatcttatatccaagtagagagacatgtattattgtatgttgtgatcaatgaagccactaaagctagcttagtggtgagagagggatgggaaaaagagagaggtcatgggttcgaactaatgaccttgaagctattaggctattaactgattgtaaaatgccattacgctacacttaaaaaaaaaaaaagatgtgatcaatgcttgatcatgcacctcccacacaaaacgaaacaagagattgatcaagaacaatgcaaacaatttgaaaagcaattcgaattgaattaaaaccagagaataacaaatgaataaaccagtaaactaacaactgatataccagaaaatgaacaaagattaatgagcaattatagacaagaaagggagaaagaatcaaacacaaccagaattacgaggttcgaacaagtgatgatgaatcacttgcctactc

SEQ ID NO: 77998 - DNA, 1840 bp, Cannabis sativa
caattcaacttttatatgacttatcaaagtaaatatatatcacgtaaattaatcgaagactacacagtgctcaaattttgctaaaaatccaatcacacaaacacctaaatatagttgtgattaatattataattaagcggtaaattaactaaaactatatagttaggctatgtatatttccttaataataatgacatgtcaattaatttcaagtgttaattctccttaattagtgccagctagccaacacatctattgattttcataccatataattaaagtttaaattaaacgattttttttgctttttggaaaagttaatgatgtacatttatcaaataataaataaattatttgggaaaattttgtttttattttttttatatataaaaaaaggaattgtaaagtcttatcttatatataggcaagttaagtatgttattaattttcaatatcagaaaaaaaatcatatgacagctaataatatatgaagttaatttctcttactgaaaaagaaatccacatagatatttctgaaaaaacacataatatggtaaaaagtaatgtttgaatatatacacatgtatttgcaaatgacatactaaattaaaaagaagagataattaaaagaaataatttaccatataataataaattaaataaaaaaaatacaaaataattctatttggaaaaatctgatatttttttatatgtgtagtctccgtgtatatacaggtgtatttttctatttttaaaaaaattccaaaaaataatagattataataatatatatttttctcttttaatattgtaaatattttatacgttaaatttacagaaggccagtccattagatattattattagatttgtttctaccaaaaaaaaaaaatactctccacatatccttttctaaattctcattaaatttcaataaatccactttccataataaacacttttttttggttgaataatacaaatttgacaaaatttattaaatttctcaaacaaatatatgcaaatgcatgcattaacatgtgttgtgtgtatattagagaaaaacaataatcacaataaacaaacttccaaaactttgatattgtacaaatatattaccaaacatgtcctaacccaaaaacaccaaaattttacctataaattacaccttcattttcatttcttaaacacactcatcaaaaaagaaaaaaatctcactctctttcattttctttaaaaaacctaaagaaaaccctagctcgagttttgtatcatttctctctatggcggcgggtggtagaaacatgaactcatttcaagctcatccactgccaccgcctccgcctccacctctgccgccacgtggacaaggaagaggccctagtatgggccatgagcaaatagcttgccgtttgtgtaaccaaatgttcatgaactcacaagccctaataaaccatattgagactcatttggtggaagaagatttggctatacaaagaagaaataatttcattcatcgtcaacaacaacttcaacaacaacaacaaattcatcatcaacaacaacttatgatgatgaataatcataataataatcataataatcatgtttatgttatccaatcagatggaccagcccaagctacagtttttccttatattcatggacaagagccaacttttatccaaacaccttatcatcatcaacatcatcaccatcagccgtcgccgcctcttcaaattccggcggccaccactattccagtcaacatccaccaccatgctgctcaggatgttattcctgcccatgctgccgccgctattccagtcaacatgcccgc

SEQ ID NO: 77999 - DNA, 607 bp, Cannabis sativa
tgcaggaaatccaattgaatttaacttatttagtatacaatctaattttaatgaaaatgctacttatataagtaaaaatactaggtgctgatttcataaagattttgtcatatcttttaccaaaactactaatagaagatcctttaactggagtatcttgtatctagtgattttttttggtaatatatatggttccttcaaaaggattttttaaatcaaattcatatctttttttaatgaaattcaaatacatatccttttaccaaactacttgtgttgtgttataaccttgatagttgattggcggtattatgtttgtatcggatgtattttatattttctctccttttattttggatatatatatatataaattctttagtgtatatataaatacatatactcaacaatttggtcgatattattgtcatttttctggatgttgtttctattttagttactatcctcattttagatatttcttatgttttttttctcctattaatattgtttaggggttctagctaaacatttaattataaatatatgataaataaataagtcaaagcttataatataatgcgtaataaataattataaacttaat

SEQ ID NO: 78000 - DNA, 696 bp, Cannabis sativa
ttttacgccgagtacttctactaggtaactgattacaaagatattatataaattagtttaacttaattacttctactaggtaactgattacaaagatattatataaattaggtaactgagtacttcgctgttatttctgatcatgtttagaaataacagcgaagtgtcctggagctctatcttctataacctgtcacgggaaattaatagaaagttagaggttagtcaaatgtttgacgatcgtactttaatatggtgcaagaacgtggaagagatggatgcattactgaggatcaaaaagactacaataccgggaacaggtgacacaattgtctcttttgtaaagtggtcaggggaagaacaaaacaaagaggtgaaagtcgaatgtaggagctcgtggattggggtagaaggagtccccctgaacttatggaaccttgagatgatggggaaaattggcagtttatgtggagggttgttggatgtagagaaagacacagcagagaagaactttttacaccacttgagactcaaattgagaggagacgataaaggattcgtaaacaattcaattctgttaagtcacgagggacaggaatatcctttgaaactgttcaaactaaatgattggggctatagatttagtggttttttcaacacaatatggcatcaggactcggaattctataaaagtca

SEQ ID NO: 78001 - DNA, 766 bp, Cannabis sativa
aaaataaaacacttttcttgacactcaattagcagaccccatgtgtgaaacgtgtagaaccatttttgtctgggcaaaagggtcccataaaaaatagttgtaaaacaaaaacttaaattttggtgatgaaaaaaaataaggctaaccctatgtatttcattaattaatatattctttttgggttttcagaaattgggaacttttagcaccatggacagaatcacaaatcaaagttccaacaaagtttataagtggggataaagacagtacgtattgtttcctaggtggaaaagaatacatagaaagtggtgaattcaagaaagatgttccttctctgcaagaagtggtgataatagaaggtgttggtcactatatcaaccaagccagaccagaggagatcaccactcacatttatgagtttattaacaagtattgattcaactatttatgaattgtactgcaagttcaacatttgtaagtttaaataagatgtgaaagttattatatcaagaagttcttcactcccagtaagcattgtgtcttctctttggtttataaaactgtgaaacatgtctaattttgactgaaagtatccttaaatatatttggacaacttacaaaaatattgtaaaatagaaaaaaaaaattacaaaaatattaggacacgctttatatatatatatatattttatcaagaagaaaaacttcattaatcgcacaacccaaatacactctcaagatttcccaaaggaacaaacccaacctc

SEQ ID NO: 78002 - DNA, 543 bp, Cannabis sativa
  modified_base (492)..(498): a, c, t, g, unknown or other
tttgttgatggtcaacatggaacatacaatggaaaattgacctctgggcacctcactccccttggagaggaagtgttgtcctttggccagccaaaggcgcatctaatggtgcttggctagccctaggctgtacaatggggggtgtcactgagccagagatcccttgctgaccccctatgctactggttgccagactcttgctattctcatcattagacctttgaggaaaagtctgtcttccctttgccaggggaagattgatcctagttcctaaggaaacaggttggttagcttgtcgatggaccctccctaatcaataaacaattcttcattgaagtggatctcgcgtcctctcccatcagttctttggttaaatttccttatcagatcgctggcctctcggttgtggcaatccaattgtgcttggtgagattgaaggtgttgggttttatgccctaaataaaactccttacaatctgattagttatcaannnnnnnaatttgaagtgattgatgtttgcgtgaattctacatgctaatggt

SEQ ID NO: 78003 - DNA, 737 bp, Cannabis sativa
ctttcaaaacattattaagttcattatgatgtaaaacactttcaaagtattaagcatgataagatgtgggatacttaatactgatattgttattagtatattttaatatcgagtcttatatattttaatttaataaataatatgaataatcactaattaattatatgatatattatcagtgtggtattagaaatcttaaggtatcaaataacaatttttatagtagcgagctaatcttttatttatactaataaaaataggtttttggaaaccatctaagaaattttgtagaattctaagtattcttttaaaaatatttttgggttcttatttagagtaaaatgtggtaatttttaaaattagtaaaagaaaatgtgtaattttaaaaagagtttttttttttttgagcccatgtgttggatgggctctaagtatgggactagcctgagaatcggacttgatacattgttatattataaaaataaactagagttagaatcggactagcctttcatgctctcttaaatgatgtaaactatttggtatcttttttcctacgagcacagatcactcatgttaaacaatctgctaatacttatggccatgttttggctaagtatgctcttacggtggatactgattgttcttggttggaggaatttccacctccacttatgactgttatttatgtaatttctcacaaattaatgtaatagtctttttctcaaaaaaaaaaa

SEQ ID NO: 78004 - DNA, 689 bp, Cannabis sativa
aacttgctgcataatctcagaaactgccacctgctttgcattccaaatttgctcattccgagctgtccatatgcaataaaccatagcagccatactagctgctagaacctgctttttgaagcttgaacaccttgcttttcgaacccatttcagcaaaccagtgagggcagcagctgttgtgtgccaacccaaccagtccttcacctgcttaagacattctgcagcaaaatagcattcaaagaagagatgttttgttgtttctgcaacattattgcagaaaatacattcagcaccatcaatgtgaccatgtttgaaaagcctatccctggttttgagtctatttagcatagctaaccataatacaaagctatgctttgggatattcaatcttgaccaaacttcattggaccaagaaaccttctcccaattcggattaaaccagtttagcccctctactattttatagttagtcgcagagaaggtgtttggggactaatttgccaaaaaataaaatttgaggaccaacttgtcaaaatttatatagtttgaggaccaatctaccaaaaaaaaataaagtttagagaccaatttgtcaaaacatatataatttaaaagccttgctgtacaaataagcctacatattgtttcattaagttttatgaatatatctattaggtacacatggaaat

SEQ ID NO: 78005 - DNA, 597 bp, Cannabis sativa
ggctgcggccgctgttgccacagcaacatttagagcaagatttctctgctcttctgttgcatcactaagtgtcctttgtgattgtgatgccattagtataggatattgttgcttaaattcaagccttcccaaatcccatctccactcctttgctacctgaattttgtttttttaattttaatattaaattatggttaaaaataataaggtaagtctacaaggcactcttttaaaggagtgtttcggtaaaccatttatttgtttcgacataaaaaaaaaaattaaattaatttttttttccatgttatagttatttaaaactatttgtaatttttcaaaaaaataatagaataatttacaataccgaaaataagatttatatattccgttgcacgtgcaactattttttcttatacacattgtaaataactgtttaaatttaatttttgccattgtaaattttttgaaaatttttaaaaatttacgagtgatcctaaataacaaaaatagatcaaaaaatatctagatgccgaaataaataaatttcctaaaaaatatatgaaataaaatacaaacctttgttgtttgagaacaaga

SEQ ID NO: 78006 - DNA, 703 bp, Cannabis sativa
atatttttgaaaaaaaaataatatctcaaagagaattaaaaaaaataatcataaaaacttagtaaaacaataaacttaagtggaatagtgtatataataaaaaaaatagagtataatcaataaaaaacctaaagcatgaaattattttaattatagtagtcatgattttaaaacataaatatatacatatataatatcggggaaggttcgaggtgaatatctattccctcgcccccgccccatttccgactcgggtatgaatatttaaacccatacccgctcccacctctgaaagtcaatcccgcccccgccccattaggggcacaactcgcgggtataattggtgggtatccaaacctgtaggtataattaccattcatatactactgtaaataatttagggatcatttataaccggttgaaagttcaagaatacaataatacatatatcgcggcaaaaatcttgaatagttattattatttaaaataataataaaaaaattaacctatgtttgttgtgtcacaaataataatatgaagatttaattacttaagaaatatatatacttttacttatttctctaatatataattatagtattgatatatatacctccttttccaatagtagtatatttttctaattgatatatatgggtgtaggttatttataaaaacatgatctaagttaatattaatttta

SEQ ID NO: 78007 - DNA, 2483 bp, Cannabis sativa
tgcattcattaataccttatcaactatataaaagactaaacaatgtccatcaatggattttgggaaaaaagaaattataataaacaagtaaagaatgtgatctgatacaactttcttatcaagctatttttattagtttctattaattttttttccctatttcaacaaagtaatcatggacatgggcaatgttttgggaatgattggtagtaagcttgggaagaacttcttcttttaggtattgagcaaggtacttgtaagtagcttcacttgggtgtatgctgtcccagaacatatactttgaagcctcatgacaagttggtgttaacacattacagattggtcctgcttctatgagtccagttccacagcaccctctttttgtttcctcaaaacctatgaatgaaatgattccgtacaaaacaattagataacccgtctttgtcttcttcttcttaatctaaatataattacttaccatacttatctggatgattgatcatatcaaacaatggttcgtatatatcaacatacacaactttggtcccgggaagctttgcttgtgttttggctagtaccctttcaagcttatggttgtacgtttttgcccccatattctgatcctctacacagcttcgatctttccaaagctgtgtactcctttgaattggaaggcacccaattggtggtagcccagatacagctattctacggcatccattgtcatagagctcctaattataatgcaccaaacaattataatcaaactatctacacacaaacatatttggcttgaaagtgttattttgatacatgtaactttgtagaagaaaaacatacctcgatataacttatcaatctcttgagaacaaaatcttgatagccactaatgttaaactctaattttcttgtggggatatcaaagaaattaaaaacgaagtcattagtgcctgcagcaactataacaagagctctaccaactatctttttggcttgcttttctccgacaatcctctcaagtcttgccaagtactccttgaagtagtgaatttgatttgaaaacgagataaccccagatgcagcagtggtcaattcgtcgaatcccgatccagcagaagcgaaactgacgccggttaagatgtctttgtcagatagttttggatgaagaaaaggagggacagtgtctttaatctttaacatagaggcaatgaggtcaggaactagttttccatttgagaaccttcctgttggaacatgaccctcgaaatctttcccataagggtaatgattgcccttgaacaaagtttggatgtagttattgttgcctgtatcaacagttgaatcaccaaagattagaatggctgggaattctggtgaagatttaggcctagagccactgcatgagttggtaatagtagccaaaaagttcaccaataatattatgaagaagaaagtggcaggtgccattgtttaatattactttcacttctattatacttaatgtgtgttttattggggtagttatatatattgtatttttgtgcatatgtgactcggaagagaaccaattcaaaacgtgacataggtgtttaagttattatatatttcgaattcctttcctccaataaaaaaaaaaacttgagaaagaacaaatatgcattttttttctcatatcaaattgcttaattaattctctctaatttggtttactcatttattatttggctggtaacgagttaatgtagtttatgatttaggtgtgttaatattttcgtgccaacttgataatttgccacaatatattaatgaacttccaagggactatatatgtttattaccgtgtaattcatgctttgcccttcttggtattaactgaaaagatttacataaaaaaagttgtttagattttaaaacaagacttatatagagtaaagataaataaactcaatcatagcctgctctcattttgtgattttcctctattttataagcaagatccaagcattaagagcttgcttaatcatcatgtcaactaataaaacacattttcttttcaaatataccaacctttctatttaaccaaatgtaatagacaacaatatctcccagcaaacttctctgtctctttgagtcaatccaactcagccaagcattatggtcaatactaataggcctgatagctcccccccaaccaagtctaaatctggtgaatgcctttctatttgaataagaacaatgaaagaacaagtgttcatggcaataaatgccatcatcacaaactgcagaatccaaagaagcaacattaacatttattgagcactcaaatgagctattatagctcattctctaaaatgtaaagaaaaaaataacagaactgacattcctgttagactatatatatagtgtatataatatagcatatacaatgatatgaaaatgcggaaaatataatgaaatcatatcaataatatatgcaatgaaag

SEQ ID NO: 78008 - DNA, 976 bp, Cannabis sativa
aataactatataaaaaattttgccgctaatttttttacataaagaacataattaaatattgttaacacagtttcttatcaacagatttaggaagattgtataaagtaaaaagattacggtatgaactgatttggctaaataaaattgtaataaataaacaaagacactaagaatttttagtagtccatcacccatgtcgcgatggtaatgaggttatgtctactttattgttattattcgattccagcatgccagaattatgttttcaatagtgtgtggataatagtacaaaaagagatttctagacaaaatctatattgaaacttatgaataaaaggctcatgggagaccaatactataaacttgataataataatggtaataatgttcttgagaataatacaccaatgagagcaagaattgagaatgatctcttattcttgctaactatgtatgtcaatgatgatgggtgtcgtactaagatgaataactcaaggaaaagatgaagagagaaggtaccaagggatgatgtgttctaagtagtcgtcgtccccctcaaaccctagtttatcattgtctttatataggcttagggtttgttagtgatccccaacaagtcggggtatctcactttaaatcccatatttttctctaaaataatgaataaaaagatgaataaagatctgtaaaatatctcttatattcttaggcaaatatcctacagtcattgggattgtcatcaaaatcggttatttctttgtcttgaatttgcttatgtgacattgtgctttgggaatggcaagattagagagagatgaccatgggatggcatactaggataaggtatgtagagagtcacaagtgttgtgtcacaactctccaaacatcccattgtggctcacacttagtaaaacaaattaaatcttaaagtaaagtgtaacttacaatctggttttaagcccaataacttcagaat

SEQ ID NO: 78009 - DNA, 973 bp, Cannabis sativa
cccaattctccagagcctacctcagaagaaagtagtgattgtgaagtacaaaaaacatggtaatgccacagtctcacatatttactagaatctgatcatcaaacatagtagtttgaaaaaaataagcttgtggggttgttgcttgaatgtgagtttcttaaatttactagaaagttatttgtacttgtagagatatttttggatcttatgttttgttattgtaagttgattaacattaacttattcttcgaacatttttactataaaacatggcagagactgttgctgctatgttgtttcgttacttatgattattttttcaggaggttatgtatcccaacaaacaatagtaaaaagggaaaatcttatttatatatatatatatatattaaaagaaaaaaaaaagaaaaatatcattggttggtgtctagcttgtagaatatcacttagcccaaagtcatatttagactttggtggaaaatcttcgatcatatctcatcattctaaatacaataaagatatgtattactattgttattgtattactttgctacactctaatctttcttcaatttgtcaattattttacttaaaatgcattatactgattttgttatgcttatttatttattcaatgtttcattagcgatttatccttatatgcatttcatttttatttatttgttatctatttctaggaaacgttgttcaagcaagagacatttaagagtttttacttcaaatatttatccatactgcccaccctttatgagtcttcttaaggggatgggatgtattgatctttttaatttgaagaaactataagggagatcttgatacgcttctatttccttagaatgacagtatcatgaccttcagggttggtggagcagtaaattttttatcttcataaacttagtttcattattttaggtttatatgccttttcaataatcacaactttcacacttcc

SEQ ID NO: 78010 - DNA, 1888 bp, Cannabis sativa
gagtgtgttcattgcaagtgggacacgccatatacccttttgtgctccaaccagacattagagcataagcagaaaaattatttattgtccataacacagccaaacacattgaaatacaattctgttgtaggtatctcgggcttgaacacccatctctcccaactgtttcagctcatcaattaatagtctcatgaacacatctatatcttttccatgagataatggacctagaatcaacaaggtcaacaacaacgattttgagctcatgtacttcaaaggtagaaaattatatgggacacaaataactggtcataggctataagagttgctcatgttcctaaatggattaaaaccgtcagtagtcaatcccattctaacgtttctaggtttgatggagaaagatggatgaagccagtcaaactacttctattcttcagcatccgcaagatgcctaagcacattgtcttctttcagtctctgtgagtaatgccactacatgtccttagcggtgtgtcttaaggtataaagttattttagtctcaatgtgagtagaaagtacatcataactttgtgaggcactttatttcatttacctttttttttcactcagtgtgatttgccacatatgggaaaaaaatctttcttcttattctccctccagataatgacacaattatacttgcgcgaatctattaagtcgtaacctaaacctagactatgcaatcacatctttgactcatagtgcaactttggtaatttttcctcctcaagaaatagctcaatcaagataaagagcaacatatcaaaagagtggttactttacctatttaaaacattacagtgcataagttttactagcgcattgagggccaatttgttacaaccaagatacaacacatactctgtctccttaaacaaatcatcatatttgttgttgtcattgatcgggggttctttgaaagaatcagtagttctagtagagtcgtcaaactcaggatcccctcttaacatgtctgccaacacatatactatttcttcttcgttgttttctagaagttgaatatcgggctgagaaaaagtctccccgtagaaatactaagggttgtacgaaggttagatcctgctgagaaacaaatgagcccttatagttttaagtgtgtggaaattcacattcaaacaccgcatgcaaatgcatcgagataatccgtcaagatttacatggttcctagcaatcgccacaaactcgtcaatgccactttaaaactcaactgagcgccggttatccttcatccaactttggtcggtaggcatcttcctctataaagtaattaaaaaaaaaaatacaacaagaaaatatgcaagaatcctaatccacattctcactccattactaaaagggtaaagaacatatctcattcatgtttataatatacatacagtataatctatgctcttaatattatttcatttttgtaaaacttttggcagtaccctcccacagttctcataagcaaactaatagtaattttgccaacttacaagaatgtgtaaggagacaacgtacaaaaatttctactcacgaaacaattaaataaataatatatcacactataagtataaaataagccaaaacaatctatgcagacaaattttttctaaatataatttggagaagcgtatttaagagttcttactgactcaacatctccaaacgggtttaaggtattttgtgcatgtgtaaacataaaaaaaattatcactatgtaataataggaccctgaactgattttttgtcaaaataaattttttataataattcgatttaaaggtgttatgacaaaactgtttatattttctatatctattcgtattaggaattgtcttcaag

SEQ ID NO: 78011 - DNA, 662 bp, Cannabis sativa
ttgtcatttaacaaaacacagggtccaatctgcaacttttgcaaaatacaaggtctaaaatgatatttatccttttttttattataattattttgaggaaacacattatttaggcaaataataataataagttttattgacacaaattataataagcaattaataaaataagatagtgttttagtgtgggtaatagagtgatcagtctcacatgaaatatgtctttatttatgacaaaaattatattgtatatctattttaatttcttttaaaaaaatctaccttttttcattattatttaatttatttatactcaactttataagtcatttcctgtgcgtttaattttaataagttatgtgaggttatatctagtactttgattataaaataaagtatttatcaattaaaattattttatattttgttaatataaaataaaaaaataataattttcaacttaatttcttatttataaaggtatataagatgcaattataacacttgaaataggacctaaaaaaatacttaattttgtgccaatggatgaagacacactaaatccaccacactctaagcatacaacaaaaacacatattttttgagaactcgtattatcaagaaaaatatatacagtacaattcctttacccaaaaaaaaaa

SEQ ID NO: 78012 - DNA, 603 bp, Cannabis sativa
ttgccagggactttaaatgtctcccatggtcattgaggctttggacatcgctcctagcatgtctcccttagggcgatgtccaaagcctcaaatgtctataatatgggaggcatctaaacataaaagtactagattctatttttaatgtcacttctcttttttaattgtttaaacatatgatcaaatatttctgcaaagtccagaaaaagaaaaaacaaaaaggtcaaactgtgttagagctcaaagttgcagttagtgaaatcaaattcagctatatatatcttaatgttacccctttatgttaaacatcatgggaaagacatatatttgataatgaaaaataagggaaaattggttttaggagtaaaatataataaaaatgaaaaaaatatatgtatattatattttaatgttaaaataaataagcaaaatataaaaatgaaaaacaaaaaaagatgtaattaaactagaaaaaaaattccaaaagtacgtacatatggtaatctcctaaagtgaaatttattttttaaatttttatttaaaataaatataaatatttttataacaattaaactcccgcttatcaaaattctattttcatga

SEQ ID NO: 78013 - DNA, 748 bp, Cannabis sativa
ttaattaattttgcaaattttgttgcactgataaagggacaagattttgtccgatgatttacttttacggaatatagtacattagatgtgtatcagggtatattaaatgggtctcagaacacgttactattctctaactctacttacccctaaatcaatgctagccctcagatcaaataactccaccatctaacgactgtcgtacatcacggaatacattccgtgaaagtacattacgggacaaaatcgtgtccctacattcatatctgttttagaatttttaagaaaattgttaattataatttatttttgacaaatgctaaaagatacttctgatatctagttattttttagtattaatcgtattagtagaattaagtattgagttttgtataattttaaaacataactttactaaacaattataaagtgtcgcctacaaaaggtgttggataccactgataattttaagattttcaaaaaaatttaacacgataaaaatgagatttaaatcgaaacgagagactcttagtgagaaatgctaaaagacactagtagtgtctagcaccctcttatgtattactatcgttattagtagaattaaatatcgaatctcatatagtttaatataatagtttttagagagtatcgctagtcgattacaaaataacacacttagaaaatactaaatactattaataaatagcaacatttcttttaatttcatagtttttataattatttaaga

SEQ ID NO: 78014 - DNA, 1136 bp, Cannabis sativa
ctatcctgctccagctgcaccaccaggctttaatactggtcaagggtgtggctttggtggttcccccttcaaagagtggatcatactataactctatagcaagaggtggcccgtccaatagtcgtggttccacgcctagtgcatctactcgaggtggccatgcctcgtatggtcgtggtcagaccaacaattggggacaaaaggtgcaatgccagctttgtcacaagcttggccacactgtcaaaatattagatgaatagaaattctaagaatgatagtagaataatgtaaaatttaatttagcggtcatctaaacaagattaaaatattaatcatagaattaagcaaagaagaatataagcaattcaataagaaggcataaaataataacattaatcaaagcattcaataaatcatgtctcgagtgaaataacccttaacctaaaagaggactactccataatctcaaacataatcataagcataattataaatgaaaattaaaagagttaaagaagaaaaactatatgtaggtgtagattctcatattcatatatttctcatcgtattttttattcttttttttttttttgaaatacttacaacttacaaatatttattctaagggaacagtgattttttttatcatcagttagacatactgtcgaccgatatagccaactgactcagagtcaaataatcgttggttaatcaccaatgaggagttaggaataataaataaataaagagaacatagggagttataaaggttcaaccttcttatatgtgggtaatgacctactccccttttagttgtattacttatgagataatatcggacaaattactaaggaagacaaagtgaagtctagctacatatctcaaagtatttacagagaatatctttcaacaaagtgctcttagatgtggaaatacgaattcaagtctcggtcccttccccttgtgaattcattcactatttataaggaaaaagttgttacatttggctccgtaaaatgagttaacaaacaataaatatccttatattctaggttgtcgttacaatttgttgaatctcctttattctcagatagatttgctagatccaaatttgtaggattcaatttgagatattt

SEQ ID NO: 78015 - DNA, 537 bp, Cannabis sativa
  modified_base (416)..(439): a, c, t, g, unknown or other
ccctagctactcatctcttccatcagccgcctccccccatctctctttgttcctccctatcggtggaggtggaaggccagcgaacggtgcagccgtgcagaccctctcctctcttctctctcgctctcagaccctctcctctctctcgttctcgcgcgacctaggccaccattaaagctcttctctctcgctctcaaaccctctcctctattctctctcgctctcagaccctctcctctcttctctctcgctctcagaccctctcctctctctcgttctcgttctctctgttaaccttctcctcggccaccattaaagctcgaacaacctcaatgaattcgtactccgatggaagcatgttcgagactcgtcttcaagcttgggagagaaaaatggatatatctattctatataannnnnnnnnnnnnnnnnnnnnnnntggtttatgagaaattattgggtgctttttttttaaataaaaaaaacaaattattaattatttatctaaatattaagaaaaaggaaaaaaaaaaaaaa

SEQ ID NO: 78016 - DNA, 615 bp, Cannabis sativa
acatctaaactaaaggtttttggctctattgataacgacctgtatagagtagagttcaaacaaaggcatgccaactcttttcacactatataaatcaaaccctacttaatccagttgtcagttgatagcctaaatttattaccataaaaggtctacagatgcaaaataactttaactagctaatgtagagtacttatgtttttaagctgcaaaacaaaccaaaaatagcatgctctcactaaaatggtgtatatttcggaatgaatgaatagaacccagagcttggggagcaaatagcaataccattttctattgattacctaagaataatagatcacatactgaattagaaaagtgaatgagattggagtgttatgttatttccaacattcaccgcactgtctatatccataacctatgcgttaacttattaaatacacgaattatggctataagtcatcagtcatcccagggtcgagtatcactttccgtgaaatactatgtatttaattcttaatttttaaactatgtgttgattcttggtacaatatagatagattttctcaaacttacagtgcgcataaatatgaaaaaatattgagataataatttcat

SEQ ID NO: 78017 - DNA, 1179 bp, Cannabis sativa
tataattaattagtaatttttataatttttattaaattaaaataaatggaaccttttaatattttactttgatcaatttggaattagtaaaccttgagaaataaatataatgttagtaaattttattgtatggaaagctgtgaaacacagttagcaaaaatgttgaaagcttttgtttcaaaccttctttaaatgagcaaactataaaggcacgcacgtggaagacttttcttgcgtacgaaaaatttattgataagttacaaacattaaaagatctttcaaataagtaaaattaataattgacccaataaatgacaattctgtgctttttgagcaaaacgataagaaaataataaacattaaatgataccaattcacctatttggcatattgagtagtctgagtctccattgtttattattatatccttatttattatgatttttaataggaggatttcactttttatggttgaaggtggacccataataaaataacccaaagtttttacaacataattaaattatcctaattttccctatacttctcaaaatgtcccattttatttttgagtactctcatttctctttctacctctttcccttgtttatttctttcttctctctttctcctatttgataaaccaccctctatcttaactatatgaaggtactttgaaaaaatactcaaaatttggatttcttttaatcttctataaaattttgcgtttagtttgttatttacatgcattgagttgttttagatcacatttatacatttcattgcctgtttggttgattttttggcaaaaaattatatccgcgttttttgaatattctgtattttctaattgacaattttcgacgatattcaatatgtgtattcaatgtgtgtttggtgtatttcaatagctacacaaatgctacgttttaggacaatagccttcagtgcctactcgatggtttcttaatacttttacaatggctaggtcagggatgatgattttcaaatatttttcgatgcctattcgattagtttttgatagttgcacaaatgcttagttaggaatgattttttttgatacttttcgatgttgttttgatggtagttgcaatgtgttgggttttatgccctaactaaaactccatttcaatgtaatccatattattcaatatcaat

SEQ ID NO: 78018 - DNA, 919 bp, Cannabis sativa
ttttcttcacttataaaatgtataatttttaagcattagttgtgctacaacctaatgaaactacacaaaattaataaaattatatgtaggcaaaatataatacttattctaagatttagatgtaaataatttaatgaaagacatttaatcaaagagtattatattcttacaaaataaagaactaagtggaaactgcttcaataatcaagaatacatgatattgaagatgaaaaagacatattttggatagaaaaatccatggataatgttacacaaatagaaaatcaacatacaaaaacaaatactatcgagttatattttatttcatcattatcttaataatcttgaaaaaaagattagaagttcataactagattgaaataaaaattacaaaataacatacttgatatgctcttaaaaatgtaaaaatagcagtaagaaaatggtgtagaaaagaaatggtagaagtgaagaggaaagttgtgtggaatgaagagttgatggatgaatagtgtcttgaaatggtcttccaacaccatatttataagaaaaatggactgattaaattgattaagataaaataattaaattaattaatttaattggtgttgggaagagaagatataaatagagtaaatataagagcattgaaaaaaaatattttgtaagaatgtaaaagtggcaaaatgtagggttaaaataaattaagaatgtttatttaggtgagaaaaattaggaaatagaaataaatttttatgtgtaatgtgggaaaaaaatatgggttttggactcttatgtgtgtaattttcagatgataggtatgtaatgaacgctttagtaatttggattagtaaagtcaattagcactaattttctgatattgttataattatttatgaatttaattaattgtgggccc

SEQ ID NO: 78019 - DNA, 783 bp, Cannabis sativa
aaatattttctatttaaaattatatatatgtatatactttttagtagtttttaaaaataccatatattttttaaataaaaggttcaataattttttttttctcctaagacctacccaatctcaagcccagccttagagatatttatcttttgctagagtttattctcattaatttaagatgataggcatggaaaaaattataagctgtagtgatacagacccatagaaaatatatggctgtaaatgaggatcatacatatatatgtctgtataggaggattatatatttaaggtatgaaattattggtaatatattaagtaatatgaggcctaagtgagcagttaaagcgtttatatggcatctaattcataaacaccagttgtcttctttttcgatcttgtagatctaatgaaaactaatctgaaaactatgaactaaaataaatccgactatggtaatttcgatcttgtccaattcaaaaattaaaccagtaaaaacagtgtaaaataattgttaataagatattcataatcaattttagttaataatcaatataatgaaaaattctaaattggatttcataattaaaatacagtttaatcataaaattctcctaatttactcaataattttaagcatgtattttatcaatacaaagagaatttaacaaggaataaaacccctaaatctttaagtttaaacaataatatggactaacaagaactatccaatcaacccaaattttaattaaccaataaaagttaatgtaagcccaaataaaa

SEQ ID NO: 78020 - DNA, 1817 bp, Cannabis sativa
  modified_base (61)..(62): a, c, t, g, unknown or other
gaatcaagcgtaatatagccctaaaactagaaacaaagagtgaaaactaaccgaaatatgnnccgaatcttagactaattttagcctaacaccctcaaactcgaccgagtcaattttctggcctgaaaatcattattcgttcaaatagttgttggacatgatttggacaagaccctattcaataatgtctttccttcgacaaagttggttactagtgtgatcaatctcgaatacacgcagtggaaacaatgagattggctacttctctcatggctctgatcctccatgactggaggagtacttggatctgttgttgtgtattctactttctacaaagtttggcgtgctcttgaaaagtacatttcaggccaatccaaagttcacctcctgcaattgaaaagtcaattttctaacattcaaaaaggtaatttataaatttttgattatgttgacaaaattaaaatctctttgtgacaatcttgttgtagttggatgcacgatcaatgatcaagacttggaattacaatttcttaatggtcttggcccggagtttgactcaattgtgtctataatcacctccaataatgattccaaacgtgtgggagaaattcaagctcttctaatggctcatgaatgtcaatttgagtgccatcaatctctagttgatatctcgaacaagatggctgcaaatctcatcttcggtgatgcaaaaaatggatcatccaataactttaggcctcctttgaatcctggtcattctaattgtcgattttcaagtactaaatttgtaacaccctaatatctgaggcactttgcgtattttctaattattgtgctaacattttccaatcaaacagttttacaataaaaaatctcgtttcagtttaaatatgtgataattaaaacttttttaaaacaaactatagttgaatatttacaaaccaagatattatttctaattaaaaatacatttgtactataatattctgaaagagtcatctatagacaattattccagctgatctcccatagatctcaaccttccaggttgttaatattattcactaactttttttcgagattagttagttagttatttatgttaattgtaaatagtacttcttgattagttttgtactctgcctatgtctataaataaaagaagtctctcttggtattgaataaagctttttcatttaatatcatttaaaagacaattcttatttcctttgatctttacatggtatcagtttctactaactaatgtcaattcctccttgattgatcctgcagcctcgcaagctactccagtcccagttgctactctaacacctcactatgaaatcctttttccagttccctttcatcatctctcaccatcaaacttaatcacttaaatttttcggtatgtaaattacaagtggtttccactgtgattaaccatgaacttgacgacatcctcttctcaggtgtccctccccctcacactcttctcaacaatgaactttaccacatgtatggacaatgaaaatagaaaggctagttgcttctctcttggttacgatcgtcaatgtcggagggtgttcttgcctttattgcaaacttcaccacttctttctcggtatggcaagccctggagcaaaaattctcaagccaatatcgtgcatgtattttccaactcaagggctaattttttgatatcagaaaagttaatcttgttagaattttatgctctaaataaaatgcatttcaatataatcttatttattactaattaataaaagatcataaaatattttatgatgcatgattcacat

SEQ ID NO: 78021 - DNA, 2748 bp, Cannabis sativa
  modified_base (2582)..(2582): a, c, t, g, unknown or other
gaggtaatattaaaaaaaaaaaaatcttaccctatattattgcataacaattatttttttccttgaaagtcaaaactaaactagagacatttagagaaataatattaatgcgaggttgataactgtgacatgcacaagcgtaagagccattcagtgatctaaaagatttagtttcataaagtgtgtgtgcatacatattaagtcttcgattaaatgattgatattctcttatatttgcaataattatactatgtatcattcaatcaaggaatattgaaattctcagtagtagttgataacataaaattaaaacttagctatagccgtagaaatttttgaaataaatcatgaacacaagaatatatcattgttaaatattgtttacaatcattccaaatcaaaccacgcaaaaggacacacatataagcagagagtcacatggacatttgacaacttagtgagattttacacagaataatataaaacttcattccatgtatgattaaaacagtaacaacaaaccaaattgatcatgaaggcatcaatctcagcatctggtttaattgatcaattccacgtgctatgatattaaaataagaaagaatgttaccatgtgtgatagtcttcacatgctctgctagagagatgattggccgaaaactattttcaaccggagtagatgatcggagtctgaggaaatgagccgcggcagagtagagaatcagcacagtcaacggaaatataagagtgggtgagaaagctgtggacagtagggctgttcaaaaaaatttacaaaccgctcaatccaaataaaccgtccaaatcaaactgaataaataattttacaaaaaattcaaacagtcaaatgaatatattaggcgggttgaatattattctaacccaaataaatcgatttacgtattttttactaaaattatctataatataatatataaattaggttaatagttaaattattttacatttaaagtttgtattttatagtatttgatttaaaatttagaatttatagttgataattttgattgtatttgaatattaaagtaaaatttacatatgagtatatttttttattctattttttgaaaactgctctttaataatttaatgtttattcggtttatatatttattttttaacattactttaaactataaatattttttaaaaggcgtatattaaacatttatttttttttcaaaatcaattatttaaacaacaccaaaaattacaataatgaaaaaaagaaaaaataaaaatcgggtcaaaccgattaacccgaccaaactgacgaaaatcattgggggagttacactttttttattttttcattggacgggttacaaattaatatttgcgactcgacatttatattgggttagtaaaaatacactatatcccaaccaaaccgaccgaaatacacccgactctactagacaataaatactaaaataatttcagacatgctgaaacaaagtttacagtaaataccttggatcgccattcacaggaggagaccaagattctcgaaattcctgtcagacgagctgagcatgaaccaccggcgattatccttgggggcgctaagctgagcgatgaaacctagagagcctttcttcttcaaggcgtcaatttcagctgtgctgagcccaattttgaataggaaaattatagcaaatgacctcaaatcataggactatgttagtattgtcctcattccaaaaaattatagcaaatgagcaaatgaccctaaatccctaaatctaaatcataggatcataggattatgttagtaaatgttctcatttcaaaacttgtagagatatgacccctttaaactatttattatttatactgcctttaagcacatgagaaaatcattttttttttcattttcttagaattagaaaaaatatataaagattatggtatatctatattagttttgttaaaatcttttttatttaaaagttatgtcgatttttttaatttttctgaattgttgcgggttgttggtatatagaatagattttgttgtacaatatatttttattttgttatatattatattattattcttagatgatatttattttttattttaatatgtataatagtggtatataattttattagcataataaaaatattttaatataggtatataattttattggcatgctacatatatttaattattatttttatatattttgactgtatgattatctattttaaataatacttaattagtttttattttattatatacaatggtagtatacaattttgttatcatggtatatatattttaattgtggtacataatttggttagtacagtatacaaatatatattagtaatatatatttattattattattttttgtatatatactttggtgaatggtatatgtattttttgttatacagaatgtaatttttttaaaataatatttgagttctattttttattgtacttttgttgacatgatatataattttattaacatcctatatatttttatttttaattgttgttattattatatatatttctnttgtaaggtatatattttttgttacatggtatataagtttaattgtatggtatattactttattttagataatgcatgtttagtttttattttattatacataaataaatgtgatatataattttgttaatatgatatatacaatttttttaaaataatattatat

SEQ ID NO: 78022 - DNA, 517 bp, Cannabis sativa
aaattgaattaacatcgggtagccgatcctaatcatattacgattacaattctttttttttttttttctaatcatattacaatttgtctttttcttttttgagcactaatcacattataattaaattaagtactctctataaatagtcttgtctattgacatgtgttagggttttacctagtgtgttcgtgtgattcaagtgtgttgcatgtgctccaaggctagggttctgtgtcaagttctttcgtgggagtcaatgatagggtttatatggcggttttgttgtgtgtttggtgttcgtttgtgtagggggttagactgtacaagagggttcgaatgtccaggagggtatcgacgatgcagaaaggtttgggtgtggggcccttttgagtggaggggtgatttcgtggattttttctactatgtgtggggtccgactgagaagttgggtgcggttgggtgtggttctgaattcaagatttagcaatagtacgattcttgtgtgtggcttacggga

SEQ ID NO: 78023 - DNA, 894 bp, Cannabis sativa
ttcaaaataatttttgaaggaaaagcttggaatttgggatgtgactttgtgttagttgttgcttagagcttaaggaatttatggtaaagatttttaatctctttttcttatgttcattctgatatttgaagctttataatcgtgttcttggtgttcttgatatgtttggttgtggtgattgcatgtttatgaaaattgactaaatttttgtgaatatcgtatgattgtgttattatgtctttgattgattcaaccttgttgttttgggaggctttgaaatgttgtattgatgtctaaattcttgaaatttctttgaatttcttggttaagctttgaaactttgagtttcaaagtttgtgaacttatgtgcaattctgtttttgtgtggcatgcattgggtatgttctggctttgattttgagctttgttttaggattaaattcttgctaatgttggatacgatggtgtggaatacaacttgaggttagcaatggttttgctttagtttggtatgaaattggttgatttttgaagctatgaaaaatttgaaattttggggtttagggcccatcaccgcggctacggaatggctcgccgcgtcaaggctccaacaggttagaactactgtggcaagggcctttgtcgctgtggcgaggcccctattttctcggggttttagtttttctcattttctccataacttttgcctcagaactctgttttggacgttcttggtacgttggaaagctcgtttcatgttttttgtgttaatatgtaaatgggattcaaataaattatctatgtgaaaataaatatgggattaaccgtatttgtaaaatctcggaaatgtgttactaggattaccaacgcttgcctaggaacacccaaggagtt

SEQ ID NO: 78024 - DNA, 574 bp, Cannabis sativa
atgttatgagctctatggcctgcaacaccttgtggtatagatgagggttgggttatatttgttggttgaggtgctgtttgtggttcagtatggggttgtcccagtagaaggattgaagttactagtatggtttataggggatgagacaggttctggtataggattttgagtggtgacaggtgtggagggttggctagtggctgaggtagatggcacatatagttgtgggtttgtagcatggccaggttgctcagtgacaaaggaaccagagttgtccacaggtggaataaaagagttagaactaatattatgtggcctagaagtcgaaaaactagcagtaggaaagttagagactggtttagattgtacctgagaagctgaagccgattaatgtgcaggaaatgtagtttcatcaaagactatattccttgcaatgaacaacattccttgggaattttgacataggtatcccttgtaaacagaggaataactaagaaaaatgcattgctggaataaaaactccattttgtgcttgttgtatggcctcaagtgtgggtaacatgcacacccaaat

SEQ ID NO: 78025 - DNA, 3380 bp, Cannabis sativa
tcatttaacaaaacacaaggtctaatctgtaacttttgcaaaacacaggatccaaaatagtatttaccctttaaagaaaattaagtacaaaacatacaagtacactcatttctaagtcttaactacaacacttatgttttcacaacatgcaattaaataaaaaataattaataatattatattaaatataatgacacataaatgtgatggggtttatttaataaaattcatttttagggttttatgaccaaaatataaaaatataaaaattcgattcaaagataataaatgagaattttgaatcgagattgaattggaaatttttcatgctttttgagttatttgacacctttaaacttgattagttttgtataccttccaactaagttcaatatgatacgtagtttgaaagactctaaacgaataaattattcttatcttatcagttaatggttagaatttttttttaagaaaaattgaatacaaaatattaactaactaaactaaacgaacttttaactacaacttattttttcacaacataagactaagaaaatattaattgatattatttataatgacacacaaatgtgatggattaataaacctcattttcagggttttatgaccaaagcataagaataaaataaaaaattaatcaaacacatataaagacaacaaatgagaattttaaattgagattgattggaatttttgtatactctttgagttatttgacacttttaaacttgtaacttaacggttagaataatattacttttatgagttaacggttattttatttttggaaagtttaagtacagaacattaactcttaattacaataactttttttctcacaactaaaaattaatcattagtataattattattatataactataacaacacataaaatgtgataatgaaggaattattatttaacaaaaataaattcaaatacacaaagacaataaatgagaactttgaatcgagattggaaattttttatactttcttagttactaggcgcttttggacttatttaattttgagatcgtctaaccaatttaaatgtattatgtagttcgaaatattccaaacgaataatcagttaacaattataattttttttttaaggaaaatttaagttcaaaacattaacttctaactacaccaacttattttctcactacataaattaagtcaactaaaaattaattaatattattattacaattatataactataacaacataaaatatgatggtgaatgaattattattacaaaaccccatttttatggttttatgaccaaaaatataaaataataataaaatttcaattcaaagacagtaaacaagaacaagattggaaattttctatactttctagagttattaggcgtctttggatttatttagttctatagaccgtttaaccaaatgtactatgtagttcaaaatactccaaacaaataatcaatcaacggttatattttttttaaggaaagtttaagtacaaaacattaactcctaactacaataacttaatttctcactacataaaatcaactaaaaattaattaatattattattacaataataatataactataatgattgaaggaattattatttaacaaaatcccatttttagggttttatgaaaaaaaaaaaaatatgaaaataataataaaaaaaatctaattcaaagacatacaaagacaataaatgagaactttaaatcgagattgaaaatcttttatactttatgagttactaggcgcctttggacttatttagttctataaatcgtctaaccaatctaattgtactatgtagtttgaaagactccaaaaaaataatcagttaaccgttataatttttttaaggaaaattcaagtacaaaaacattaacttaaactacactaaaactcctaactacaacaacttattttctcacaacataaaatttattacaattatattactataacaacacataaaatatgataatgaattatttaacaagagaattgctaaaaaaacattattggtgcttagcacctttctcagtgtcatactgttattggtgtaattaagtaccgactcccatataacttaaaaaaaatatcattaactaattatgggacactacctatagaaggtactggacactactggtgcccaatacgagatgctaaaaggcgatatcgctattggtccaactaagtatcaggtcatatatagtttaatataatgacttttatgaaatatcgccaaccaatcacaaagcaatatgtctactcattcaacaaaaccccatttttagggttttatgaccaaatacataacaaaaaaataataaaaaaatcccaattcaaagacacacaaagagacaaagctaaattgtttttattttatttatttattattatatatatacacatatagatacacaatccaatgctactctatactatatattactctcactcactcattcacatgagaaaagagaggaagaagaagaagagagagagagagagagaaagagaaagaaagagtcttcaatggtgagattttgttgccattgtgaaatgccatctgttttagcttagagcactactcgctcatattgaaatctctatacaccttctttatcgctttgagtggtttcggtttcggtttcggtgagttgttatggtttgttttctctaagctcagctcagctcagctcagctcatctaatcttttttctctagcttggcgaaaccctaatttcttatcaattattgtttgattgattggtttgatcttctttttgcatgttcatcgaagaaatgcagtggaaatgtgagtttgattattgttcgttgagtgggttttgataatttttgattgaaaatttttgtgggtttttgtttattgagttgtttatatgatttaaaatgattaaggatcattgcatggctgggtaatatgtatctaagaattgtttggagaaattcatgattttctcttttgttaacttcctcggtttaatcaccagtgtttgttgaggagaaatgcccaattgtgtattttgatctatattttcttcaatctttgggagcacaatgtagatttttctttggtttctctcaataaatttgggatttctcaagggaaatttatttacaaaagtctaggtttaattgttgttctactttgtaccccatctttctgttgtattgataaagctaagtttttggtagatggaaatttggatgtatatgattatgatgagctgaaggtgctttgaatccttagatatgctacaatggtttgagcaagaaataactttgtttttctgaatccattgttgttttttttt

SEQ ID NO: 78026 - DNA, 588 bp, Cannabis sativa
ttatttttggattaggcatgtcaaccattaaacgacccgtttaataaatgggttagtcgtgtcaacccaaaaatgactcaaacatatttaaggcaaacccaaactcatttgtttcgtgtggatattgagtcgtgttatcgtgtttgtcccatattgccaacactaccgatacacgcctgatttctattattttaatatatcatgaaccttttatccttataattttttgccaagttattttcgaaaagagttgctaaaggggttgtacatatatctgtctttttgaggcggtttacgaactaagattgcaatgtgaacctgataaattcaaccaaagtggttattagatattttttgaactcttctgtcacactattgaagctttcgacagtgttgttggtcattatgttgtaccgattgcctagaaaataaggggtgcccacttctcaaaatctatactctccacatatgcaggaatggcatgatccatctgtctaagcttctcaaactgtctatcacaatcagcttttgaccacgagtaagctacattccatatttgcttgtgaaaagcatcagtcttgaacttgg

SEQ ID NO: 78027 - DNA, 909 bp, Cannabis sativa
tattctcaccccaaaggggagtttataatgaccagttgattctacaatattttctaattttctaattgcttggctcatataacttgatcaagttttatttttttgggggtcttcgatctcctttctgtgaacatcaataaatattttatctaaattcagaatgttccaactttaaggcctagaaatgatatgtgaaaattactttaggcataatagatttggacttatgcctgcgagaagaaaaatctgctgatcttactgatatcagcacttttcccagaaaactcttcatgtaaaatggaaaaattcaaatcatcttagtctcattactatggaaagttcagttcctgaacatttatttagtggtttgccaaacaccacaaatattaatgatttttttttttcagagcagaagaaaaaactttttgacactggtgaaaatgttgcagttggacatcttatggatgaaatgacaaccattaagtatgataaattaaaaggagtgagagattttattttgaaaattatgaatgttcagtccaagttgaaagatcataatattcctcttcctgactcttatattattcattgtacttttcatgcactccctacctctgtttagccttatcaagataacatacaaaacatattaataaaacatggagtgtcagtgaccttatttctcaaccaaatcccaaaaaaagagagaatatataaaaagaagcaagcacaactaggggctaagaaatatgagaaagacaagtgagagagagtcaaagcttaaagttgcaatgatgttgaagtcgacattatttatgttaacaaatttattcttgaattatagtgtagtgttcatattgttttgaacagtactttcccgattcatacttttaaaagtaatttagtttc

SEQ ID NO: 78028 - DNA, 956 bp, Cannabis sativa
aaagtgttatagaagatttgacatcagctttaatggaccagatgactctaacatcagtgcctcttcttccaacaataaccctcaagcacatgttgctgctcaatcctcccaagatgacactgcatggtctttcgatagtggagcttcgaaccatgtgacaccagacacttcaaacttgcaacaacaagcaccatacaaatgtaaagagaaattgattgtaggtaatggctcatctctcttaattaaaaatgttggttctagttttttagcagctagaaaacccctttatctcaaaaatatctaacatgtcccttccattcaaaataatctaattagcatctctaaattcactcatgataatgatgttactgtggaatttaattttgattgttgctgtgttaaggacaatcaatccaagacccctcttcttcaaggaacaattaaagatggtctttatcggctattcacctctgttgctctaaaagactcaaagattttggctattaatccaacctcctcaacttaccagtgtcgaaaccgtgccactcctactgctgtctatcacaccagaaatcattctttgtaataagactagctctcttgtaaccttatggcaccaaatattgggccacccttctcaacatctaatgaataaagttttaaactctttacatatatcttcctcacaaatgaatgtttgtcatgcttgccaatatggcaaattacaccaattctccttcttatcttcactacacaaaactactgctccttttgatataattcacacagatttatggggtccttccccttaccctactagtgaagattgcaaatactacatatgtttcatagataattttacaaaatacacatggatttttcctttaaaaaccaaatctgaaaccacagccacctttttacaatttaatgcatatgttgaaagaaatttctccacc

SEQ ID NO: 78029 - DNA, 569 bp, Cannabis sativa
agttagttagggtgttacatttgtaatgacacgaacaggaggtggcatactgcgagaaaacttgcaagtccttaatgcctgcagaactaggcagggggtaagaaggctccgagaacaccatctcaggttgtgaacccgagaatctaacctgatgaacataccttaaagcctattaatcagtgctcgcagcagttgggactgaggaggttacttgaggtgcctctggctcgataaccatctgggtcgaggcgcgttttttgctggctgttatttttctagatctcttcaacagttttgggttcatccccaaagaggtttctgacacaacgcctcgcttctttccctttttggaacccgaggtggataggaggtttccaaaatccatatctgcgagacaaaatataaagtgtcagcacttgtgcaaaataaacaaaaaaatgtggagagataatttcccacttaagaaaattaccatagtcgtcaaacaaggatgaagaactaaaataattactaaactccttagaattggtaatcatgtaaagatcaaaggtgtttagaggagacatgtc

SEQ ID NO: 78030 - DNA, 685 bp, Cannabis sativa
gaattctgatatttgtagtagcgttggaatcaaaagcagcatcaatatttaacttgtaataaccttgctggggaggagtgggagttagagcattaatcgctagtgaatttgaggctaggcgaagtcctcttaagtgctggacttagatgtaaaagattgagttgtttgataatcatgctgtaaattccaaacatagctttttgcatcaaaaagattattagaactatgattgagctatttcatacttaatgttgattgttgcagtaaatgagttccacatttttaatttaaaatgaaatttgtaaactctatataaaattacactaatattttatgttaaaattgttaatgacattgatgctcatttgcttttaagaaaaacatgggtgctccttaaatttaaaaaaatattaataattaatgctcaattaaatgatataaattattatgaataagataaagtagataagaaaaaaaagaaaaagatgataaagagagaaagagagattttttcaatttattttaatagattgaactcttatttatacaaaagtatagctaaaggaataaaatattaaatcaatgaaataaagagaaatataatagtatttatggtaataattgatttgtatgattttgacatctatatatataatatttcataagaaagaggtttcaatggtta

SEQ ID NO: 78031 - DNA, 977 bp, Cannabis sativa
  modified_base (67)..(78): a, c, t, g, unknown or other
tgaacaaaatcaattcactaaacatagcaacaaaatatcaaatcacaatttaagtcaacaaaataannnnnnnnnnnnaaaaattaactcataatagattgtccaaaattacaagtttaaaataagagaaagaggaaaagaaaaacccatattggaattgtcacaatactccgagctttttcttgccaaaatcctcttcttcttcctttgaatattttccaatctctaaaatgaaaatactaaattaaaaccctaaataaaactctctctctcttttttttctttttcttctttttcttttttctcttttgtgtggagctctatagcagccgcctcttttcaatcctccttcaatgtaattcacgcccaccttcttttttttcaaagaaaagaagttgatgaaatatattacattcatttagggcttcatcttttttttggccaccttaatgtcatttttctattcttgcttttctcttcttgcttaacacatagatcaattaatgaaattaaaagcccaacattttaattactagcccactaaaattaattatcaatcaatttgggttttagtaattgttcttttattttgacccattttgatatttcacaaatccaaaaattataattaaacccctacaaaatccacaatattgagattaattatatatgaattgagaaactaaattaaattgataaaatattataaaaattaatgaaaattaatctaaaaatagtaaaattactatttatgtaaaactaaataaaaccaaataaaaattactaaaataaactaaaaattcttgagggcaaagctaatttatgtcaaaaaagatataaataactttattttcatagagttatcatccagccatgttgtgaaacatatttttcagttcgtctagttgagcctgtacggctgggctgacctgctcggcattctggtcaatttgaattacgtcagcatctttctgagc

SEQ ID NO: 78032 - DNA, 901 bp, Cannabis sativa
  modified_base (54)..(60): a, c, t, g, unknown or other
tttagaaagttcttatttaggatgttaaacaacctacttgtgagtagatctaannnnnnngtaaaataaattccaacagtcccccctacagttgactgaggttcagggaggctgctggctcccacctccgcgcagggctgagggtgcacgcaagctatcttgggcagcaagtgcatcatgcacctacaatccaatttttgagtgatttttcacccaattttagatttttctaattttcaaaccctaatttcaaagtaaaatattgtttttaatatatttaaacttaaatatcaattttgcaaattaataatatctatttttaatagattattattaattttttgatattttgaggtttaaatttaaaaatttattattttaatttttaaattatggtcagattttaaaattttattaatttctttaatatttatatattatttaattataagtttagatatttgaatattaggtatattttaaattaaagatcgtattattttttcaatttgaaatattaagttaaaattatctgatatgataaatttaataattgcgaatttgaaattaacttagatattttatagatattctaactataatattttaaaattcataatttggttattttgtgaaatatttaatagattataaattataagtttgaaaaatgatattttatatcattttacttatcagaaatttataatagtattgtaatttttaaataacctatatatttttgtaaaaatttgaaaaaaaagcttattttgagatattttgatacataatttgataactattatttttttattattttattcttaaaataataatttcctaaccatatctattttaaaattaatttattttgttattttaattttattaaattatatga

SEQ ID NO: 78033 - DNA, 1028 bp, Cannabis sativa
tgtgcaccgtgagttttgttagatttagggttcgatttatgttcagatctgtgatttgggaaaatcgcaatttggggaagaagatggcccgatggggtctgatggggaccccgatgaggttcgatgcatgtgctgcaaaaatcttatttttgggtctgacaggtccgatgggaccccgattggggtccgatgcatgggctggaaaaacttttgggtccaacgggttcgatggggaccccgattggggttcgatgcatgtgctgggtaaattttttttgggtccgacgggtccgatggggaccccgattggggtccgatgggtatgaagatagagagaagaagagagggaatatgggataatgtaaatgagggtattttagggatattataaaatgtgtcatatcccacaaatattacatattatgtatttaggggaaaaatattaaatatttgtaagcataaaaagtcaaatttctatatatatgttgtagttatggaatgttgtcaaatgggatagtcatacatggatagttcattaggaatatatattgggctacataatttgtaatatgaattaatgctctaagtttgtgcgtatagtgctggctaggtctatatttattcatgctttttaaaaataagtcgtgctatgttgtgccaatattttcaaaggatatgcctagcacaacttgtaggcctgatattttcgtgccgtgttttgcttgtgttgaaccatatttcttaaacaggccaacttatttttatatctgggcttaaatttgtgctttacttttttcatatattttttttaacaattactaaattatatgtatatttaaaattttaattatatttatataactttcaaacaatattttacatgatatcatataaaaaaaatattaatatcattaaaatttgaatatttacttataaaaactcaaatttttatatcacgccctataaataaattattatataatatttgtcatgttttgataattttaattataaaattataatattta

SEQ ID NO: 78034 - DNA, 1904 bp, Cannabis sativa
actaagacaatttgatgttatgtatttaggctccacctgagaggcgattaattttcttcaatgaacttagaagggtaaaatcagcaggtgctcaagtgttacgtgaacttggaaacaaagttaaaaagatggagaaattaggagaattagacatacttctagaagttcatgaagctgctgaagagttgcaaaagaaagttgataaaaagtcctaccttcttgtcaattctgaaagttgggaaatcggcagcagaacaaatgaaatcagtgcaccccaagagtccttgaacgtggatgatgaagaaacaaagtatcacgaatacaagtctttgagtgaagctgtactcgatctcaaatttgttcctgaagcaaaaggttgggacaacgatgtttcgacaggcactgctggattcaaccatgatggcaggaagtctttaccaagtgccacgacgtacacaccttcaggtactccccctgataacttatttaagaatacatcatggcatgctgggctcgctgtcaatgctaatggagagtctacacatgaagaatcaaaaacttatgaaaatgcaagtgcattatctttagcaacattcacatcacttttgattgaatttgttgcaagacttcagaatcttgtcgtcgcatttgaagagttgagtgagaaagcgaagttcaaagaaccaatagagtcaccagaaactgtagaatccaatggatttctggccagaatttttagctgtttaaagtcttagaatgcagatacaaaccgttattgacagattttggtagtgaaaagaaaatagaccttacaatgactaggtcaatgaaggtctgcagctaatcaatgacactagttttggtgcttaaattagtactcctctattttctactgctgacaattggccaagctgcatatttgggagaggcttagatgacaaaattggtatagttccaatgatgtacaaagttcagaaaatttgggaaacaataacgtgtaatatattttgaatggcatttaaagttgtcttgtttgtttgtgtctaatttcatgtggaaaataaaataaaatagagaacacgaggcactcatacaggataccaattatgggatcaatttatatttaaattttaatcaatttagtactcaaccacactattggccacgtatcggttttgagtttgttgcaattttattttagataaacggatataaatatttatatgtatatgagaccatcttattttaattttttttttcaccgatgacacctcgtaaatttagtgtcaaatttaacacaaaaaatacataaatgttaaaaaatttacagctaaactctccgaactatcaattcatttgtaattgactttctaatttactagtaaaattctttaaattacagaactgttagcaaattaaaggtgacacttatttattacaattaagtatcaacatggactgtttatgtgtacacttttgtatatatgacaagtttatatttatacacataatattaaaattacaaaaaattattttacaaattaaaaaataatttaaagttaataattaataaattaaataaataaattatttttattttattttcttttattatattttcctgatgactttccctcttcttagacctaactctttctcttcctttctcaaaactaagctcaaatccgagcttccatctctttcggtgcctatgattaatgacagatcagggactcacatctcgttagcaaacaaagcctaggagcctgatcatatgatctaatgctctctctctaatttttcccgatggcggtggacaaggcacacacatgatgagcatcaccggagctcaaccctcagcattgtcgtggtcccgttcccattctagttttgtgcctctctca

SEQ ID NO: 78035 - DNA, 1247 bp, Cannabis sativa
atgacacaaatatagttctggtacctaagaaagaatgcccatcaaaggtaaataactttcgcccaatagccttgtgcaatgttatgtataaatgcatatccaaaatcatcactacacggctgcgagatgtacttccatctataatctccccgacacaaactgcgttcatcaaagggagatgcatcactgaaaacactgctattgcaaaagaaattatccattctatgtcccggagaaagggatcgagaggcttcatgctgataaagcttgacatggagaaggcatatgacaagatggattgggagtttctaatggaggcgcttagttttcatgggataaagaaccctcttctgggatggataaagagttgtattcaaataaagaaaatgaacttgttaatcaatggggttaaacaaggcacaatcactccctcgagtggccttcgacagggtgacccactctcccccactctattcatcctagctgcgtatttattatctcatcttctacaggaatacactcacaaaggcaagattagagggataaaagtcactcgctcggccccctcaatcactcatcttatgtttgcggacgatgtaattttgtttggccaagcaaccatcaaagaagcacaagcattcatggattgccttcacttgtactgctcatggtcgggtcaagcgataaaccttcagaaatcgacagttcacttctccaaaggggtgcctagaactcgtgctaatgagataacaagtctcctaggtatgagtaagatgaagaaggatgccacatatctaggaattcctctattcagttcaaagaatcgttcaaaggacatgcaatatctggtgcagaaagtgcttgccagaattgatgggtggaaatcctgtcttctctccaaagcagggcttgctttcctcatacaatcagtaggaacttcgattcccatctatgtagcagcctcagaggtgattccaagagggatagcaaataaaatggaacaatgcttaaggaatttttggtggggcgacagtgaaaagaggaaatccattcacactatatcttggagttcaatatgcaaatacaaatttaaaaaaggacttggttttcgaaagattaaaaatattaataccgctcttcttttgaagtggggatggaaacttatcactgatccccataatctttggagttccatagtgcatgagaagtacctaaagggaggcatttttttgatgctgaactgaaag

SEQ ID NO: 78036 - DNA, 703 bp, Cannabis sativa
tttccaaaaaacctcttccttaagcatgatgttgttgagagtacgttgaagagcattagccttttgaacctcagaaggtgaaataatagggccagccaaaagatgttcaagatcagattggatgcgtttaatatcccgagtaatattatttttatttcgaccccaagaattcattgaagcaatgcaattacgttgctttgagagaaaactttggagaggggaacagggttatccgagagtgtatccaaagtctaattacgagtaacaagatcagaaaaatcaggttcaagaagccaatggttttcgaaacgaaaaagtagagtcacgacgacatatcatgggatttccttcaaaaaccactttaagagccctatgatccgatccaaagaaacccaaatggtgaagggaagccgtagggaaaagattgttccacttctggttgacgatagcccagtctaagcgttccaaagaagtaccatgtttccaagtgaaacggctacccgagaagggaagaggagaaagagagtatttgcctagaaaattctaaaagtgatgcatggcatgagagggaggcaaacaatgactgttacgatcattaaatccaaggtaatcgttaaaatcaccaataataagccacagagcaaaaggagcaacatcataaagacgattaagtaaagtccaagaattgtttttatcagaaata

SEQ ID NO: 78037 - DNA, 683 bp, Cannabis sativa
taatttatgagtattttaagtcttcaaatttatgctttgatgtgtttatgcatagataaatttatgattttatttttataatgagaaattttaaatgaatgtacaagatgagttcgaactctaatgttgatcaaagagaacgatgtaaaaataaacattattagaccctaggacaagataatgcattgatcgactgccttctagagttgagtcgaaatcatacatggcgagctgattgtggatttaaaaatggttatttgtaacaaatggagagtatgctagaggcaaaattaccaggttctaacttgaaggcatcacctcatattgaatcacgtattaagactttgaagggaaagtattcttgtctggcagaattattattattaagtggtttcaattgggatgaagtgtgcgagaaaagtgtaattgatgagaatctgaagataaatatatactatgattataaatatatatatgtaaatatgtgaatattgcttatttatgagaacatagtcttaatatgctttaatttgtgaatatacagaaacgaaaagatgcaagtggtttatatggaaaatcattcccttactaccacaagctagcagaaatatatggacgagatcgtgctactagggcaaaatgctggtaatgcagatgacgatgaagaagaaatatgccatgat

SEQ ID NO: 78038 - DNA, 1249 bp, Cannabis sativa
aaatatcacacaaaaggttcagacaaattttagctattttacaacagggttatatttcccaaaattcaaaacaaattcaaactcacaacataaattccagattcaaatccttatttcacaaacacatctatactcctttagctacaaatgagcttttgaaaaccttgaaaagtttcacacaaaaataaaaatataagaaaaaagaaatatcagcaccaaaacaatctatctttgaccgaaattttgccatcttcctcatttaagcttgtttccttgtaatccattgtccatttctcgaaagtacagtcaacaaagtcgtagtaacccccgtgaatcgagagaactccttccctaactttctcttctatccaagggtatgtcagcaagtttagcaacgatcgattaatcgattcctgcattaaagatagtttacaacatcagcattcttaactcgagaatgttcgaaactaaaacagaaaaaggaatacaaattgatcagcatttagtgttgtaatacattagtgttaagtgtaatcttgacaaaatagtggttaaaaaaaacaccatgatgtaagggaaggtaaaaaaaaaaagagaaagagaagttatttcctcaacgggttcctagttcgggaattcaaaagcagtttaaccaccaaaatagtttatcatattatgaccacctacttgtattaaatggggaactactatggtactacccttatatctaacttatctagtgtggggaactaattaatggaccaaactttagaagatatgaagtaaagaaaagtcatgttcatactggcaagtggaatctcattacagatggattaagacaaaaaaatgatgatagagaatacacagaaaattatcatgcacgatacactaaaagggagcaattgattgaacagaattactttcgtatagtctagtaaaaagacattgatgtgaagagcattgttattagatactatatggtacccgacaccactacaagttggcaccttacaaatggttaccggttatttataatagttattaaattaaaaatatgcgagatccgatacttatacaaactaatatcagtatgacacttcatggtggtgctacgcacctcgataccctttagcatttcttgatgttaatcagcataaacagtaggttccaatccattaatggtaatttagctactataatcctaaattataaagaaatgtacatgaaacttttgcaaaaccagataggt

SEQ ID NO: 78039 - DNA, 761 bp, Cannabis sativa
acttgtattaccagcaaaagatttcatggtcttcaagtgtatggtgtattttccttgatttgatgagtgattgattctatgcaagcgattaattgtctcctgtatattgtgggaataataaaaaaaattagaaatatatcaatgaaaagaggaaaaataacataatttatctatatattgtgcgaatatatttgcagaacaaccaagaaagatttgaataatttctccaaatgttatagcctctaagtttcttgttgcatcataaagtttgacaacaactcgagctttacaaattggtgaatggcagtataattatttaattatacaagaatgaaagatatctcatatattatacttataataaagaatcaaaataaaatgttattatcatttcaaattatttgagatgtatattaacttcaaaagtagctaaaaaataagctaattagtttcctagtataacttccctaagttgtgtataaatacatactatcttttctcaatgaaatacatgtgacttattctcttcaccttcatttacatggtatcagagcatcaatttaaaattagggtttattaaaaaaagtgcaattagggttcttcatttttagggttccatttttgggaaaccatacttagagagaaagtaatatctcactgtcgataccattaaattgcctagttgctgatcaatgtagccccggagtttagtgatttggccctttgtgcatgagcctcacgcatcgcctgaagatctagag

SEQ ID NO: 78040 - DNA, 3771 bp, Cannabis sativa
  modified_base (3372)..(3377): a, c, t, g, unknown or other
cctggatacaaacagcaaaaaatatgccatgtgttattgacaaatttcagcgtctacgtcagcttaagatagatcaccaaaatctagctaaattcaacgtccattgcttacaaatttcagcatattctgtccaattcacagtaaaaaatcaaagcagtagtttttctgatagatacttctcaatgtggaccaaagcatagtttggtttcaattaattccatttcattgcagggtaaccccatgcattaaatgaacatatatatctataactaaatcattatatttaatttactagattataattatagcacacatcttgtcaggctttggataattctaaaaaatttattgtaccaaaaatagagtttaaacaattagttgcacacaacacatgcttatttactaactattttaagctttattttagacaataaattatactaatgagatgtttgctacacgtcatataaaaaaaattaggatattatattctcgtaatgtcaacaaaaagaactcttacggtaggagcaaaatgatgccccaccttcaaggttttaaaaaccggaatcgggtactgaggcattttccttcagtcgtgcaaggcgtacgcctcaacaataagaagaaaaactttataaaataggtttacacatcaaaaataagaagaaaacctttataaaattcataacaaacaacacatagtccataaaaaagtcgtaaaattcatgaaaagtactaattagatctccaaatgatgaactaaattcaaggtagaaacatatatagaaagtagaaacttataaaaatagtaaaagttctaaacatatatagaaagtaggaacatattccccattccaattcaaatgtcaaagaagtcataatgatcatgcattgttttcatgattatcatctttctctgaatgaaagagggaggagggaggagggaggagggaggagggaggagagagagagctgcgtgagattgggggagagtggagggaggagtccgagaagaagggagctgctcagagtttattttttaaatctatctactccattaaaattatgttagaaatgaccccaactaaaccccataaagtcaattaaaaatcaatagaagctataaaacataaaaaagcccaagtcagcccaaaacaaaccctaaaaacacagaaattaaaccctattggtgaagcacctcatacacctcaacacgaaccacctcaagtccggcagatgaggagtcgcctcagaatcgttttttcaccaccttgccttgagacgcgcctcgaccgatttttaaaacaatgcccaccttagaaactctctctctcacacacacacacattctatttatatatatattctttgataataggattcaactcaatcgttacttgagaaggaggaagtcaacctcaaacttacataagcaaatcgcatgcctgagcctttgggcgaccactctatatttccatataaacaaatattttcctaccaatacaaagtgtaattatttcacaagtgaacaagcagcacagagacgaaatgtcatgctaaggatcaacttagagatacataaagggggtaaaaacagggactgcgaaatataagtgaaacatcaatattcatcagcaatcggaaaacatataaaatatgtgaatgcagcagacagaacattattaaataattcacaaaaagaaaagtgtttaccaaagcaagcatttcttgaaggtaggtcctgaaaggtgtttgcatggcctgaaaatgagtcaaaagaaggcaaagttttaacatttgtgaaaaaaaaaaaaataaaaaaaaaaatttaaacagctgcaatttaaactgaaatattagaattgggttcagcccagaacccgtctgttagtttaacttcctaatgtttcaattaacaaagccaactcccctattccaagaaaaagttgcaataaaggaatgaagaaaactaagaagatgatttttgtgctatacgtgaagtgttagaaataaataacttaaccttaacatccgctacttatttttcattaggtcttcacgcaaaacccagcaatctgtggcagcaataacaactaacaaattgctatgtacgttcccatgaatcgggaccaaaacctcatgagaacaacctaaactagttactccaaaattcaattatgtattgatcaatgcaacacactttggacgcaacaatgttccatctactaaaaaccaacggagagtaggacttggcaatatgccagatgcccagaaacgatccactcaaaaaaaaaaaaaaatctaaatttccacaaatggatataatctaagtctcgtgaagcaattactgtaagtttacaaacgcaaaatggattaagaacgaacgccacaaattgaaaattctgattctacaaatgtttattcacataaacaattcgtttgtctttgcagaacaaaataaggaaaacgacaatttaatgtaaagaatcagatttgcaaacaatgagactaaatacccacatgattacccaacaattttaattaggcaaaaaaaaaaagcgaacctgaagatccccagggaggtactgatgtttcatagaaaggtccatggcacgtttgagacgctgattacgagcgtcaactatttctctaggcagccgattgagagcttccttcacgtccagatcgtagtaggggtcgtacagatcatcatatcgcagccctaattcatcaaattgtcaacccaaccatgaccaaatcaaccattaagatgaaatcataaatacaaaattcttatacatagattgaatcagggatttttttttcatttttgtttaggggggaaagagggcagaccgtagttacggaggctttgggaaacggatttcatgtgctgagcagccaaccagctcttccttggattcaaaagagattgcaaaatcgaagacatttcgtctccccctttactctgtggttctcagcggagttgttggctatggctgtcgaataccaaaccctggtttgtttgttctggaagaatcggcgagtcccgatgagtctaagattgtggctggctaatcgatttgagttttcatttttcaaggaagaaaaatagtctgaaagaaagccgtgaaatgggcttccacgtagggctccccattattggaccaaaactttgttggcctggccctaaacatcttacaaaaatactaaaatttgaggttgcttttacaagaaatatcttttcaaaaatactatatttttatataacaacattggaatacaaaatagaataactaaaaacaacattggaataactaaaaaataatcgttgaacaacagtaaaaatttaacacagtacacagtataaannnnnnatagtatttttgaaaaaaattccactccacagtccaaaagtaataaaattgaaaaattcaatatgtggtgtaaataatcctaattttaaggagtgctttcataagttgtagctaaaataattttaattttaaataaatcacatattattccaaccgtattttgaaagaaaatagagtaatttcagcgaaaataaaattaataacaaatttattattttcttatatttgaataaaaatattaaatttatatcatgttttgtaattatatattaagatacaatattaaaagttgatgtaaatatattataattttttttttccaaatatgagttatggttagtgattattattgtaataattaaatggtatatcttttcaatattgttctaagatt

SEQ ID NO: 78041 - DNA, 1525 bp, Cannabis sativa
ccgccgagggaggacacgcccttactcggtagccaaaaatcattatcatctcaagccaagacctttgctaatgtgtttatagccatagttggtgctggtgttctgggcttaccgtacaccttcatgagaacaggttgggtattgagtctccttacgatgttcggcgtggccgctcttactcaccgatgcatgatgttgttggtctacacccgccggagactcgaatcctttgatgggttcacaaagatatcatcttttggagatttgggtttcattgtttgtggctcatttgggagattattggttgatgttcttataatcttagctcaagctgggttttgtgttggttatctaatcttcataggtaatactatggctaatctcttaacttcaccaactgcatctttgaaaactactatgacccttttgagttccaagatattggggttgaatcccaagagtttttacatatggggttgtttccctttccaattagggttgaattcaattccaactttgacccatcttgcccctttgagcattttggctgatgtggttgatcttggagcaatgggtgttgtgatgattgaagaagttattgttttgttgagtaataggcctgtggtgagggctttttcagggttttctgagtttttgtatggcttaggtgtgattgtttactcctttgaagggattggaatgtgtttaccattggaatctgagatgaaagagaagaacaaatatggtaaagtattagcctttacaatggggttcatatcaataatgtatgggagttttggttctttgggttactttgcttatggggatgaaacacaagatatgatcactgctaacttgggtgcaggattgattagcatcttgatcaagcttggactttgtgtgaatctattttttaccttacctataatgatgaacccggtttatgagatcattgagaggaggttttggggtgggaggtactgcctgtggttaagatggctttcggtttttgttgtgactttggtggctttgttggtcccaaactttgctgatttcttgtctttggtaggcagtgggatttgctgtgcattggggtttgttttgccttctttgtttcatttcctggtattcaaggatgacatgaatcgaactgcatggtggtctgatgtgactattttcgttttgggcattggtcttggagtttccggaacttggtatgctttgcaagaaatgtttgctgctaaagtgtagatatataatgaatctgtaacaggtttgaactataaaagcttataccaatgtattgatgttctcttcctattatcatttgtaaattttgaattgtttgagttgttaagtatgaatttcaatctaatgaacaattctcttcctattttttcttgatacaaatgggtggttatctgtaattgcaaattaagtggcaacaactaagtaagtaatatacagaaacacgtagtaacaactatgtttgattagttgtataaggtagagagagagagagaga

SEQ ID NO: 78042 - DNA, 559 bp, Cannabis sativa
ttaataaaacagagggtccaattgacaacttttgcaaaacacaggatccaaaatggtatttaccattttaattattttacatacagaattcaaagacatttaaaaactccggtacaaacatgtaatggtgcgaaacatataatctaaaattacataatataattatagggacttctcacaaatatttagaaaaaatttaaacatgcttgtttcgatatttatacacaagtgcaataaatgacttgaatcataatttgaatatcttaaattattcataattttataaacacataggagattctttaataattgtagttttattatacaatcatattatattttatctgaaaataccacaaatatatattgatagtaatttaaaacaatcaaaaatattgtgatacaatatatacatatataaatttatatgatatattttcttaccaacataagttgttcgagcaaccaatctaagtagaattcctggtggaaagttcagtttttccatcatcatcctctccaccaagtcgaacacaggcatagcataaacctatatata

SEQ ID NO: 78043 - DNA, 1007 bp, Cannabis sativa
atatgaggacacatgtaatttctatagccaattacaattcaggacttcaggcccaaccaagataatgtgtcagatccattagcgaagtcaagtcttccgaatgacgggcatacgactcatctaggcgagataatccttcaacacaacgagaatctgaaagatatcatttggagtgtccagagaagtagtcaacaaacgtccagacatcaagctccatatcacacctataaatatcagattacacgatatcaggacttagctcccaatatctcgtttgagaatcatatctttccaatatggaaagatagtaattgacaatcaaatatttaatgtgtttttattctctacaaaagtagggcatgatttggacaactatcgacatgatgtggtatccacatcagcatacaatcgacacctcatgggccgagctccactagatgagccaagtcaatatgttatttgtatttaccccatcaggggcaaagtgaaatgaataagaatcctagcactataaatataagaaaactcattcaagcaaagggttataagttcattcctcaattgcttaagcaaaatctagggctcaaacacttgtgtaaatcataagatttgttaaccacgtaaaaattatggtgttattttatttattattcattaatttctttagctttcacacatattttattaattttcgaaaatcttggtaaacatacaagaataagtttgagtctatttttttctctaaaaatctagatttgtttaaatacgcataatattttttagtttaatttctaattttttctaaaaatatttttatatttgtatattgaatttctaattatttctctttactttttaagatataagtttgtaaatatcaataagtttatttttttaataacaaaatcttagttttagtttgtttaaattatttattagattttcaataattttggtttaattttttaaaatatatttagattttttaagtaaatataatatttttt

SEQ ID NO: 78044 - DNA, 805 bp, Cannabis sativa
  modified_base (482)..(482): a, c, t, g, unknown or other
tttattttctgaatgtctctctctatatatatgttttagcaatctctttatatataggtatgtttccattgaaattttcgaaaggaattgaacaataatattctcttaatattatacatagtacagttggctaattaaatagttaattatacccctatacagaaatctttggattacacgtctctatagctacaaattaaatcataataaaataaaacagagaaaatataaaaatatatgatgattagataaaaattagggataattttaaaaaaaaaagacaacaacaacaaaaaaaaaaaataaaattacaacaatatatacagtttgtaaggaattttcaatatttttaatacggtctttaatttatatacatttttatgttgtacgatcttgttatttcaatgttgatttttttgttatttatatattatttttgatgttgttttgttattactttcatgtaattttttttttttttnttttgtatttttataaaatattgtaaaaatgtaaaaataaaactttgagtaaaaaattaaaaattttacaaaaattaatattttatgcaattaaattatataatttcccttgtatcggcctgctgcttcatatatagtatgaaaatgtgtttttgaaataatctaaattgtttggcttttcttgccccttgttcttgtcaactatatatattccaataagaaaatatatatgaatatagggaacaataatttatattttttgatatttgaaaaaattataataatttatagtaagcatctcatattttctttttttttttttt

SEQ ID NO: 78045 - DNA, 755 bp, Cannabis sativa
ggtttacctgtgaaggagatgacagaatttattgtgagattccgtctaatggcagcaaacggagtctggggatgaggggagaaaccgtcactggactgggggaatggtggacggactgtaacgccgatgaacggcgacgacgacaacagcagcatcaacgacgacagtatacggcgagccctagttcacacttgtcttcagaagagctttccacaaaagaattagttacatataaccaaaaggttagtgtttagacatgagccctcaccttcagctaatgtggtatgcaatatgtaggagcaaggctataacttagcatttaatcattccaaaatattccttataccgtgttacatacaattgtatcaataatttgtattaattttgtaataacttttattttaattgtacaaattaattattgccatctatcagcattatcactccatctctatcaatttgagttgagttttatatttttcactctcaaatatttttctctcttagtattagagcaactacaaggcaaacaccaatgtctaccatccaatctcaaacttcagttggtaatgctgcttacaataatggagcccaatcgtccaacaatcagggagctaccacaaatagatcgccaaccatgtctaattatgtcacaaactttactcaaccctttaacaccctaaatcaaccatttcctataaaaactcgacagaaaaaactacactctttggaagacttgttgggttttatgccct

SEQ ID NO: 78046 - DNA, 829 bp, Cannabis sativa
  modified_base (163)..(164): a, c, t, g, unknown or other
atatctcctttggtttttcacgtaggcgggcggtggcatgctaataccatgccgtggcccgtgtgaccttcttctctatattgcgtgcttttatctttttttcggatttgaatttgatattttccactgggatatttttatgcgatattttatcctttttctnntgatattttccaactcttcatctatttttagtctgcaaaattaaaagataaaaagcgtgaaaatgctccaaacatgatttaaactaaataaaaatatactaaaattaatctaaatttaatactaaaaataacctaacatgcaacatgaggatcatatggttgcgctctatgacatgtttattttgttctggtcatgactatctatcctgggtcacaaaagagtagtacgaggacctatgcgagtgtcacctccccaaataaacactcaaaatcacctgcatagaagagacaaggggaggtgagcaatctgacaaagctaaaaacaaagttctagtcaactgtacccaagggtaccttccaagtaaatcataatgtaaaaggttgggtaccagcagaataccgtctcaagtacatttacttagacaaatagtgagtcctaagttgtacacttaactataatggactcactaccaagtctcatacagagttcccaaggggcaccactaattagatcacagttgtatatgccttcaaggccgtcacaagaccctagtcaaggtcaacagaggacaaaaagctcacaacccacttggaaccttagccttggctagtcagggttcccaagccctaaagggctagccaggtcccatgacccagcctagggc

SEQ ID NO: 78047 - DNA, 1627 bp, Cannabis sativa
ctttaatattctattaatttttgtggaatacgaatgagcatctacctacattctgttttatttgtgggaatatggggcactccgataagttttgtcctcgttgatttgatgctccagagggaaagatttaagccttatggagaatggatgagagggtggcttgtgcgtaagaatcacaccatatgaacaaagtggctgaaacaattcatggcggctatggaggaggtacttgttgctcccttaaacacgaccaccagtgaggtttgacggtcacagttagtcggcgctggtgaagtacagttggttttttaaaatttcctatgattgtggaagataacatgggtcaacataatatccctattaatgtggcaacagattttatgggggctactactgatcatgaatttattgagaatattgccatagataatgattgtctgttggtggtggacacaaagagaagaaagatggaatcaggcttgtttaatgggccgaatgaattggatgaatatagagagattaacaaagctgtaatgggttcaaaaaacatgagtttggtgggttttggtatccagacccaccgtccattatgaaaatattatcatggaattgccatgggcttgggaacccatgggcttttcaattccttaaggatattgtgatccaaaagcaacccaaaattatattcctttgtgaaacgcttagtaatcgttctcatatggaaaaggctcgtgtttcgttgggatacgataggatgatggttgtcgttgttcaggggaggagcagaggaattgcattgacgtgaaggtttcagttgaaggcatggctgtatggaggtttactggtatgtatggggagccaaatagaagtcgtaggattgctacttggaatcttttacgttcgctcgttgctaattcaaacatgccttggtgtgtcatgggagatttgaacaatgttttctctcacgaagataaaagggaagggaaccgctatcctaaatttttaattcaaggttttcaacaagctttgaatgacagtggtttgcatgatatggagctttgtggttatcctctcacatgggaaagaggcagaggcacttctcattgcgttgaagttcgattagatagatgtttggtaaatctttcttggctgtaagctttttcatttgctaaattatataaccttgagatttcgacttcggatcattctcccatattgtttgaactcgttaatactgctacacaaaggagagtaactcgttttcgttttgagaatgcgtggctctgagagcctctgtgttaccaaatagtcaaagatagctgggatgaaagtggtgtaactgatgtgcaagaaaaaatcaagatttgtgggcagtagctgagttcttgggggaaggaggttacggggaactttaaggacaggataaagaagtgtaaaagtgaagtgcatcggtggaaattggggtatgatgagtcttcggttaccaattataaaaaagctaagaaggagttggctgaagcttatgtaaaacaagaagtttcttagcgtcaaagatcgaagcaattgtggctccaagaaggtgataataatagtaaatattttcatgcttatgctactaatcaacgtc

SEQ ID NO: 78048 - DNA, 610 bp, Cannabis sativa
gtatgcttttgatataatcctaatttttgtatattttccttcatctcaataacttttaaaatattattaccatcatacttatcatcaatacaacaaacaagagtaagttataaaaaaaattattcccttacatagattgtagagaaaaaataagtagaaattgagaaaattataagagtttattttttttatgatataaataaataatgctaagaggttatggttttttttttttttttttaacatttatagggatttttttatgccatatttttgtaaaaaaagatggaaatcccatctttgtaaataataataagttttgccagaaaagtcaccaaaaaaattagtgtcgccggaaaagtcaccgttgctagaaaaaattactagaaaagacaccaaaagtagatgtctcaaacataaataataatagaaccagttttataatataatgaataaaaataaattacacaaattgactcaaaccggttataattgaaatataaccggttctgtaacataatgaataaaaacaaataaaataaaataactcaaagtaattataattaaaatagaaccggttctatagcaatgttataatgaataaaaataa

SEQ ID NO: 78049 - DNA, 988 bp, Cannabis sativa
cctgtcgtttctttaatcactaataattgctttttgcttgtatttttttttctgctatttgtgtgaattgaatcatttattgatccccataaatacccacagaaactccaaaacacaactctattgcaaaaatacatttgttggtcctacctagtagaatttcttttgatcaactcagtctaatctttattaactcatagcaagagaatagggaagggtgttttcgtcatttcaaatgccctgttttgtttgtttatgagtctccatttgaatgagtattggagggaggggtgttttcgtcatttcaaatgccctcctttgcattcgccatcgtcttccttttccaaaatacattttttttcttttaatttttcataaacaaaatgctattaaaattacataatttgaataaaaggataatatacacaaacctattcatatgataaaacaaagtatataaataaataatattaataaaagataatacataatatgagtaatatttatataaaataaacggataacccaaaatatcctaattaatacgtttttttaaaaaagaaaagaaaagaaaaagataatcctaattggagtggaattataactcaaaatttttctataaatattgtattatgaatcaatgagtttcagaagattttggattcatttatttttttgtttggtagaaataagtggtgtcattcaattcaattcaatccaaacttgatggagctttcaactgaccaggttaatttctttctttcttcttcttctatcattcaatcatacttgtatattttttcttattaatttatatatatgtatatatatagattggttaagaatgcatgaatatagtatagaacagagttgttaattttgtacgtattattaacaatctctaataagatatttttatatatttgactatatatatataaatatttaagtatatgtaatatacatatttacactctaaaaattatat

SEQ ID NO: 78050 - DNA, 599 bp, Cannabis sativa
  modified_base (537)..(545): a, c, t, g, unknown or other
atattaaagataaaatctggaaattattgcatgcttagaatgacaagttattttcaattggtgggaaagaggttctcttgaaagctatcgttcaatccattctcacgtatactatgagttgctttaagctttcagagagtttctgtaatcaacttgacaagatgatggcacagttttagtggggttcttccattgataagaaaaaaacacattggcaaaaatggaaattccttttcatctgtggatgttgctaacatcttgaaaatccctttgtctttctctgctactactgatttatggatttggaacaatactaattcgggtgactacactgtccaaagtggctaccactttgcttgttccttggaaaaccagcaccgtgctacatcatcaacatcagaatagtcatggtagaaagcattttggggtctaaatttaccatccaaagtaaggatctttgcctggagggtcattgaacattcaatccctgtggctggagctttgtttcaaaggaaaattatcacctctgctgcttgnnnnnnnnnctctaatgcttgggaatctatagggcatgccatgttcagttgtaaacatgctaa

SEQ ID NO: 78051 - DNA, 1800 bp, Cannabis sativa
acccatttttctcctaagtatcatcatctcatatgacaacaaaatgtccaaaaaattaagcacaattctgcaaaaagaaattgcaaaattaccatgagatatttcaaacaaaactaatcaagttttaattttggcaagaaaaagaaacaacaccaacaagagcagttcaagaactaacagggtagttccctaattacaaatgaaaaaaaatgatgcaaaaagcttccattattgctaaaatttatgttggtcaactgaaaatttatgatataaaccaaccactccagtaaaagttccagaaaattccttaaaaaagaaaaaagcaaaagagcatgagcacttgaagaactaacagactctgtttcaagtatcacacctgaaatttgtataaattgttgtaatgatatacaaacaataggcttagcaagaagtatcttaacttaacaaacatttgatcaaacacttggtaggtgacaataatattaagtaaggaaaaagtattaagtaaggaaaaacaaacttggatacataccaacaatgaagaatcatcctcttggaaaattataagtgaaaccagattaatctcgatcgccaatcgacgcctgagccaccactgccaccgtcactctcagtctttctccggcagtttttcacttggaatttgtggcaaatcaacgatggtcaataatatataactttctaaacaaaaagaacaaaacgacaataagatttgataaacgacacatagaaaaaaagaaaacataaagacaacaataacatatttaaacgacaaaataagcataaaacgacataaattggttttaaaaaacgacaataattaaaaaaggaatgaaaacaaaaataagatttgataaatgacacatagaaaaaggaaaacaaaaaaacgacaatgacatctttaaacggcaaattaataaaaaatagtaaaatagattacaaaacgacaaaaaagtttgtaaacgacaataaatttagcataaacgacagaatactagaaatagaggaaacgacaaaaaactttataaacgacaataaagttagcataaacggaaacgacagaataccaaaaatagaagaaagtacagtgaagaaaaataaagaaattgatttttgattaaagattaggtgcaaacgacattaatatttcataaacgacacattaccaataacagaaaaagaaaagcacaaaacgacacaatagtcttgaaaaaataagaaaggtgtgaaaacgacagtaagattgcataaaactaaaaaacgacacatactgtgttataaaacgacaatatgtttacataaacgacacattaccaaaaatagtaaaatagagtacaaaacgacacaaaaagtttgtaaacgacaataactttagcataaacgacagattaccaaaaatagaagaaagtacagttcagaaaaataaagaattgatttttgattaagattaggtgccactaacgagttctgacattacaagacaacacagacagacaaggtcaaataattatcgaaaaaaaaattccttaaccaaccaaataaaccgactttcggcatttcacaacaaattcaattcaacccaccaacaaaaaatcacacctaagaaaaacccagttcctgtttttttcattttcagagaaagaatcagaaaaaggtgacatttttgaatttgaaaatggtgttcaacagtttgctggttgtatcggttgcacacgtgtcagccgatgcttggcaatgccttgcttgcttccctgaaagactcagtagccgtcagctattgga

SEQ ID NO: 78052 - DNA, 3648 bp, Cannabis sativa
  modified_base (361)..(387): a, c, t, g, unknown or other
ttgaactatcattattaattaaggctgctcaagtccaaatacaaatcttaagaacattaataaatatggctaaccaacctgccctctactgctaaagattccttcttttgacaataaataacctgtaaatgaaaacaccttcagatagtgttagcttagctctaaatcccacaaaaaaaaaaatacacagaaaaaaataaaataaaagagaaagctttacatagttattgttccgagacagtgaaagagtgtgatgatgatgatgggaaaataaagggtgtcccattgttttgagtgaaaatagatcccattgacaaagttttgctcttgaatctgatgcatatacatatacatatatatnnnnnnnnnnnnnnnnnnnnnnnnnnngagagagagagagagagaaattatcaattgaatttcatatcaatttatgtgcaaaactgaaagctataaaattgaattgaattgaattgagagagagagagagagagagagagagagagagacctgttggtgttgagagagggcgtatggaaagattgggtttgggggaagagagagttagagaaagctccatcaccggaaccgaataggagacaatcgagaagagaagagaaagctttttcctttttctttttcgttcttttttttttttttggttatgttattatttttctaaataaagcattaaggcatttaactatagtacatctacatataattattaattaattctaatgatgaaatatttgctttcaacataatcaacatatcacatatatatcatcaatatttgtaccaaatacatgagattgggagctttaaaataagatatgtacaccaataaattacacatgataatgtgaatagtttaaataattttgggtagaattttgtttatatatttaaatatgtaaaaagggaaagatgatttggtatttttgtttgaaatttctagttaaattccacatttttactttctttgaaggcctaatgtaaggaagatttactccagaaaatgaaatattctttcttctctactttaccaattaataaaaaaaaaatcccaaatgttcaaaatttattaagagtaatggaggtggaaattcaaagttttgttttgatgaaaattaaattgctttactatggttaaaaagtggctcctcctacataatggtttgatggtcacaaactcatcaacaattgaaactacgttctctaaatttaaacagaaagctgtgcttttatcacatcaaaagtgctttagttttgcaccaaaaagtacatatcttgatccttgtaatattgttcaaattacaaaaaatgtggtaccatactaaaacagtcattctcaaatagacaagtattaaatggaatggaaaagttttccatgagaaagattttatttcattcctcaactccaacattcttctctgattccattaacaattaattgatcaagcttatggtcatttggctgaaagtcattctcaaaagagaggctttgctatcgaacccaaaacaaaaaataaagacaagtattcttcggaaatgttttccatgagaaagattttatttcattttttaaacattttttccgattgcattaataattgaatcaagctttagtcgcagctgcccctgctttcgcaaggtcttcaagtgcctttaagatctgtggctcgcttagaccttctaaacgcacacccctctctacacccatgtctgctcagaaaccaaatgacacagattatatgatgattatgttcagtattcccattagaatttactaaagaactagaaaataaactacaatgtatgttcatgttcatgcttatgctagcaagagcagcatagcttttaatcaacaaatccttagcttaaaaagtcatgttaaagagataactttaaggtggtctgtaacttcaagaacagcaattatcacaatttaccactggtttccaaatgaaaatgaataaaacaaattgatgaatctccaggtcttggtgttgggttgcatgtggtaaccctagttttaaataaaaacaacaaaacataataaaatctgcctcctacagcggctgcgtcacagcttcaaaagtaagagctaagaaaatttcctcatacatgcaacatttagcagattcaatgaattaatttcaaaattcaaagcattttttggaaagaaaagaacagtgtaatagtctagaatatcttaggatgcctatttctcccactgtaattctaataaaccaaggactttctcttcctgtaattcccattatatcattttaggattgctaccagatattatcaagtataaaactttccaattcaataagatacctataattttcagtatcaaaacattatcagatttatatcctttttggctcaaccacacacatttttatattaaaatgtcagaattttctggctaagttcaccaaatctaaaagaaaaactttagtttgaaatccatggaataaactaaaaagaccaagagaagcatagaaaataccatatcttgcccataattggggttcaactcccctgcactcccggatcaagaatggaagcttggggttcaatgctttcaaatcctggtagtttttctctacaaatgctctgccaaaaaaagagcacaaaccatttctctaagtcattaacaaaagttctacaaatttttatatgattttttagtaatttaatatgatccactactcaaaattcaatgtggccatggatgaaagttcttgtagtttaaattactatgaatcagcctaaatgggtacaaaagtcaaataatattacacattaaagtaagaaatgagaaaagaatgaagacctggtggcagagctcgcaggggacgattggcagaacagaaccctaagctccttcaaattctttgataattgtcctctccatgccatttttttttttttttgctctgattctgaagacatggaatattatcaaccagaccagatcaacaaaaataattctaataaacagagagcatgaatgaatttcacagtgagaatatctctctatacaaaataaaacaaaacagaaagaatcacttagagaaaactcaaatcaaacaaccagacaataaaggtgtatttaatcctcattagcagcctcaaagctcaaaagcctcaaagtttaaaccagactaacaaaacagtaccttttgtgagttgtgagtgaaacggaattcctcctctccgatctccgatctccgatctccgatcagatggtgaacgaggttgatagtatttctagggtaccgaattaacgatagagagagagaagaataagaacaagttgtgctgtgactttggtttataattgggcttgggcttcttctattgggcctaactcaaacaataccaacatacccactcttttattaaaactacccatatatatttttatttattttttgtaattgatttgatcgtaatttagaaaagaaaaacaataaaggcaataatttccctcttcttcttagggaaatttgaaattttatacttacatggaaaattttcccttaaaccctagataccctatattggtaagatgggacaatattttgttgattcccacatacccctctcattcaaactcctctctctttc

SEQ ID NO: 78053 - DNA, 901 bp, Cannabis sativa
ccaaaaacacgagggcgggccgtggcatgcccaagccatgccgcgacacctgagacgaacctccaggttccatcagcaggggcgggccgcggcacctgggttccaaacccagaaaccagcatgcaaaactcgaaaattcagcaacccaactcaaccaaatcatcccaaaactcaaccaaatcctcccaacaagattatcattcatcaagctcaaatatagggcattaaaatacgtacaacaagcattaaaactcacactttaccctgaaaattcagattgtgaatacatatcaaaatcatgtttaaacacacaaacttcaagctctcaaacttgaacttaaatccaacttaccccaatattttccagcaacaattatccccaaacaatagaattaaggtaagaaacaaaccctaaaattccatctatagcttaatcaaacaccacaacaataattcaaggacaaacatactcaaatttaacaaaattaactctaactttatcatacatgcataaacaaggctatatcacttaattcatgcttttccacaatatttcagcaaggaatcacaaattaaaaactataaatctacctcaatctcttgcacaatcaagcctcaagcttccaacacccttttccaacaatcaagcttcaattcaagctagtttctcacaaattcaagtttgaaaaatcaagagggtaagagagggagagaggggcggttgagaggggaaacaaaggcagaaatctcattctatttcctcaaaaattaattcttggcaaacataaaaattaaaggtcaaaagaccaaaatgcccttagggcccaaagcacacatattcaccttcacaagggtaaatttgtcatttcatgcataaataaattccaattaatttcagatt

SEQ ID NO: 78054 - DNA, 816 bp, Cannabis sativa
ttttataattaatgagatgattacaaaattatatatatttcttaacttcaattctttttatataatttttaataatattttataaataattatataaaaaaattactaaaatctaaataatattaaattattaggctcttaacgtattgtactgtcaggctagacttttcgtgttatgtgtcgcatcaaagaaatagttagttagtagttagttggtcttagttgtcctaggtgtcatgtttgttacatcggttatagttgttattactgtaaccattctttctgttgatcagctatgtaaagcttttttctctctcgtaattttgtaaattgtattcatttttcaatctcaataataaagattcattattattcttcttcctctgttctttcttctttgttttatggtttatgctttgctgataggtttcgagtaagccttctccttcgttgatttctcttcttcttgcttctgcttctgttttgtgttcatagctagaggaggaggagtgcgaactcgaagcaatcgtgatcttgaggataactcaaacaattctaatcgattctttgttcttggtgagaattcaaagtcgacgagtttcaatgatctttctaatccgtattttctctccaatggagacaatccaggtgctgtcctggttccgaaaattctcacaggaagtgagaattataacacctggagaagatctatgttgataggccttgttgctcgaaataagttgaagtttgttaatggaaagcttccacaaccagacaaggagcatgaggattacgacagctgatgtagatgcaaca

SEQ ID NO: 78055 - DNA, 931 bp, Cannabis sativa
tcaaggtttatctcttaacttttcccttcaatgccatgaaaatatttttttttatttttttctcctatcgaatcaatttttttcttcaatttcctctgggtgtgtaagagtcaattccgttctgtgagaaacgctccctgcgatacaggttttttcctataaatatataagttgggcgcactgactttcgtacactattgttattgaaaaagaaatttaagttataaatatatattgggattaggggttttatctcgtaaatattaagactctatgctgaccgacacccactgaagcatcagaattagatgcatcaacgcctatcccacactcttccaccatggattagaagtttaatttatttatctttaagctggggattttagttttgtttgtctcagaattatattaggcattatttatacataaggtgcaagtaatgtttagttgtttgggtttcttggatagaacaattttgggtggaaaattaatgtttaaatcttgtctgcttagatataattatgccgtacaagtggggtcatcatgatatgcaaattatacattacacatatgttgcaaattgtagctaaagccaacagtgaagctaaattttaatggagtgtgccttttgcaagcttctgtttaaaaaaaaatcggcaaaaagggaatactggtatactggtattggtattttagttagtacattttgtgccaattcaaattgtttagtgttactacttactttgtttattttctttgtattgacaaagtcatattgagtaatagtaacaaacactttaatccaaaaaaaaaaaaaagaatattaatatatcatatcaagtgtttacattactttggtcactctttaaaaattttaggtacccaagtagaatagaatgatgatgaagctttcatcataattattgtatgt

SEQ ID NO: 78056 - DNA, 828 bp, Cannabis sativa
gaaccttctgatccttatttagatcagatcacctcacaaattgagtcttaagttttttttttgacctatctcacaatgtatttattgtgagaatttattatttatgtcacgtggcattcaattcgactttttttcattaaatagtccaaaaaataggtataacaacaacctaaaataatcaaaagataaatttatctatatgttaagaattgaggttgaacattagaatctgatacataaaaatcagttttatttatcaactagttaaaattctaacctagggaaaccagttagtaaagcaaaaaccagtttattgaaataattaaattaaaaaactatgaaacttaaaactcaattatgaaaaataataaaaaaaaaattagttatgataacaagttacttaaaaataaccagttatgaaaatcaataaaataataagacatatcacaaaagaattcttaaaaaatctatataaaagtaaatcatagaaactagctaacattaaacaaccaatttaaaaatctaacacataaaaacgagtttcgaacctagaaacaaaataatacaaaaaaaacttaaaataaaaaatatacaataacatcataaaatagagcaaccacagtacaaaactctcaaaatctgtgaaacagttttgaacatgtgaaatcagtttcgaccatatgtaaaataataacaaaactgaaatgataaacaatgaagataactgaaactgattttatcagtcaactaaatggaaaaaaaacacactcacacaaaattactaaaaaaaattagaaatataactaaaacaatacacgatgcacaaca

SEQ ID NO: 78057 - DNA, 634 bp, Cannabis sativa
tcagaatccaagtagtggaacatacataatgaaaagatattagtaccttttgtcttttttttgatctggttgtggagattgtataaattaagaaattaaatgtatgaaccttcaaattattatgtaatcctcaagtgtgcttcaaatctcttatcatgtgacaattccaatctttaagatcatcaactgtgatttcctcaaaataattttaaaggttgagcatttgtcctctagttaaatgaagttaaaatatatgtgcaagtacatcgcctcctaaagacaaaaaaacaaaaaatacatttttctttctttaacaatctcaattgtacaacattcaatatccaatcactatcaacattcaagaatggaatgtgtcttgaattatctattttggcaaatgtccttaaatgtgattgttgaatctagagaccaaaccaatgttaggaatggtaatgatcatcatcatcattcttagcaccacaacatcgaaaattaacgattctaggaataggtaagtcaaaagtttctgaacctaatgaagcacctaaggaatcgttttgctgctacattccctgatacaagtcaagagtagtttatatgaactataatttataaaataagtaccgaactaata

SEQ ID NO: 78058 - DNA, 1006 bp, Cannabis sativa
  modified_base (611)..(612): a, c, t, g, unknown or other
gcgtggacagattgcatgttgaacttgttttgttcataacttttgactcgagactccgttcgggatgttctttatatcgttggaaagtgcattctaagctctatatgttaatatgtattttgaatgaaaatttcatattatgtggaagtagatttaaggattaaccctatacttataaatcccaaaaattgtgactaggattaccggcacttggttaggagcaactggagatttggaatctccacgtttacagtacatcagttaagacagtagtttgcacgtagagttaagcgcgatggcgctcatgtttgatataatgattgtgattaattgagaaccaggattagggttattactctaaaatgagcggttatatggtctagggttattaccctagtaattaaaagattttgagtgttatgacatgcttaatatgttggaataaagaattatgcgcctaaggcataattaagctagactcggtaaacttgtaccttaagcataattaaatgtggtctacaattattactctagaatattatgaaggtaagaaaaggatgatgtatggtaaaattgttaatcaagtgaagacatgagttagggttattacnntcaataggtgttattttgagcatgctgtaatatgttgtaggaatgattatttagtatgcaagttaacgttattaccctaagattctatatgttataatatatattgagtgcacgcatttatgttaagagttatgtgtataagacataattgggttagacttgatatatatcactaggataaaccaccgaaagaacgtaatatatggattatgtgtatacatgaatagggttatgcgaaggcataacagattagattcggtaactataaccgaggtaaacccaactaaggtcttattgtaaataaacgtgtgagagtaacacatatgtctatgctacatagacataaatagacgtgtgagtgtatcacgtcggtctatgccacatagacatatac

SEQ ID NO: 78059 - DNA, 1062 bp, Cannabis sativa
aaatgcaattgggattgaaatatttggcattttaaatgttggtgaataatctgaaatgaattgggtttgaattgtgcatgaaatttcatttttgcccttgtatcttaaagtgagtgttatgagactttaggggcattttagtaaatcggcatatatgtgatatttgtaggaaaaggatttgttttcaagaaaaaggatgatttttctggtatgttctccttcaacccgacccctctctctctctctctcaaacccatctctttttcaatttttgttttggtgaagatttgcttagtttgaagcttggttgttggagattgattgagcttggcttttatttgggtttgaggtaactttctttggcttgaatctttgttaaatttctgagtttaagtgttgaaagagtatgaaatatgatatgggtggtgtttatgaatttgagaagcatgttgatgttgttgggttattttgagcatgctttgagcttcaatctttagagtttgtttgaattaggtttggaaaggaattttaaggaattatacttgtgttttattctgttattaggctctatatattggttgtgtgaagcatgagtttttggcttaatgttgtaagaattcaagatgggattttcatggaattaagctcaagttggagctttgattttcataaatttgtaatctggaattgtgggattgattgctggaatttgatgcatgaagtatatgtttttgaccccataataattgtttgcaacttgatttaatgatttgagagtgtggatgtattttggtatgatttgaaggtgtttaggggctgaaaatttgagttttgcttgctggtttctgggttttcaacctaggtgccgcgacatggtctgagcatgccgcggcatgacttgggcatgccgcggcccaccctcgattttttgggacaatttggatgcaaactttgaaattccataacgtttgattccgaactctgatttgggagttctttatatcgttggaaagctcgttccgagctttatacgattatctgaattttaaatgccatgaatat

SEQ ID NO: 78060 - DNA, 513 bp, Cannabis sativa
taatagtccgccgctaaaccctttataaatacccccatcagccccatttccccactttcctttctcttttcaaaattcaaaaacctttttccccccttttcccccttctcagcccgacccccctttctccccttcagcccgaccacccccttggctgccccgacgcaccaccgccccgacggcattgccgcaccaccaccacagtcggagtagtcgacaatcaaccaccgaccaccaccatcggcgatttttggtaattattgtttttttattttagatttgttattatatagttttataggttttagatttgtatatataatgtgtatttaaatttcgaatgttatatattttaggttttaaataatttttgagtttataaatgtgggtatttatatataaaagtttgtgtatatatatatatttttgtatataaaattgggtatatttatatataaaaatctgtatatatttgtgtatatacaatatttgggtatatgagttttgattttt

SEQ ID NO: 78061 - DNA, 600 bp, Cannabis sativa
ataaatcttaacaaagaaaaaaaagaattgctatgctgccaatttcttattgatgatttttatatttctctttgattccctagacttcagaaaataagtcaatgtgggatgcataatcaaagtaaaaacaaaaatcttaataaagagaaatattatactgtcaaaatttttctaaatataaattttgatgaaaagtgaaatctggaaagaaaaaaaagctcataaatgaaacgccaaaatccaaattttttactgaaacgattcatgcccgtgagctaaacttcaaaagaaaaaaaaacttcccaagttatatatatatgttcgttcagctaactgtaaacaaaaactgatcatatatatataatccaaatcgaaaacattctcaaaattgtggtttaccataaatattgtatatatgaaatatatgtagtttaatatacatgtaaatggtcagttttaatatatacttaaagcagtgagtgtatacatatgaccttatctatattactatgtatatatggaaaaaggatcttggcaaagaaaacatagccaaggaaaaaagctagcgtggcacttgatacattttataaaaaaaatata

SEQ ID NO: 78062 - DNA, 1236 bp, Cannabis sativa
tttcttgttatttttctggtttacttcataagataaatctcttactttactattgatatttaaaaattcacgaaggcttgttgtaccaatctattctgttctaactgcaagttggcaacaggattatatacatagagtgggaagaactgctcgagctggtcgatcaggggttgcaatctcccttgtgaatcagtacgagttggaatggtatatacagattgaaaagctcatcggtaagcgatgtacatttttgtgcttgtgacttggaaggcatcatttagagtatctgaatgagctaacaataatgagttatttacatgtttcaggtaaaacgttacccaagtatcccgctgaagaagtagaagtcttgctactgttggagcgtgtttcagatgccaaaagaattgcccaaggggtaaatatatcttttcacatatatattgattggtttatgtttctgactttgtcattgtttcaattcccttttatgtcttgctcataactttgaatgtgtgatatatgtatatgtactgtagaaaatcaaagatggggttgggaagaagagaaggaatagagatgacgatgaagttgagaaagatgccgagaaatactttggtctcaaggattctcgcaagttctccaagaaaccaaatggaggtaggggtaggggtggtggtggtggtgggggacggggccgaggtcgaggacgataagtactgcacttgctcaccatccacaattttgttaattgttatttataggaaatagatgaaaagaggcgacgggttagttttgttctttagccaactgcacattttgtgatattttattaaagataatttttaatttagttgtaatgattttccacttgattttgtcattccaagcaagtatatacctaatcatcttatgctttgtgtgttgataatatttattttcccctcctttaatgggattcttagtgtgaaataacactaataattaatcaaaggggttttttattaatgtacaacaaaaattaatatattacaaaaaaaaaaatgtgcaaaaatttaattataaaaactcatacattttaataatatttaaattatatttactaaacttactataaatatatatatacaattttttgaatgtggattatggattaaggagcattaatgtgtagtcattataacatgtaactttaaattttattatttatgattattgatttgatacttataatagtta

SEQ ID NO: 78063 - DNA, 1144 bp, Cannabis sativa
gattatatgcagctgaaaatacaaactaatcaaaatcaatctaatgaaatgtaattaatctatggcctctagctataaacaaaataaataaataaataaacactaaaaagaataaaattcttcactaagttattttaattgcttataagaacattatagtttatataatggacaagaaaagtgaaaatatgagaatacatttttttattgtaaataaagtaaaggagagaagtttggacatttggaatgttgaaatgaggcattaagaaattagtgtgtcaatgttatatatgtgcaccaaggagaatgatttttcttatatatgtatgacgatgggaggttgaaagaaaagagataatagaggttatttttcgaatccaacaaaatgacatcatcattgggatcctcaatatcagtgttattagaatcaatctcattccaactatggtcaacaccaacatgatatcccatatgtttcttcataaccttaggggaattaaattaaagagacttcccccccttatgcaggaccgaattcccacaaaatccttcaacaacctcctcacttctccgcgcagtcgccgcgccaccattcaatcggccgacaaatatttcgtatttctcattcccatcacgcaaccactgagagcccactaggttgtttcgccatcgtggttgagccctcatccaagcaccataaggctttatgatcatctcagaaaagcttaggacaaaatttctcagagtgacctattataccacagataaagcaaaacgtagggagatactcatatttgaattctacccagaaaccgtcctccattgcattccgatggagcttcctgcgccttttcaaaggagtagtgatatccaatgtaacccgaacacgcatatagtctctccacacattttgaaagttcttaggaccaaccttaacatacgtaccaacaaagttaccaaaattctccacaacactcgcaaacttaaaccccagttggagcccatggatttgcacccaaatgtcgagattgcttagcactacccttttcggatcatctcccatacttagcttttgaaaaacaaactgaactctattaaacgtccaagggcttccctctaccaccctttctaaatcaatttcatg

SEQ ID NO: 78064 - DNA, 542 bp, Cannabis sativa
tttttttttttttaattaatatgttagacttcgaaccctatctacctagaccatggaacttggatcccaacccaaacctcagatttggacccgaaccctcgccccatactcgaacttggacctagtctcggtcctggtcatggattcgaacctggtcccagacttggacctcgactccggtctcagacccgacttaaataaaatcaataaatgaaaatgaaatttacagaacacacttttattttttgtttttgaaattgaaaaaacaaaagtggttatagaacagatttttattttttaaaattaaaattttaaaaaaactacttttatttttgttatcaaaaaatttaaaaacaaaagtgttatcaaatgtcctttaaaattatagaaaattacattgtagttgctattatgtttgttaggaatgatggatacgtggagggatgaagagggtaaaggattggaaaggagatgtttatgttcactagggtaaaggatggagattgatttattattacaattattattttatttttaaaata

SEQ ID NO: 78065 - DNA, 3998 bp, Cannabis sativa
  modified_base (623)..(625): a, c, t, g, unknown or other
tgctctgtgtccccaaagtgtgacacccattttgctttatactttttccttttattatttttttaatttggccattcattttatgggctttttagtttttaggataagattcattcctgatttttctgtttggatattattttttttttaaaataaaaattatcaactatattaattagcaatcgttaataacaatagaactcattttatcagatatgggtattttatttactttcttacttttgtttttctatggtggctttggtgattagactagattagacagtgtaatttttctagttcaatgtttggacatattggaagtttgaacaacgctctatttgttgatattaaatttaataaaaatttaaatgagaaaattattacaaatttattaaaaaaaaaatattcattaaaattattgaaattttgaattatcatacataaacttttaaaatttaaaataatattaattaacagtagctacttaaattgattttaagataaacaatatgacaataaaattatacatttttttaaattgctagaaaatttatattaatattttaacaaattaatatttgtattaaattagtgattagcataaataattttatattatnnnagtatttttattttactattttaataatttattattaaaaatttaataaattattttattatgtatttatgatatatatttgattatatataatagattatttttttattttataatttaattaattttatttttttgctgcaaattatttatttttatttatttattattataactttttattttaatttatttttttttaaagaaataaataaaatagtttaatctattcttaaaccaaacacaatattactttcagtaaaatctaatcttgttcagtccattccaatcatttccagttcaatcaagttcagtcatgtgtaccaaacaaccaccttgtatatatagttaaggtgagtaaattcatttaaattaatttggttaaaagaaaatcattttgattaaatgattaatatttaaattactaacaatattgtaatttttggagttttgccgctcaaatttaaattttaaggttaattgctagcacaataaaactattgagaattttgttgcaatttactcttatataaactaaataaaaatcgaaactaaattacattacattaaataataagtttttttgaacccagattaaataataattttttttaaacccaataactgagtataactattagagattgtactgctatttactcttacttatataaactgaaactaaattacctaacattaaataataaatttttttaaacccacaataaattataagtttaaaatagaaaacatcacatttgattacttatttaatttaattaaggcatattttaatatattattttattaaaaatgttacttattgttgatgcaagattaccttaactcaataaaaaagactagagcaaaattatggagtttaagtaataaacaaatcaagtaccatttaaaaaaataataataataataataataataaacaaacaatgcaagtaaaagaaagggtgacatactaatatctatagttattagactagttagtatttttgcctcttcactttttacattattaagttgttaataatatcactcgatatataacttctacagtacaatcaatagtccttatattatattagtgatgtggtggtagatggcagcaaatatatgaatacaaattaattttttgttaccttttttacgttaataaataataaaataaaagattttcattatttataataatttatatttatattgtgtagttgtttaatctttatttaaagtaaacattgtgaaaaatatatttttttttaaaaaggaaaaaaaaataaaaaagataataataaatatttactttacatccattcattaattattatctattgtgttacttgtttcacggtaaaattaaatgataatatgatagaagaagtatattactgtaaaagttatatttcgagagtattgctaaggagtcgtatattatagggggcacaaaaatagggtttttacaaaaatattgaattttggataaaagtttataattttactgtcacgcggtatttttttacaaaaatactatctttataaaacaaccgtaaaacaacaaaatagaacaattaaaacaaccgtggaacaactaaaaaacaagtggaacaattgtgaaaacttaacacaatacacgatataaaacttacacaatattttttaaaaaaataacacaatatttaaaaaaaaaaaaaaattctgtcccatagtaaaaaagtaaaaaagttgaaaatttcagtatgtggttttaaaaccccacaaaaatatactctaaagtttttgtttacaaaaatattaaagtttaaaaattataaaaaatacactattttagcaaaaagtaataaaagtataaataaactataaagtaaatagaaaaataatctcatgaggtttataatataactataaaacaattaaaaaataatttattatttttaatcaatatgcatttttgtacaatagtcctcacattacattttatttaattttataatcaaatgagtgatatggtggataacatttaataaaagaatgaaattaaaaattctttatcctttaaaatattttttaatattataatttatatttatattttttaattgtttaatctttaatgtaaaattagtgaaaaacatttattttatatccatttatcaattatcccttgtgttactcgtttcaccataaaattaaataaaatatgataaaagaaccatattattgtaaaagttatatttcaagaatattattaacgagttgtatattataggagacacaaaactatactctaattaaaaaaattataaatacactataaaacaaataaaaaaataatctcatgacaattataatacaaatataaataaattataaaataattaaaaatgattattatttttactaaaaatgtatttttgtagataaaaaagttcaaagcgtaaaaaaaaagtaatgtgttaacgtatttttgtaattttttaaggggaattactccatatactatttttttttattttttttctttcaaatttacggtttggatttctaaagtggttgcagcgctagttacaatagagatttttttcaattattagtcatgcaaatttttctaattgaattcatgtgtatataatagtttatttatgtttatttatcaagaaggtttggacagaaatttgaaggaacaactctttaggacttattccgaagctccaaactaccttcaatcctaccaacaagcacaatgtctacattcctcaggcgctcaagatgttgcttcacctcaagacgttgcttggattcctctagaagcagaacaacttaaactcaacgttggtggaacagtttaaataaaagacgagaaaacatgcttatgtgctttggtccgtaactcatcaggacaaacattgatgtgtttgcgaagagtaaccgcaacatgatgcaaccaaaaattgcagaagcataggcgttactataagcactacactattgtcaagacaagcaaattataatccaccatttggagatggactatctgaaccttgttcgggatattaaatcttaagaaagtacccttatcgattatggagcacttgtggatgctctaaaagaagtgttaacttccttcccaacggtttccctttcgcatgtcaagaggcaaagaaatacaacagctcacaatcttgtctaaatatctattgagttagtgaacacttagatttggtttggaagtgaccacttcccttgctcgctgtaattttgtaggtcactctctcctaaaaaaagcttaataagctaaacaataaaaggtaaaaccaaaaaacaaatttcaaaagaaaacagggagcaatttaactgaaaa

SEQ ID NO: 78066 - DNA, 1483 bp, Cannabis sativa
atagactcaccattaagtttcatatagagtttctaagggaaccacgtatgagattaaggttgtatatgcctacagggccatgatagattgttgccgaagtcaaaataggacagaaaattggtaaaccacttggaactaagacccaggccggccaaggttcctaagccttgaaagggtcggccagggttccatgactcaaccaagaactggccaggatcactaaacctaggcatgaatcagctagccttatagggtgaaaaccttagagctggataactcccatgatcaagtcctaggacaggccatgtctcaagaaagacctcccaagctgggcaagtttagttttgaatctaaatgtctgtttttctttcaaaatttgaatatgtgcctcgtgttttttatgactcaatgagttaggaatcacaacgaaggccaaaataaaaaaatttcaataaaaaaaatcacacattatacattccaaaactgtcatgaggatcaatataccaaagagattacaaactaacatgagaatcaaaaggttttcaaaagcttaaaaagcttgaaacttattaatgacaggtacaaaaaagagatatcaaagaaaagaagatgagacgtatatatagagagaaggccaaagatctaaaagcatgccatgcaaaaagccaacacttagctagacaaggctgctcaacggagattactataaacaagatgagagctagaaagtccatatccgaccagatgtgcgaatagggactcagagggaaaatgttctcccaaaatttattacctgacgtggcatatctacgtaagccaaaacagagtacatgtagaatacaaccttgccaatagcaatacaaggtctccatataagttatggcaaaaccatcaagcagcaaccgaaaagagctgtaccaacatgtttggccagccaagagaagcctataggacggctagggtaagcttgtatggccggctaggatttgggcacaagttggtcggccaaaaggtaactttcagaccaagggaacctgatctttacaaggaaaatgtgtacaaagttggcctccacttgccaaaggttgacctcctcttggtaaggctggcaggaacataacctgccagaccctgacaagagcatggttggccaagattgatttggcaaggtggatggctggccaggattgacctggaaagattttttgtacaacctgatacgtggactgcaagctacctgcgaattgggcccttaacagcccaacaaactagattaaaaatatctactttcaaggggcaatttaatcttttatatttaatcaatttaatatgtaaatatctaaaaatttagttgtaaattagtgtttaggctctcctatataaatgccttaactctaacctagaagacataagtctcatttaagcatataagtctaattctagcctctaagtctgaaatcctactctctcttcctctctctct

SEQ ID NO: 78067 - DNA, 784 bp, Cannabis sativa
tgcatggtaatactaaacccttctttcttctcattttttctttcttttctttggcctttttctaatgtaattctttcttatactattgttttgccaggtaatatcattctgttatgcttgtctgatagaaactgaaaaaatgtcaagccatgaatcagaggatgacattgaaagaccccttctaacttgagtgagggtcgagtaaaaataaagaaaaagaaaaagaaaaagaaaaatataatgttcttagagggatgtttgtgaatataatgacatacctcagaattttgtaatgatatgtgttgtatattagcgcaaatgagttttggctcttcttctcttttctttttctccttcgaaagtgtaatttttatatcgatagagaaaaaaaaatatatatatatcatttttttagaagcattttttttttttaaaaaataaaatcatcattttattaaacgattaaatcagttaccaaacaaggcaacaactcaacaggaacattgttcaagttgaaacgagaatcagggtgggatatagctgctctcgcaaaagagtgagcaacttatatttgctgatcgctttacaaaataaaaggaaatattacgcaaatcatgaaataaaattttacattcactaatcactttgccaacacattgaaaccatggacatagagcttcgcatagcttgaacaaccgagaacagtcgatttctttatctcaatagaaaatgggatgttatatatttttttttggatggaaaatataaatctcttaattaataa

SEQ ID NO: 78068 - DNA, 1450 bp, Cannabis sativa
  modified_base (1393)..(1400): a, c, t, g, unknown or other
ccgccatgaagagattcagcaagaaaggaaggtgttgagagagcagcaggacaaaaagaaggggcagcaagaagtaaagaaatctcaaggcaaccaaggggagaaagaggagaatgaaggcaaaggcgttcaacaacctaattcttgggtgatacccgaaaagaaggctgcagtaagaccaagtaaacaacgagaggaaggggaggctgctattaataaaatcagcaacaccttcaatgttctcaaggagcaagaagctgaaccgatcgaagggaaagaggctagtgagaagaatgagcatggtaattttctttataatcatggatagctctaacatagcttgttggaatgttaggggcattaataaagtagagaaacaagatgctgtgtttgagttttgtaatttgaataaagtaggtgtgtgtggcttgcttgagacgaagttgaaaaaagatagaataaaagatatggttggaagaaaattctctaattgggattatttcactagtcctactatagagaatcgaattctgatcatatggaggaaacattatactcgggtcattgttgtgaaggaaactccgcaatttgttcattgctatgttgagatggctggtcaggtagatgctatgagtattacttttgtctatgggttaaatacaggggaagagaggaaagatctttgggatgggctttcgggtttaaaacctcctgctaaaccgtggctcataataggggattttaatgctttgtttgatttggaggataaagaagggggaaagaaagttattttgactaatatagaagatgcgaccaaatggttggctcaaagccatatggaagctcttctaaagacaggttccaggttcacttggactaataatcaagaggggaacaagagaatttattctaagattgatcactcgtttgtgaatgaagaatggtatgatgtcttcaagtcggctaaggctcattatagatgggaaagtatttctgttcattgtgcttgtttgatttctatgaaggtgacagagaagattggtttcaaaccatttcggtattacaattgttgggctgatcatcatgatttcaagaatgttgtccttaatgactgggagaaacctgttagagctatggggatgaaagctttatttctgaagttaatgagattaaagcacaaattaaagaatttcaataaggagacaataggagacatagggaaaggttaccaggcggctaaaactcaatacttggaagcaagaatggaagctcaaatgcattggcacaatctcaattttcaattaagggataaagaggcagcaactaattttcatgataaagaacaaatgtatcatagcttcttgaaacaacgaagcaaagtgaactggctttnnnnnnnngatgagaataatgcttttttccatgcctttttgaaaaaaagaaggatgga

SEQ ID NO: 78069 - DNA, 614 bp, Cannabis sativa
gggtggtgctaggatactaccggtgccctttaacagttctctttttaaaattatcaatctcttctctttctcttctcgtattctctccctctcctaacttacatgaagaacatttttttaatagtttaaaacttaattcttatgaaaagtacaagttaaaacactaacttatgtatttcgaatagctctaaacatgatttattttcattcctttttttacgatatcttctgatttaaaacgttgaaatatacaaaaattcgataagactcaatgtggaattaaaaccaagattttaggaaaaaatatgttttttcttgataaaacacggtgttagctcgatgagctcgatgggtgctcgatgcagggctaccgtaagagtaatttggtcttaggagaaaaactacttataacactctttgatatttttaaaaattactaaacttttttattatgtattttttcgaaaagaatttttttggaggacccctaaactaactggatgggctctaaacacaagcctgatctaccttaatccaaagctgaccctaactcgatatcattcttacaaaatgtgcataactttctcagtgttaatcactaaggttcccttaat

SEQ ID NO: 78070 - DNA, 1583 bp, Cannabis sativa
ttgagatgttaatgctatcctaatgaatattccaaatatgttatatatcatgagaaaggcttagtaggatttcttttgtgtgtacagaggcaaatagagttgttcatatattagttaatcaaattttaattaacaaacctagtgctatacaatgagattcgcctaatcttttgtaatttttggttatgaatgaatttgttttaaaaaaaatagttttttttcttcatatttttttattttcctcatgaatatatatatatatatatatatataaatttatgtaatggttgtattttattaaaaacacaaggtattcctcatgaataaatttacaaactgttgggaaaagccacttttgtagtagtgaaatttgtgtaaacttttcccaatatatataaataaaaccataaacttttcacatatttgaaaggaattatgtaatgattttttccttacataattttacattgttataaattcagaattattaataattatgatactaaatctctattttactttatagtcaaattattttcttccaagatcttattcgtatctagctaatataactatgatcataaaaacctgtccgatcaatcaatggttgacatttcttagcaaaaacaaaaaaaagctgtaataattttattttattattattatatatataaaaaaaaaaaatgaagcaaggatagaaacaagaaagcagcaacaatatttaatttcaaatcttttacaagtactataaaatattcaatgaagagaatcaaaggaaaaaaagaaaaagcaaagcactagtattgccagtggggatcacaataattgaatattgtactacatttataaatcaatgaaaaatgtaaatatatatatatatagcttgttttatatgcaatttgcatgtgattattttttttttcttcttcttatcaagtcggtctgatcaccattattattatgatgatgataatcaagttgtcataatatttgatctaactttttgcctcttttttcttttctttttttcttcttttaattattgacctcaaaaagtttgatttgttctaatgagtaacatgtgagccttctctcttcgatactatagtacattagagtttaatttttaggttttggactcactaagcgtgtttgaggtcaagggttccaatacgagtaggagagtttgtgaaaattttatttgtgtaatgacaatgttttcccttctatcttaagatgtcactcactactaattttcgaatgagttcaagtgatgcaccttattcagggccagccctaagtataggcgggctaggcccgtgcttagacccactcattttaggggtccaaataaaaaaaaaatactttttaaaaataccatttatctttataataagggtccatttttttttttacctatagactattttaactcagggccggccggtcctggccttatcatatgtgggggcaacccatctaagtgtatgattttggcaaacattttttcggtgagactggagctcccgccgacggaggaggtaactgccccctcttcccttttcaccctaattataaaaaaa

SEQ ID NO: 78071 - DNA, 762 bp, Cannabis sativa
gatttaaagttatttgttatatgtattgctatattatcgcaatacattgttactgggcatttgtgtttgccatagctctgtattatgcttcaacaaataatcttaattaagttgttggatgctttttactttttcatgacactaaaatcaccaagaaacatacaaaatcatgttgttgatcttcttatatcaacacaaacccaattcgaatcaatataagccttgagttgagtctttgatgttgcagagaagattaaatcctgtccttatacagatttgatgtattgcaagattctttgtgcaacaaacaagtgtgttgtcctaggaatagagtagaattggctcaatttatcaatagagaatgcaacatctagtcttgtaatagtcaagtactataactttccaattattttctataaagatttgtctacaagactatctttttcatctagccacagtttcatattggcctccatggttgtacgtgctagtttacatcctaagtacctacgatcttctaataattaaagtgcataacccctttgagatacaaaaatacctttttttaatttagcaatttcaattctaaggtaatactttaagtcttccaaattcttaagtttaaatctagtttttaatgattcagactcaaccagattattgcttgccatgttggataatttccatactaactgtctcataaagaaataccttaaacaagttacaaggaatataaagcaagattttttacaagcctcaaca

SEQ ID NO: 78072 - DNA, 662 bp, Cannabis sativa
taccacaggtaagaaaagtgatatttgtatactaatagtgtaatagcttttgttgcatcaataaatggtattgacaatcagattataaaactagcgttttagacccttcttaagctgtttaatatgatgtaaataaaatgtaaagtttaactttgttttctaaattgtgatatgttggtattgacctttaaagaccttattcatgaggaataggttgagtaagccataagaaggctatggtgcttaaaagcacaagtttgggtgtcgacccctattaggatttgtttattagtctttcgtagttagttagttactacagtttattctattaatactatagatatctattctttctttcttgttctgtttcgggcatatcagttagtttctcaactaactttctattttagtgttaagtcggttgtggctgtgtcctatttattgtcaatattgtcatgtactctttctgttaattcattcactcaattcatattaatgaaatgtgttcttttctctttcgtaatatggtctcagagcaggaaagatagtctttcctgtctgatccttttcttccagctgcgttgtgttcttcttcttccccgacgaagatgtgtcctcttccgctgcactatccttcttctctgtcaagatttcaatcgatt

SEQ ID NO: 78073 - DNA, 1527 bp, Cannabis sativa
  modified_base (1456)..(1462): a, c, t, g, unknown or other
taatcactttgtcaaaaatatatatatatatatttatatataaaattagtggttaattggaattatgaaaaatatgaaatatggaataatgtatgcaattaaagttaaacacatatttattggaaaataggcagtttatatatagtaattaattattaaagatttatgttatacgtgtgtcatacgtatgtgttatgctattaatttttataattattatcggcaacaatggaaattcggtggattgacgaaaaagttacagcagtataattttagcagtttagtggtaccgtagattagtttatgaacacataaaatatttgttagtgtgtgttagtttagaatgacaactatgcctctagtatttttgttatagaatttctaatttaaaggtaaaattagtaatttggttatattaatcaaagataaactttgatttttaagaattagctagaataatagaaaattgaggtaagtaaagtatttaaatgcataaagtattttcagtggcgaatttaagacttaaagtgaggggacataatttttttttaagacagggaggacgacaaaagtaaattaaaactaatattatgtctataaatattattttttattataaatatatgtcataattaattaaatatgtacatttttttttttttttttcaggaggacgactgcctcacctcgcctacatgtgaatctgcccttcatgtcttataatatcgtttaccaagtatactaaaaataatagtatgggtgtatatagagtttacatttaaatactaatatgtagtgatgctaaagggtagtggataatattgattaatgctaaatacaaatgttcagatcttagtatatgcatgtatgatcgcttagttaaatgtcggataattatacatgtttttcttactgaatttgccgactcacacttatttgcatgtctaggtaaaagaaaaacctaagctaagcatcagttagcttggtgaagatatattggatgtctagacttgttgggttacattttttgggaccatcgttgtcatgcttttgtaaatgttgttcacgacacttttgggtactttatgaagtaaaatattttgtaactagatttcggaatcccatattataaatatttaataaaagtgtttgtttatagtaaaattttaattaacacgaaaattttactaaatatacatttaatttcaaaactctttaattaataaagattagcacactaattaaaaaacacgtaacacgccttaaatattaggacattacactaatggttaaataaaaaaaatactattagcgaagaggcccgccactaataataattgaatattaaagagtgcaaaaatttccaagtttttactgaacattaatatcggtatggtattagcggcggactccgttgctattactatatatatatatactagtaaacatcccgcgnnnnnnngcgtatatataaaatattttaaattatatataaaaaaaatgaattgtgtattgtaattaataata

SEQ ID NO: 78074 - DNA, 902 bp, Cannabis sativa
taatgaaatttatcatattcgactcagctctcaatttcagacctttaagaaaatggcaagagttcagtcctgagtgcattagtaaactatttaggcatgaagatctccttaccagacacaagcttagctgacccttgttgtctcttgctaacatttcttttcttggccgcaagaacggttaagtttcttagcatggggaggctactggtacaagtcttttgactgtgtccaacttatcggtgctccaattcaagaccctgtgtgcacatgatagtcgataacactatccctatttcgagtttccaaataccatggaaagcatgcatttgtgcacttttgagtttcttgacctcatcacgctagcttgaatgccatcaaactaactcccacactgctttgagctatgctaccctgtgcgcaacctcatataaaataggcttcaaaccttcctacttcactttgtgtttcgtattgtcatcctcatacaccacattacagatggaattaatataacatattttttttaagaattttaatttttttttttttttgtctaaattacttgttgaaattggtatataaaatcaacttttttccatttataaaaaaaaacataaaagggtactgatgcatgaaaaggttactaattacccattcaaatttactttattttaccaaagcaattagtaacctattctattctaattatttacatctttaaagtaatgtgtaactcatgattattgcttctggtttcgaaaaaatcaccgtgcatcctgaaaaatctaagcataatccaaaaataaataaagatttgaacactttataactcaaccaaaatgtgataacccattcttaagttatttctcatgccgattctttgcatcaagcaatggcagctc

SEQ ID NO: 78075 - DNA, 547 bp, Cannabis sativa
ataaaaacaaatatataaaaatataacaaatttaaaaaatttaattatggtgctaaataactaatggataataaatgcaaaagatatcataaaaataacattagactttttgaaaaaataataaaattttaagtgaaaaatagtagtatgaagatctaaaatattacatgtaaatataaatggtaagaatgattaaaataacttaaatgagtgtgtgaaatgaatttcaattaatataatttaatgagtatcatttataattaatattaaataaaaaattaaaaattaaagttgaaatcaatcacgcattaaaaaagaaaaaataatatataatataaataatgagtgacaaacaaagtaatataattacataataacatcacatataaaaattaattaaatgaaatcctaataaccacataataaaattattaatattatatttataatcacatataacatatcaaattagaaaaactttacaaaaataaaatctatatatatataagagaagtataatacggtgatgtgtcactctcaaatcact

SEQ ID NO: 78076 - DNA, 1003 bp, Cannabis sativa
tgacccgaatatattgtcccctgatacatgtaccagtaaagtaacttttcttgaaaaagaaaaagatctaccacatttctcaataaaagaaaatcattcttgtctcaaagctatcatttgaaacaaatcaagcaagcaacaaagaagtcattatagtatggttaaatatttaggcagatcaaactgtcattttacttatcttagcatggaacatttggcatatttattttcattcaatcaatgaaagtttcctttactcttctcagctgaaaaagatgcaattgacaacaatattcatagggctaagcaatgaaattaatgcatatactatgcaactaagttaatcttctaaataaaatagagagaagagggtttgaaaatatgaatcaaataacttaaaataataaaaaaaaaacaatgataaaaatctgattctaaaaaatgcaaaaaggcagccaacgataccagaacaaatagtaaagttaaaagtattcaaaaattgaaaaacagagttcttttccatgagagaatataaataagtaaatgaaatttgatttgggccatttctatgtcgagataagcttattatgcattatatgtgtgtcactgacatgaacttagtctttatggaatcagaccatacagatgctcaaattttgaaaggcacatttaccatgcagctttcatctaaggtcaaaggctggtgctttacatgttactttgtaaacaatgcaggatttgttatttaaaaaaaaatcttaagaactttggggaacaactttttcaatatatagaattttttttatttttatttttgcttaattggaaagccaaacttccacacaaagaataatcaaagttaagtttcaatggggagagaatctaaacaatgacctagataataatgtcttgacaagcttactatgaccaaggtcaaagttatgtttcaacttccaggtgttatccaaagatctggttgaataatttaatgcaaaatttgagt

SEQ ID NO: 78077 - DNA, 1254 bp, Cannabis sativa
aatagccagtcaaagataccttgagacttttgtaacactcttcaagatcatcattgtacaaaatatgatcaaagatgcctgatgattgaccttgctcaatttcagccttagcatttctgagtctttttagtacctgttcttctgtttcggttcccctgtaaaaccgaaaaatattcaattttggaacaaaagggaaaatttgaggaacaaaacatataagccaaaacaggcagagctcttctaactctaccttgctctaagcctcttctcaagttcctccattgaaggtggacatacaaaaacaaatatagcttcaatagaactagccttaacagatcttgccccttgaacatcaatgtccagaatacatctctacattcaagttttagtcaacaaaaagtcatattcagaataaaagttcaacctttttcaaagcaaataggaaaagggtattagtattagatgtttaacctttccatcatctgctacaacttcaactgcttcaacacttgttccataaagatttccatggacagaagcaaactcaaggaacttcccatcttggatttctttctccataacacttctatctgtgaaatggtagtgaaccccatctttctccatgttccttgaagcacgagttgtatggctaacagagaatccaaacatggatgggaactctttcatgagcatggagataagtgtgcctttaccaactccagaaggaccacttataacaacaggcttctcagctttacccttaacacctttactccaagcaacaacctcagtccccaaaattttcttctgttgcctaacatatggggtatccacctaaccatttgaataaaatggaataacaaatcatatatccatatcaaaaggaagaaaaggggtttggtttgatttaactaaaatatcatatcttcaaagaataccaacctcaagaaaccatgcaaaatcatctggggtggaacatttcttaattcccaaaattctgtcttcattcaaaagcacagttgaaaagcctttactgggttttggcgctgtccccaaaacggtagggtataccctacaaaatatttatcagaaaattagtatcataaacttcagagtacttaaaaagaagctcttttaagtccaaatctctaaaaaaaaaaactcaccattcaccactagattggtcaaatatctgaaccccaatttctaatgttgactcattagaggatccaccaatcaaatactgtttttttt

SEQ ID NO: 78078 - DNA, 506 bp, Cannabis sativa
ttaccgccgccaacgtcgacgatgctgctgatcccatcaaaaacatccgaacaaccttctaatattgcttccactgtgaccctagcattacatgccattgattcgttaaagagctggctgtggtgaggattagcttcacagtagctccacaaatccttgccgtttgccacctcaaatggcgatggcgccaaagaagtaacttcggtcttaactcgggcgcttaggccgtgccatggagccagcatgggagggctgctctccatcaacacgaacgtcgccatgcttttctcgccagaccttaggagaaggcgagaaagagcagtttgcgcgtataaactaggctgctcggagtcttgaacattttcctttctgatctctttgaatagttttcggtttactaaaaacctcatgattcgatgaagggctggagcagcacagcctaaggctgatgataactccaggagagacatggggcgtccatggctttcgatggcgtcagctattcc

SEQ ID NO: 78079 - DNA, 595 bp, Cannabis sativa
tataaaattatcatgtgttgcaaatcataaagctagggcatgcacatatatagtacctaatacaaataaattataggggtttttacacaaatttctattttttcactctttcattgtgggacagaatttttttcaaaaatactgtgaaagttttatactgtgtactgtgttaagttttcacggttgtttttttagttttcccattattattttaattgtttagtttttgttgttttacggttgttttataaaaaacaatatttttaaaaaaaaaaatttaccccacagtaaaattgtaaacttttgccaaaaatccaatatttttgtaaaaacttttaaattatatatataaatgctcaaccttagacatagacgtgataggtctgtgcttatggtccacctaacttaggagtcaaaaaatttatccttttttaaaattatacattttttaccaattatgaaaagtaccatttttcttccaaataagggtctgaattttttttatcttgtaacccactaaattttaagatcggcccactatatatatttatatatatatactagatagatattacgtgtcaagtcacgtatgtta

SEQ ID NO: 78080 - DNA, 1655 bp, Cannabis sativa
ataagacagcattgcatataaatcaagtctaaaattttgaatttgaaatcgagcttaactcaacaatctaattactaacacaatcaacaggaatgacagtgatcatcaataattacacggtgaacaaaattagcaacttacctcagaaatggaattctccaaatcggaatctggatgaggaactctatcgtacgcttcatcaaagactaccgtaagcttttgcatccaataaaagccacaagtgcatgagatgagatgagaatcattgcaaattgaatagtgaatagagagaaaccataaggatcgggagaaaaatgagaggtgatattacctgagacggtgaaagaccggcaggagaagagagaagaaggttgtaagggtgagaagtgatgggggcttcagtgtctgccttctccattgatacggccaccgcagaacaggtgttcgatgaaaagcttccaagaaaaatgttaatcggaaggcgcgagccaaggatgtcgtttaatgtttgagaccgtgtcgtttttgcacatggccaaattataaaaagatgaaaaatgaaaaataccatacaattgtggtttgatgtcgtttaatgttggagacatgtcattttgcataaggccaaattattaaagggaaaattaatgagtaattggctgcaaaaaccccttaactctcaattcacttgtaaataaccatctaatcttatattttagtggaaaaaccctctaaagtggtaaactcatccatttatctcagttaactgctgacatggattgcctacgtgtacattatgtacacatttatattggtccacttaatataattatttaaaaattaaaaaaaaaaactaattcaaaaactaaaaaaaataatctaaatttataaaattattaataaacaaaaaatattttttttctttgattttttattttcccttactttctctctccctctcaacgattgtttcatacctctctcctcaagtttctttcttcctttccagatttgagaagatcccaacattcaacacatttattacttagatggtggtagttcaggcgagatgggaaaaatgaaatggtggctattgttgtgtccatccataggtgggtgagaggaatgaaagagagcaagagagatgaggggagtgctatgcgaatggctgggcatgatggcgttcaggcgagagaaagtggtggagatctggagagctaaacagagttgaagggaaaccgtggctcaggcgagatggggtggtggaggtgaagctcgtcggaaagtgggtcaagcgagatggaatggtaaggatggaagtttgggtggaaaaaaaggaacaaaaggtggctggaatctgggcaaaattgaagtcgattggggcagctatggagattgggtgtggatttctttggatgtctctttttctttgatttgatttttgtcttcttgagattgaatgttttgtttcgggttaaatattatatatggttagaattagattcaaaatttttgatttggattgttttgattctgttatgcattattggattttgttctaggtttttggattttatataaatatggtggtgcatgagaaacttaaatctagaaaaaggaagctcaaatttctcgatgttgatgtttgtgtttca

SEQ ID NO: 78081 - DNA, 779 bp, Cannabis sativa
aagctacccaatgtggcattgttacaagcataaccaacaccagtgttggctatgatgatagtttcgagctgctaatgctgaggccatctgattaaccaatattaatgcaagatattgtcaaaacaatctgaaaccatgtacaaaatccaaaagagatttcaagtgttgagaagaaaatttaaacataaaagtcagttatttgggtctaatcaaattgaatagtatgttatggccgatactcctacttctagaaaagttattgggatctttagagtccaatatggtagagcatatgcccaagcaaaatagatctaaaagactataaactctctttcaaattaaattaatttatatttaacaaatttaaattataaaatactattaaaataattaagtacttaataaaatcgagagcataaataataaaatgattctatttctaattttttagttttttttcgttaaaactaggctaaaaataaaataccatattggagatattctaaaacactggaagcttaacaatattttatgtctaatatatagtattgatttagtatttttgttaggttaatattgttatttgtttgtaatttaaaattgaatttcacttattttactttaattaaaattataaaaattactaactaattataggacgtgactttataataatattaaataccttgttctctagtaacaatgctcgtataattaataactatggacaattgcttctcttaaacagtcattcttatgatatgttccattgtatctca

SEQ ID NO: 78082 - DNA, 1309 bp, Cannabis sativa
taatttttagaaaataaattttgaaaagaatcatcaacaagcttattaaaaaaaataatttttgaaagtaacatattaaaaaaaatatttttaaaagaatataaaaaaataaaaaaaatactaattaagtaatttttttttttgaatcatactaattaagtaatttaagtgtactaaaaaataaaataaaataactattaaatttagttttttaaaaaaataaaaattaaaaaaagaagaagaagaagaagaagaatataacaatagtgtaaagataaaaaaaaggtgtaaaaatactataagctaggttccactattgctatcatgtttccttaactttttattaccattagatcaataatcaagggttagaaaagtatccctaccatagggacaaaaccaaggtctctaccatagacatttcttatatagatataaagaaaattgaaaaattataatttatatttataaatctaataaaaaattaaaagtgaaagaattaaggaaagaattagatagatataccataaactgtcatatactaaactactactttttagtgtgtttacgtattcgagatttcgtaaaggaagttcaagttgaattgtcaaggtcaggtgtcaactcttttggtttggcagactataataatgctcagtgacatatttgaattcattactcctattggtgctattagggttagatatgtttgaaaaatttataaaaggcaataataaagctattttaaggagaatttgtagtaaaataaaaaaaaaaaaatcaaaaaagtgagaaaattaagaataaaatttaaagaataaaaaaaattttaaaaatgagagaattaaagaatcaaaaaataagagaattaagaaaaaaagaaataagattaattagagagattttagagtgacatgttactcactcaacactctcattattgtatcttatttatagtcgctgttacattcaaagttgttgtcatcaccatatttttatgtttagtggtcactatctttatatacacaaaacaaatcaaacaataaattaactatattcactttcgtacctaagtaaatcttcaatttctttcaaagaaatctttttttttaataaaaaattatcatacaatttttcactaaaaaaacaaataaaaagatatctttaaatgctatagtgaagaaaattttagaaattgaagaatcctcatataaaatagcaatataataaggaaaaaagataattgataaatcttaagaaaattctgatttcaaaaccagtgtgattaccatatctcagttgtagtcgt

SEQ ID NO: 78083 - DNA, 607 bp, Cannabis sativa
agatagtttgagtagtttgcagttgcagaccaatctcagcaatgagagcttgagtccaagttatttctgcagcagtatgagcaaggctgcgattaggggtgtacatcggtcagtttggttaggttatagtgtatttttaccaatccaatataattgttgggttgcaaatatctaattggaatccgtctaatgaaaaaaataaaaaaagtgcaacccgtccaataattttcgtcggtttggtcgggttaacccgtttaaactgatctttatttattttttttattattgttagtttttagtgttcaaataattgatttgaaaaaataaatgtatagtatacgtctttcaagattaaaatagttattttaaattaatgttaaaaaataaatataaattgaataaacattaaagtattaaacaatatttttttacaaaataaaattaaaaattatactcatatgtaaattctaagtttcaacttcaatattcgaataccgtcaaaattattaattataaattctaaatttaaaatgaaacactataaaatacaaactttaaatataaaatagtttaactattaaatgcaatttatatattatattataga

SEQ ID NO: 78084 - DNA, 747 bp, Cannabis sativa
gattctagccaactctagttgtctgcctccccaaccccctacaacatatccagtttcactaatcaaccatgtaccaacatagctactgcatctcttcatcagaaccatattttttctgtctgtgtaaattgtaataaatctgtcaatgagtatgagttgtggcataaaatttaaatgtataaaaatgttaaattacataaaaattaaatattacacattatttaatattcaatatgttaattattatacaaaacataactgaaaaaattataaaaataaaaatacaaatacatattataaaatataaaatgttaatgaaaagatagctaatatacaaacacttactgtaaatgtatatttatttaactttttaatttaatttttatctatgcttattatatataatttaattatattaataataaaataatatatatgaaaaaagtaaaattagatttttaataaaaattatgttaaaacacaaaattttaaagttaaaaaaaaatataagaagcccatatggagtcggttatttcataataaccgacgttataaagtccttatttttaacccctacaacgtcgtcgaaaaaagtgtcggtagcaaatttcgttaaaattgatgctgaaagaccttaaaactcgtctctaaagtccaattttatagtagtgcttatagctggaagcctgaaatgtcatatgagtaatcagaaggttattatggcagggtgcttgtagttgtaggttt

SEQ ID NO: 78085 - DNA, 2929 bp, Cannabis sativa
atatagattaaacaaagagtaaacatattttaacaattcgtttatcatttcggtagcactaaaaatttaagagttggacttctaattcacaagtgatttagatcaaatagttaaatcttgtcaaaaaaaaaaaaaaagttaaatcctaataattcacttataaattaaaatatgtaataaatattgttatctcaattttcgcacagagtgacgtggcattaagtaggatgacatatgaaaactatttcaagacctggacggatcatatttctctaatgttccgtccagaatggcttatgctcaaaaataagtttaagtctccaccaagcaatatccggacaagaccactgcgtgatgctccaagcagaacgtctccagactccagccagtgaggcaaaattctccactcagaaggacgctctgaatataaattctctaagatatttttcttaagtatctccacatttgtaatatggttaaatctctacatttatgggatcaattttgtacaaccaagagattttagggattcaatatttagtttcctaattatttcatattattttggataacactattcattgtaatcccctataaatagtggagttatttcattgttaaagaatctaaatgcatattttcaagagaacatttatgttatcaaaatacttgtacactttcattcaagatttttaagaaactcacttggccgactccttgtgatcttgataatcttcaaagtaatacaacaaaaaggagagtaggatattaccaccataacagggttgaacctttataaattctggtgttcatattgcgtattattattttttttattatttattatgaagcataatcccatcactttaaagactcagtgtggttgctaaaagtgaggtcaatattttggtacttttattgtgagaaaaaaaaaatatgattccatcaacctctgattgtcttcagttcgacaagagacggtactgacgagaaggtctcaatccactaaatcaactgatttgatggtaacgaatcccaattcaagctcacactaatcaaagtgattcaatggtgattgatccttatccaaacactcgactgcctccacaagttctcccaccagcaaggcatagagtgacaacccctctagttagatttactcttagcacataggagattggaaatactagttaggtatacactggagaaattagaccctaattttttgtctcagtggaataggtgtcattctatgaaccgacactataggtataagtgtcagtttaaaattgacaccagaagtaatgtttgtaatagtgcattgcttagaaataggttgatcaaaagcaagcatatctatttctaaaagatcatttattttacaggtgctcaatgaaattggttctctaagagtcaatttgtatccacgccaatagaagccaatctatctatcaacaaagatattagagcccctgttttagatcctacttcgtacagaaacctcattggaaaacttctatatttgaccatcaccagacctaacatctcctatgtagttaatcgactcagtcaatacctcagtgatcctcgacaacctcacatgaaggttgctgccagaatccttcaacacctcaagggtaccccaggccaaggtccattcttccattcccaatattcatctcgatttttcatctccaagccttctcgaatgttaactgggcaacttatccagacaccaaacgatccatcactaggttttgtatcttcctagaaaactcccccatatcatgaaaattaaagaagcaaaccactatatccaaatcatttgcagaggctgactatagattcatggccaacacaacctaagagcacctctagttacttaacattcttttttattttggcataaagcatcatcaacttgctacactctattgtgataatcaagttgcaattcagatctttgaaaatgttgtattttatgagcgtaccaaacatgttgacatcgactgccacataatttgagaacaagtcaccgaaaattgtctcaagctctctcatgtcccttcttgacacaacattccacattatgaccaaggttctcttcctaactcaatttaatttttttcactgtccaagataagcgtcactaatctatatacttcatcttaagagagagtattaaagtctatattagagttagttataatttgttagttagacatttggctctttatgttatttttccaatgaccttagctgcgttgcttgatctcttttgcaataacattttggttcaaatcttgtgtatatattcagttcccatatcaataataattttaaacttttgatcactaacattttgtaatgatttaggttccttgttggaagatattaataatttactcttcaatctttttgaagtgtccttaatttatattctgatcactcacggctaatatggccactcaacaattagttatatatggattgtgaaatatttttttttttatcaagaagaagaaaacttcattacaaaatttaattggatgattttttaacctttttaagatgtctaattattttcaataaaaaaaaaagtaattgtgaaaataataataattaataaaatactaacttaaaataaagtacaatttttaacacaattattattacataaatttaatgcatctttttttttgttaaagtctcttaatatctgaaaaataatcccataaatttgaaggtataatttccacaatagttataataaattgtaggtctactttgtctcctactctcctagtcccgtttttaacaaaagtattgctttttccaaatcttattgggaaatttgattttttatgcttacatttggttaaaattttttttctaaacaaataataattaatatttgtaaaatatgaca

SEQ ID NO: 78086 - DNA, 555 bp, Cannabis sativa
gtgtttatataaatatatatatgttaattattaatttgtacttacttgaagaaggaaataaactacaactagctagaatcagatatataataataataaggcttatatatagatatgatgatgagtaaaaatgttaataataatataaggcatagaattatatatgtataaagatatatacttacaaagcttgttcaaggttagctatgagttgagttgagtccctaaaatacatggccatgatgtcctctgcaaagttgggattgtttttatcttccaattgctccactattaggtagtgttcatcaagcattttctgcaatttcaaccaccctacctccccaattattcaatattatataatctttttttatatgtaaataaaaattaataattactacacattatatatattgaaaaactcaattcaaaatacttaacaatttcattttttttattattgttatttctcttccgatgttaattttgaattgaataaaataaaaaaaaattcttgaaattccactccagtattgaaagataattaaccagctg

SEQ ID NO: 78087 - DNA, 3187 bp, Cannabis sativa
attacctttataaatgggcaactctacctcaacgttgctttgaaactcacacttgttttttttttttgttaattttggttggactaggaataatatttttttgtcaagataaacattggctttctttgagattttttcaaaatgaaatagggcatagaaggatacgcttttcctatggtttagggtttacttttaggcatgaggctcttacattaattgccgagttgcttagtcttttgtctgtataccaatttgtatctcagctaagtttctgtatctttcttgtactaaaggaacttaatgatatgtgctaaccctctaggtattcattaagttgctttttgttttaacatccagatgtggagccacagtattcaggtgcacggatagaaggagatactattacgatggaatttgtaaagaaaatgatggaggattttaagaatcaaaagtgtttacacaaacggtacaatgatagacatcattcagagtgttattcataacttgacatcatcattgttttctaatttggttttcatattgcagatatgcattccaaatcgtattacaaacaagagaaatgttgcaggccctgccttctttagttgatgtaactgttccagagggcaatcactttactgtttgtggtgatgtgcatggtcaggtaacttgtttgtctcttctcactggtactacacaatatgacatattagacccaacactgaacgaatgaagttgagagaacaaatgaagtttattaaacacaagcctagtaaattaatagtgatggaggtatggttgaactttcatagtgagattaaatggtggttgtttagtatggtctatatcaaatcagtcaatgttaatggtctaaaattgtatgactttcatttcagttcataccttgtcatataaccattatcccttgttttcaatgtttgactgtcttctattacttgtctaaaagacagcactttgatggcctttgattagtttttctcccttctgtatttcatatcctgaatgatggtttcaattcatatactaataatgctttcaaaattttctgttcatgtccatgaccgcatcttgtagccacgtcgttattgggttacaatttcttaattttcttttattttccctgtgatgcagttctatgacctcttaaatatttttgagcttaacgggcttccttcagatgataatccctatttattcaatggtgattttgtggatagaggatcgttttctttggaggtcatcctcacactgtttgcattcaagtgcatgtctccatcaggtaaaccatctgtaatttgcaattggtttactgccatttttgtttagttttatttaggagtatcatctgtgtcttgatgttgtgctatcatgggctgattgtggtagcaagtagcaaataaaaagctcgcgagtgtttcaggagcttcttgctttttttaatttatgaattcatattagtaacttttcttttggttttgtttatttatttcaaaaagaagttatgtacttgtaaattttaatagattgtttgtgcactattcatgtctaattagctgttttattaacatatttgtatattttcagccatgtaccttgcaaggggaaatcatgagagcaaaagcatgaacaagatatatggttttgaaggagaagttcgctccaagttgaatgaaacatttgtggaactatttgcagaagttttttgctgcttacctctggctcatgtaatcaatcagaaggtctttattgttcatgggggtctttttagtgttgatggagtgaaactttctgacattagagctattgaccgcttctgtgaacctcccgaggaaggtttaaattataacttttgtcatgtcatcattggcaagctacacatccaaatatgatgcagtagacattctgtgaattgctctatggatttatgcttgttcattttcatttacttattttccttttgatagggttgatgtgtgaattgctgtggagtgatccacaaccttcactgggaagaggacctagcaaacgtggtgttggcctttcttttggtggtgatgtgacgaaaagatttttgcaggaaaacaatctaggtatgtttcatgctgtttccttatagtcttgctccatagtcagtaaactcacatgcttgatccaatgacagatttagttgtgcgctctcatgaagtaaaggatgaagggtatgagattgagcatgacggtaaactaattactgtattttctgcaccaaactactgtgatcaggtaatgctattttgtcaagtgttttagattccactataatgtcccaaggagtggttaagcatttttttttttaaaaataaacgagtggttaagcatttttgaacctttgcagtatgtactgttttgcttttgtcaatgactcgatgaatcttcactttgacatgacatacccaaattatttctgaacattacataggctggctcattcaatcaggatgagtcaccagttgttgaatctttgttaaaaatcaggaaatcttgtactggtttttctgctttgttttcttgattgtagatgctaacagtttgtgcatgaatcttttttatttattttgctaattgatacaatgcaccacataatatttgtatagtaaagatgatttaatagtattctcctttacataatagctctgttaagatggccatgtcctgctttaatgccatatgcagggtcatagcttccttacattgcatatcaacctgcattgctatatatattgcgttttctgattggtatttggatgtgctctgaatctgaaatatttcatgattctgtctatcatgcatcggtttattccttgtgatatgaaaggtggactgtggccaaaattaatcgatatattgaagatcaaatatatgatcattttggtgtttttgatgtcttgtattctagaattagagcaatgaaatctattcagtaattcaagtacattgtgggcttgaaatgccttgcctgcttagtttacatttgatggcttttttgcagatgggcaataaaggtgcttttataagattcgaagcacctgaactaaaaccaaacattgttacattctcagcagtggtaagttgtttctgccttctgctacaaaacaatgctttcatatttaatgcttattcatccatt

SEQ ID NO: 78088 - DNA, 971 bp, Cannabis sativa
  modified_base (136)..(140): a, c, t, g, unknown or other
gtgctgatgcaataacttcagttcttgaggatgctttattcttccatacaacaagatttcgggctttccaaattgcccaacatagcatagcagcccgtgatgcaatgttaagttaaaaaaaattaatttaattttnnnnnacatgaaattaaaaatattttaatttttaaaatttttattatacatataacaaattatatatacataaatatataaaagttttttaatggagcttaaatctattatttttctctacagttccagcttcaataatagtaaaacgggtcacagtgggtcgacacgaacacgacacaattttttaccggtcgggttagggttgagataattagacacaagtcaaaaaacgggtcgacacgcttgacacaaaatataacagtaggtcacataaaatatgatacgaatatgacatgatgacacgttttgccacctctagttaaaagtaaacatttgtattgcaattaatgttttttttaaaaactgttttggaattaatttgttaaacaacaataattatttttaatcattggtaaattttaattattttttaatagtttagaaaataaggttcaaaaggcacctgattatttttaggctaatttgaatttttactccctgaactttgacatataccaaatcatgccccctaaacttttcaggtcgttaacaattccccccaaactattgagattgttagattcccaagttgacattctaactagggttttggtttatgggtctgtcttagagcaaatggctcaaacatttgtactgcgacaaattagacatgtcacaaacatatttgaggaaacaaaatcaaaatcggagcacttttagttttaagcactcgaggccccaggttccttaggcacccaatgcctaagttaacatattttcaacctagggcgcttccaaccataatgtcgaagaagtatttcgatctttttcttcgt

SEQ ID NO: 78089 - DNA, 674 bp, Cannabis sativa
ttttactgattttaaaaaatattacatttttcatatataagggttcaaaaataattttttcctatggcccttaaatttcaaagcaggccctaattctagtgcttttggtggcactttttcatgaggtgccccaactattgtttgttgtggtggtgatggttccttggtgggtttggtttggtagaaattttgtgttgtttggcgaggttcagttgagattggaggtggtcttggagttggctcaacatgctcttggtgagtttagggagcttcgggagggtggttcggtggtctccaccactagcggggtgtttctgtttgtccactaatgcttcggtggttctggataagggtttgaagggtttgtggagttagtgcatgatggggagggggtggtgtgggcttgttgggcttaggggtggtgggggacatccatgtgagtgtggatgagttacttgtgattaaacatgaccttctcttttctatgagatttggtttctctatttcgagtattgaatgtgcctctatgatagttgtggattgggtgaattatcctcattctaatgttgtttttcattctattattttagatgtgatttctttgataataattgttggcggtgcttgtgaatggtgttgcctacgcagtgactacttttattaagaataatgat

SEQ ID NO: 78090 - DNA, 1136 bp, Cannabis sativa
cacaagtgattattttcatcgtaatagaactccacttttgactcaaattgaataaaaataccaacctactaatgaagataaaagaagcacaaagctactcatgaggaagatttttatgaagatgaaaagaaacaccagtcttctaatgaagatcaaatgcagtagaaaagttggagccaatacaagtattacaatttatgtgctcctctcctaaataggcttacacttttgaaaattctattactattaaagatgcaatgtatatgtaaataggtcataactttgcaagtttttctcttggtggaacacttacaataggcttccacttttgacaataggccaccttggaacatgtaaaacatgcaagttatactttttaaagttatgtaaaaatggaatggatatgtaagtaggctacaattttgaaacacttctaaataggcttatacttttgaaagtttcattactactaaagatgaaaaaagtatgtaaataggcaacaatatgaaagtcactatcttgctggaacacttgaaactttgtcactttaaattattataatgtgtgttttatatgatatatgctatccacgtgctatcattactagtatttatataaatatatgagaatgtaaaatataaagtatatatgagaagacaatagttctccatcagtatttagtgaaatttggtatatataagataaacatataggtttctctcaagataacatcgtccaaattgttaagtccctttctacaaaaatattaaagtagcttggtgatatttttatttttaaaaattttaattataaaataaaagcaaaatttttgtttttaaaattttaattttgaaaaataaaaatatattttataactacttttattttttaattttaaaacaagaaaataaattttttttctgtaaatattatttttattttaatttgttgattttatttaagttagatttgggtctgaagcgccgcggggatgggcgatcagatccgaatctggtgttagggctaggatctattcaggtttcaaggtctagtttggagtgagagttcaaaatattaattatgaaaaataattatttaataaaatttagaaagtgatttttttttattttcaaaat

SEQ ID NO: 78091 - DNA, 770 bp, Cannabis sativa
tactgaagttttagaattatcacttaagtattattaccgccaaaaaatcaaatttaattatttatttacaactaagagttaaacataggtatttatgccacaaattactctctacaataacaaaaatctagtaagtagcttgtggttataagcatagtttagtagtttcatacttctcacaaagaggaagtccctgttcaaattccccccttaatgtcttaatgtgtaaggaaaaaaaaaaaaaaaaaactattgagtagcattatactaccataaatttccaagctgtgtatatagatggaccataaatttcttttattccaaatctatttcataaatacatataagaaattaaagtgcaatagtctttatcaaaaaaatagtactttcaatttcatggcctccattacttaatctagaggtcatcacttaaacactttaaaaagatatcatttatttaaacaacgaaatatagatgaagtcaatgattcatattaatgatgataaaggaaaaaaaccaaaacaaaacagtttgaacttaatttattccttctgaaactaatattatatatactgtattaataatatgagatattggcggttaaaccatctgaactttatggtttgtaacagttaactacaaaaattaaaattttggcagcataattacttaaatcctagttccgttttgttctatacccctgtccaaaaatcacagttaagtgccacggtagactgtccacgtgtacacacttgtacacgtggcaaat

SEQ ID NO: 78092 - DNA, 631 bp, Cannabis sativa
ttaggaggaaaaattactaattagcctaaacatatatttaatatagtgtaaaaagtgatatttttatatattttttttattaagttgctaaattaaatataaaaattcaaaattttcttttattttttattattggatcaaaatctaataatctaatattttttaaaattaatatttatagttaaattgtttaataattatcaattagtaatacccattaaaaaatattccatcaataaatttcttcttagcttaaataatactttaaactatgtatatattttaatatatatgagaattaacccgccaaagatatttgtttattattaggttggtgatcaatatttgtttatctcctattaattaattacttctcacaatttttttacaagcttagattagagttatactgtcaaacaccatattaaataaatatatcctacaatttaatatcaaaatttaattaataaataacattgagtatatcataaacacttattatatatatatatatatatatatatatataatattaagtaccttaaagtgtcattcgtatatctttctaccaaatattagcctcatgtagaggtagccaccatataaattacttcaaatgatccccatatgt

SEQ ID NO: 78093 - DNA, 3366 bp, Cannabis sativa
  modified_base (1255)..(1255): a, c, t, g, unknown or other
  modified_base (1529)..(1534): a, c, t, g, unknown or other
tgctaacccacacaatatacaattagatatttataggcttttgcaaattaattttcatagtctaacacttactcgtcagttactagcacagatcctcgtcaccacaatcgtttcccaacttatttacttttggcctaatgtttggtggatgaagcaaaattcaatttatttttggtgaaacaaataagctataaattatcaggttgattgaaacttcaatggctacattacttattttttctccatcttttttaagttgaactgaggggatcaatatttgcttaatttgcaagggatttccatctaattttggtttaaattatatagaagaattattgtttatgttaacttttgaagagtataggtcatgcaatctaagtgttttattagagaacattatttcacatagattaaaatattgagtcatatataagaacatgagctactccactcatcaccaattagttttgagatgaaaccccatatttcttgacatggtattagagccttatctatagcgagcttttgatccacacttatccagatggttagttagccgcatgagatctagatggtgcaaagacgcttgagatccaaacaaaaataaagcgagtaaaatggcacaacttgtgataaggtgattcaagattggtgagcaaaaatagctaccatcttgaagggaatattggataacattgtcccacatggattaaatataaaaatattgagttatatataagaacatggactactctactcatcaccaatttcttttgagatggaaccctatatttcttgatatgcttggatcaatgtctcaatggaaaaatactcaacataatagacttagatacgattcattagttaagtgaaatattgtttgatttttacatatactctacatgaatacttattattgactattaggtataaattcattatgttttaatatgttttatataggctatgtagtcaatgttaatgttaaggcatacaaggtaggtaaaaaagtaaaaaagtatattctctagtgtacaaacttaatctcattcttttttgtaagtaaaaaagtattcatgatagtattgttgaaattctataaatgctacatacttcaactaatactacttttacgagacagaatgtgtcaaggtgactctagctacaaatgtactctactgacttttcttataactagtttgaggttcatatcttttcatattgctctaggactaaggtggcgtttggttggagntaatgaaatggaatggaatggaatggaaggaaacaattttcatttcattcctttgtttggttgcattttaaagtattggaatgacattctaatggaatgctctttccaccattttggtggaatggctattccattttaaaaaggaagaaatgaccattccaatgtaacaagaaaaaaaaaaattaattatttttttattaattttttaatgcattttaaattttattccattcctatttttattcccatttccattcctattcctatattttcnnnnnncccaaccaaacgcctcctaagtgcatattaaacatagtctaccactttgcccaaaaatagcacaagcacccttgtatttttgacttggtgattttgatttcgtgatgtataaccatgtttgcagtttaattctcataatccatttctcccctctcaagatggtctggactttgagtccagacttccaagtattggatccatcaaccatataatccatctgtgttggtatctagtggcacaaaagaatctggtaccttaacttttttattcacttatatgctatatgttattaaccaggcaatttgatttacagtatagtcagcatactgataagattagtgattcagtatgtttatttgttattgtttactattttcttggagaaacaatattgtaattgttaatttatctaatgcttaaaaaaaattggtctatgtgctcgcgtttttattgagttgcaatgcaatagcagcttctgaatctgatgtacttgagttgagttgtatacattaacacagatcaaaataatatttcatgttatttgtatgtgtatgtgtgagaatgtttagtaaaagtttctatatagtggtcaattgagtgaaatttattgataaaagatggttagtatgtgtttatttttgtacagaatttatagtgtaactcatgtttaatatgatagaaaaaattagagtgtttaacaaccttattatgtatctaatttttgatgattattgattccaccttttgaaaatttggttttatgctttgggcagtgtgaattatttaaaaaaaaatttaaaaaattgcaaacgttctaattactgactctatattgtatcaaataatattttaaatcctaaaaaacatttattttaaatattactgaaaaatctaaataaaaatcattaaatacaatgaaaatgaaacaaaaacctaaaccaacccaataccaaagactaaacagtacgtctttgctttttggagttgtggcatttgatcaatccatacttaatgacacaccaaattttgagtcaagctaagatgaagaaaaggcctatctccttaaatgtgggtgctaaaccttcttgccattgatgaacataaaaacagaacgaataaaatggaaaggaagaagaagaagaaagagagaaagattgaagatagtaaagattatcttcattcattcaatgaatagttgagtttatatacagtggacactaatcatagcagaatccaactaactctactaacatactagctgagtaggactaaccaacaacaattagagctaacaattttaactaactctcagctcttacaatgggtactaaaactagagtgttagattactgagagtacttttttcatgatgcatgatcatgtcatacaactagttaaacttcccactcaaaatttcttattctataatcaaactctcctccttaaattaggagtgtttattagctcacattaaatgattttcaatctatctagattggatctaagtgtagattggatattggattttactaattgattcaatctaattaatttcaatcatcgaacagatccaaactaatatgagattagatcagttctatctattaaatatattttatatatgtataaattaattagattggttcagatttatctaatgttttagatttaatattaattggattggggtaaaaaatatatattaaaaatctaattttaatttttacatatacatataggggtgtgcagaaagtcatttgatccaatccaaccgaccgatccaatctcaatcgatccaatagaatcgaatatctaatcataattggatcgga

SEQ ID NO: 78094 - DNA, 1185 bp, Cannabis sativa
gcgccatcaccgatgctttccagatagattgatgacaacgaaattttatcctgagctttattccagtgatcaagagctacttgtgcagaagtaaacacgtcatcaatattgattaatttagtttcaaatttaagacgattttgcatatgagatcattttataaaattacaaaaatgaaacaatcatgtaataatgtaatagctatgaccaatgccagtatgctttttcctctaattgagaaagtgatttcaactttcataatcatctctctcttactataaataataacataagaaattctttcgtaactacttttttcttggttcaatgaatcagatccacattaagatattaaatttgtatgtatcttatgtatgtattacattgttaggatgattatccattgtttctggagaacgtaccttggtagatgagtcgtaatattttccagtattacaagaaattgtaaatccaaaatatgactattcacaaaatataggtaagggaggtaagggaaatgaattatcgaaattttggtggtgacacaacacaacacctctaacctatgatttagtataaagaattgaatgcacatacctaattattggacttgagtaagtttttattgaaaacttcgtggtacaattataaacggtgaatatataattagtacatgtatatttatatttcattattaaaatcagtttatggggtatacataaattagaagttgggcctctgacttatataaggtaggtacagtcttctaccctcatttgctatgggaaaaggaagaatctttaccctattttcagacctttttttttttcattattattattattttctttgcatacacgatgaaggtgaaacagcagcagcaatttatgtaagcctaatcattttgaagaattaaataatggtgaagaggtttctgtacaatcagtaactttttagcttttctttttctctgctacaattaaataaatgctctaaactgcaaaagcttcatcctttctctctctctccctctcacacacacacatccttacaaaagctcttccatggagtttggggcacactgctactgctactctgtttaacgctctcctctattattggtcccctctcaacatcattaccggaataccactgttctacttctactatataccttgcccaagt

SEQ ID NO: 78095 - DNA, 952 bp, Cannabis sativa
gatcgtttgtggaaataatttagcacttaactaattagaaagacttttcttcgacatagtatatacataattcaattagattattatcataaacagaataaggaatattaatcactacacataatgctggtctaaagaagaagaatttttttgacaaagctaatggataaattagcagttgaggtgtttgcatttctgctcttctcaactttggtcatttcagactcaaacaaccatccagacagtaagtatatatacaatatatatagggaaattataaggtagggatgcttttttttaccttatgctatagggaagcaaattgaactaatcaaacattatagaaaatagagtatacagaattttttgtgaaacaaatgtaggagattttttcattaattgatattttactttatttattttatttaattaatgtttaattccactgtacagtgaatgctttgattggaataaataaatgaatttaactagttaaactggtttttgctagctctttgtttgccactttgcctcacttactcaagacataagagcgatatcatagattaatttatgagacatatttatcaaaattaagatctttattttctatcttcatcaccatcactgtaataattaaaaatcgttttggacaaacactcacaggtatttgatgaaataaattcatttattctatcaactttatgctatataaaaataaaaataaataaatagatttcatcatgtagcaaaagtcctatactgtgaagcaaaaatattttatgagtacagaaacagagcatcaatggaaatttatggggatcaaaggaattgagacttagaaaatatgaaaagaaaatttatttctggcagagattgatcttttatttctgggagagattgaacacgatcaaattaacttttaaaaaataatgataatttaaattaaaaa

SEQ ID NO: 78096 - DNA, 816 bp, Cannabis sativa
cagataacattttctcctgcgttgagcagagaatttcgtccttacaaaccagacccagctccattacttcacatatgctcagtttgggatgttcaacctgatgaagtgataatggttggtgatagtcttaaagatgatgtatgtaatctaatcttatctggtctcaacaaattattcctcttttgtcattatcattcttgatatgttaagtatgcaacatgatggtaatgaagtgaagtgtcattttaactgtgaaatgtgaaagaatgaataattagattaacagaaaccactaaaagggacatgtttcttacagttctgggaataaaaaccatcacataatatagtgggaatgagtaggatatggaatttggggagaagaaagccttacctgctatatttatagatattaatatgctttctcattatgcagaaggatgttaattagtactggatgttttcccattctgtcattaattcatttgattacatatacagaaatcactgactgagttgagtgaatagttaaaccatggtatgaaaaagattctcagtttagaaaaagaagaaaaaagaaaattgcgcccaccgtggggctcgaacccacgaccacaaggttaagagccttgcgctctaccaactgagctagacgggctagttgttctcttatggcagagttccttttgtcaatgcaataagatttttaatcctttaattacatataaagaaatcactgactgaattgagtgaatatttagaccaaggtatgaaagagattcccactttcccagttgagaaagaaaaaaaaaaaaaaaa

SEQ ID NO: 78097 - DNA, 625 bp, Cannabis sativa
caaaactgaatgtcgagtgtggtggtcaagttcatgaaagcttctaatgtttgattcttgtttaaaacttatattattaatgatattttatttacttctattgatcatttgttcgggaagtatttattgtattgtcctaaaatataatatagttaatgtggtttttggagtttatttcaaaaaaaaaaaaaaaaaaaagaaaaaaagttgtgcatcacgcatgatgctaacttacttattaaattaatttatataacaaataatgaatattatcttctttgtatacaataacaggacgttgatcaattccatattcatagtacgtaagagaatacgaaataagggttgacaaagggaataattaaaaaaatttactgccaccccacatatataattatatataataatgtacataatcaaagataaacatgtatatagatgaaatgaaattgaaagtgaaaggatagttgacattaatatattctaaagtgaaaggatactcttcatatatatatatatatatataagatataattgtaatgataatataagataatttagcttgctgtaataattaaacataaaataatataattctctctatgactaatttaattaattaatg

SEQ ID NO: 78098 - DNA, 607 bp, Cannabis sativa
gagtgtagatgggtttagtgcttggagttgggcccacatctcctgcggaacccatctgttgatgtgaacttacttcgccaacatttgtacaacaatgatcgtgtggtatgccatctcctccatttattctttttcctctgatttcttttctgccaataacttctcgtcttcaaggactttggacactttctgatgtactaagattccttttagactttttctccatagtgcaaagtctccagttccattgaacttctccaattcaaatcttgccattgatgacattcaaaatttcttcaagaattgtaacagattgaatcttaattctacgttcttgatcgattaccaagctctgatttgtaaaaaaattaagactaatagtgcaaaatcaaatcaatgaaactctaaacaatcaaacgattagtaatgacaagattaacaaatcgagaacaataatcgacagtataacatgggcaaatagagtatataaaattagaaacaataaatgcagaaattaattaaagaaatcaacaccaagatatatattggttcaagtctgatagatcgatgtgatctacggctgtactccagttctgaaacaccacca

SEQ ID NO: 78099 - DNA, 1522 bp, Cannabis sativa
gcatggacgaggccatgaagagtcggagagatctggcggctgagaggaaggcgtttcgggaggaagcccaacagcgagaggctcaggcggagaggaggcattagaaggcgttgcaggccaaggtagaggagttgaagacccttgatgaggccgtggctaaggcgagtcgcgagctgagggaggccaaggaggcagttgaagatctgattgctaggctgcagtccatggaggaactgcattaggctgatttgcagtcgacagccaacttggccgttgaggtgaaggagctcagcgatctcaaagatcaggccctaaagaaggcaaaaagggatgagctcctggcccctgttgtctacaagcattgcaccaagcgctttgatgatggcgtatttatggcctggcagactaatggccaaaacctcaagctcgacttctatccaaagcctgaggaggttctcgttcgcttctgggagaagaagaagagacttgatgccctgctggaggagcgcagggggcctcgtcttccaacccgcatcgattaagtcaactgttaaccactactgctattatcactatctcttctttttcttctttattttatttacatttacagtcctttttcccctccctaagacaatttatattttttcttaaggggagagaatttaaggcccgtccccaggcccttaatatttttttagagctttttgcagggtttgaacactttatatttatgcttaaatacatactttgctttttaactttgttaaaattttggcctgttttacatttgtccgcgaattatgccttactaccccctgggtgtcatgaaaattgtttttagggcactcagctttacaaatattaatttagaggttgcacatacttgtccggtacaaatttactttacagagtataagtttatatttttcgactattggtaatacttttggaagtcatcagcgttccaggccctaggcatcatggttctgtccaatcttttgagcttgtaagtcccggagccgatttcgtcctctatttcgtatggtctttcccaattaggtccaagtacccccactccgggttcctgagtggttgggaagactcgtcttaggaccaaatcaccaatagtaaattttctatttttaacctttgagttgaagtgtttagccaccttcttttgataagctgccattcgtatttgagactcatcctggagttcgtcaatctgacccaatgcttcttgtaataaagccttgtttgttgttggatcgtaagttgttctcctgtgggatgggaatagcgtttccaccgagaccattgcctcaccgccgtatgccattgaaaatggcgagtggccggttgtggttcttggggttgtccggtaggcccataacactcttggcaattattgaggccaattattgttccaggccagcaacattttctttagggtgacttttaggattttattgaccgcttctgcttgttcgtttgtttgtggccttgccaccgcggagaa

SEQ ID NO: 78100 - DNA, 5332 bp, Cannabis sativa
taatctggattacattgaaatgggattttatttaaggcataaaacccaacagactcatggactaaggctcattgatgccccaaccatgtaaaaagtattcacatttaatctattctaatcatttaaacaattctcattcattagttataaaaaaatctcggtcaataattagtaatatatttttttttattattgttattatatatattttggtgaatagtatatgtattttttgttttgccatatattattttttttaaataatatttaagttttactttcttttgtacttttgttgatgtgatatataattttattaatatgctatatgtttttatatttatttgttgttattatattttctttctattgtaaggtatatatttttttattatgtgatatatatgttttattgtatagtgtatcattttattttagattaatcatgtttagtttttattttattatatgtaaaggtgatatataattttgtaagtatggtataattcttattgtaaagactacataactttaatatgatggattatcagattattaaggtttaattatgaaattagttattaaccatgatttatgcatttatggagatttatttgaattcggattgtgctatttatgatatgcatgaaatttcttattttttgtatttgtgcctggtaatagtggaatgcgacgtagggccattaaagagtcacgttttcatatggtatagaattttattagtagcagggcaacatggttaggcattggaagtgtcgggaatagtcgggattttaaaaataaccaaattaccaataagtgttaaatatgcttttggtttgtgttaagggacaaaatgatcattttgtttaggaatcttttttgtccttttgtggactttagtgatctaattttgataaactaagtttgataatagattaattaatattaatatttatagtgtaaaacctagaaaactctccctctttctcaccaattttctctctctcgaaccactaagaaccagcaggaggttagggatgtttcaccttcaattgtgagactcgagcagattttgagtgttccaatccaaggtataatcccctagcacctctatccttgttttattaagttctatgttaggttattgaatgaatactgtgagttgggttctgtggtggtatagtttgtttaatttagtgttctgatgttgtgttcagctggtttgaactgttctaagctgagtttgttgtttattatggtgtttgtgcaaagtttgagtttaagaggtataactttattctctagtgttgtttttggtttttgagctatttatggagggttgttgcttgaattgagtttattgtggtataaacaggtgatctggaagttattgtgccgtttgggatcaaattgtggtgttgggagtgtgtttggtatttcctgcactgaactggttgaccgattcagtaagacctataggaatcagaattccggttggtctccaggaaaccccacaaaactggtcctccggtttgggaaccggtctaccggttggggcagttttgcaaaccctagtttttcccaattttgtgatatttagagtattaccatgctatccatcgatagggaaatctctagttttaattttaagtcccccaaaagtgtgttagcatgtctcttcagatttaggaatattattatataggaccctgtaaagcgtcgagttgctgttccacacaagttgaccaacacacctgaacttggaaacatggtaagattagcataaagtatgtatatgtgtgtatgaatgcatgtttatattgtttacactactaacattggaatagttgtagtactgagtgtgtttgtacagtgtatgatgtttaagggtaagttacggtgttccaacataagtacaagtgtgtacgaagtgcatgtggtacaacacccagtagcaccttgaagtacaatttggccctactaacactagtacatacttcagtccatgtagtacagtgatcgtacttctgttgagaatgttcttaaccatttggtaagctttgtacttaggctcaggaggacctcggtataaggcgatagtgcattgtatgtatatattttatgcgtatcttattgagtgtgttgactcatcatttttctacattgtgtaggtaagggaaaggctaaggcggaggaacagtgagttgaaggcttgaccaagattgtacgtattgcgatggtgcaacttggagggtttcggtcttactgtattttgagttatcttttgttgttgccacatgacttgtaaaaaaaataatgttatgtatatatggtatattttcgataaacagtttttaagacctgggatcctggcttataaaactttattagtctatttatatatggttataaatagttatatgtgtttaagtctaagtaacaaattagttttcaagtatgggcgttacaacttttgtattagagccactgggttgttgacagaaaacaattaagatatgtacagtcaaggccagagatgagctcaactcatggttccttaaacttttatctattagaaaattgtttaagttacacttttaataaatgtgttgtaagttgtttgaatctataagtatgtggtcgtgggaatatgttgaccactgtctaacctacatgtccttgcacaaatatttacatatgaattatacggaaagtggttgtgacaattggggagaggttggtcatccaaaagaaatcatccttaaaggaagtcttcttgggcaaatccacgataattttgcgatcaccagtgtgaatcccaagattgtagaaaccccctgcagcgttcttcctcgctgggatagccttgacggagtagagatactctatttccacgggagtggggcactcctaattcaagattttgtacagaaccctcaatctttcaaggattttgtatgaaatgggattcaattaaaacgaggcaagcccgagatggttaaggaagtccttgaaataatctcgtagtgggattattgctctagcccttatgttctcgaggctccaagtgcctatcccagtcgagccacttgtactgatctcaccactagccccctcagatgtttcacttgtaagtcgcactgggggatagcaactgaactcgctagcacgtaccgatctaacccggtagtctcgcatatactcaataccacaggttctcaatgtatcacctacataacctgcgatggcttgaacctttgactctattaactctacatcgaaagtgatgttagggtcctgtggagtccttgatttacgaggcttggtagacatcattttaaaattcaagtcacctggttcaaaagcaattgtgaccttgggtaaaaacaaaggcctagccaaaggaatagaggacacactgggaggttcaggccaagtagcatctcacaagaaacggtactttccttctataatgtcttgcaagaagcgtctgtggcgactggcaatatcatcttggtgggttatcactaggtgttccctaatttttgcatcatttatctccaattttgatttgagttttgaagttttgtgttcgtaggggatgacaagttcagtaggatactctatttcgaaatcttctggacgataaacttctgaaccaaattaggacattgttgcaaggagaaagcaatcccaattcgtggaaggaatttatcaattcagaagctggtaaattggagaaccttgaaaatctacgttttgtctaaaccctaacgtttacccagaaaaaaatttagccctaaaaattgctaaaaccaaatgagatgacaatgatgttgacaaataagttggtaattaaacccagaaatacaacataacaaacatgtaagaaaataaggagaaaagtcacttattgtttaatgttagttttttggatgatgaacggctctgcaatctgtgaatcaatgaacaatgtaaagatccctccgaatgcttgaagtcaaaaattaaatcagatgaaacttgtaggaaaaattttaatgacacaaatggcatgcaaattttcgagcaaatcatgtaatggtttttcggcagaaaagcttgaaaattcagagtttctaaaatggcaaaggtaatgcaaagatggttccttttccattttatactcttgggttaatctccgttagatcagggagataattgatcctacaggtaaaatttgaaaaagaagtcgaaaagatggttattaaatgttgatgtacctcgaaaccacaaaactgccaaaattagaggtcatgcatttttcaaaagggattatgacaaataaccctcgataatcatttaaaaagaactttttattaaaaagaactttttaagaggcaattattatacttgaaagtcggttggcactttagaggaggacatgtgtcaaactgggagaatacgaatcaactaatataatagtaattatattagaagatataaaatggaataacttattaaatgttgaactgatagggtatatctataactcgttgactgaatagtcttaatcgagataaggatacacaaactattgtctcaagcgttaatgagaaaacattcaacgcagaagtacaaagcgaggcactaacctcgcttcgtatgaagagaggtaggggagacatgtttactgttaaaagacttaccgtataatgtacattatacaaactaagcataacggttgaatgaacttgaacaatgaatggtgaggtatccatctcgctatgagaaggcatactcttggtatcttcactaatctagcttcaagcatctttcattgagattcactactccgacgagtcaactctctttgaaagaagatgacattaaaacgatgttgactactgaagttcatcttgtcactaaggactgtgattgtaagatggagtgttatgtcttcaagcctagaagcgatgagatttacattatcaaccttgaaaagacataggaaaagctctagcttgctaccacggttattgttgctatatttccagcgagatgtcccaaaacaacacgctttgcaacgtatttaatacacgtatgcattgacccggtaaagcggaccaatcacagctgtgtaattttttaaataattactgtatttattttacgtgggacgtaatcaaattccataatttcagggatttattgatgtaatatatcagtccgatttgtaattaactgccctcctatgtaactataaataggagcaggatacactgaaaaagggacgaaaaattcattagagaaatagccctagaactgtatcaaaaatatctaataagat

SEQ ID NO: 78101 - DNA, 588 bp, Cannabis sativa
atttgggcaaaatcttcatgtaagtgaggcaggttccactccatagtatcaagtatgtaggttgataccagcgtggatggttccccagagaagtaaattggcttgaactcatcatgtcctgggatccaaggatcaattccgcatcttacatgaaatccattaccaatcttgtaacgtagtcccttggccccagtgaattcctttccatgttaaagatggggagtgacccttgtgggcttccagaaaagtgtttcttggaaagtatctgtgcttcaaaagacgagctaaaagtgagtttggattatcgaataatctccaagcttgtttggctagcatagcttgattaaaatcaacgaaagattgaaaacccattccaccttcaaacttggatttacagagtaacttccatcttttccaatgtattttagacccatccttattagaaccccaccaaaaacttgccatcatagattctatttgattgcagaaacctaatggcaagcgaacgcaactcatcgcgtatgtaggaattgattgcaccaccgctttcaaaagtacttcctcccccccaatagaaaacagtttgtc

SEQ ID NO: 78102 - DNA, 1735 bp, Cannabis sativa
gagattgcatgttcatcaatttgtttgtgattttgaataatgagctttcagtatgttttgcgccgtttgtggaccaagttgttgatgttcttactaaatgtttggctaaagataagtttcagtacctctaatccaaactcaaagttgtcaccacccattatcgttctaggggtgataatcaactaattaattcaggttaatgagttggtcttaggcttagcattagttatctgtccgcttatatcttgtaacaaattatatatgttataacagaattcattttttttttattattttgtgtatataaataaagctatcctctcaaatcacactataattttttagtgtgttgttccgagttttcattcattctttcttcctctttactttcttccagtcacacgcatgaaacaaattattattgacattaaaaattaatcaattttttttaaaaaaaattcccataaaaagaactttactagatttagatgtgtatatacttaattaagtcttcaactttttctttttgttgagcctattaatctctacttttgagctcacacaacataatcagcccgatgctatatttcaaggaaggaattctaatttacgatggtaagataaaattttaacaaaatataaatatgtatagcactctttttattttataattaatattattttaataaattgacgttaatattctcttaaaatatggacaagcactaaaaaaaattattttcaattatactcaaacgtgcggtgtgtaaatacataatggtacatgagtaatcctttttcataaaagttccctatcatttaaagtcaaatcgcgcgatatatgatatatcccaccaagtttagtatgtacatgtacttaaaaacataaattatctacagataatttgtatttaatatatgatctacatgttgtatattatttgtatatatagcgattttcaacgtaattaacagttttaatttggatgatttgcatccacataactttatatattattattattgacgtagacactagttttagtatttttaaatggagcatgcaaattataatattaatatgtcaagacaattgacttatttctttttctttttctttttcgcaattgaatattagggttttgcattagttaatttgggtgggaactggaaaacaaaatatagaaggccctgaagttttgtgacattaataacttattgtaaagttgttttggttgcaaatcatctgagtaaatagctaagctttggtttagatacgtaaaggacaaggaaacacagagcacaaataataataataataatgacaattaaaaaaaagaaagtagtgcaccaatcaattcgattatagttaacgtgtatatcttaaccaacacaggaaaacgattggtgagcaatgtataccataccttaaataatgtaatttttgggttaatgatattcaggatagattggctttttttgttattacaatgtttgtgaaatgaaatggttgtctcctgtcctaatcgaatctgtgatcagatgctcaattaaaaaaaaagaaaaaaaaatagaatgaaagaagttgagggaggccacgccatctaacttaatttaaggccgagtctgagagttctttggggctcttataatgggcctacctaatatcgttcataatggcaggccttgggcccaattcttagatttacataatattattatcaaaaataaaaat

SEQ ID NO: 78103 - DNA, 1274 bp, Cannabis sativa
tagctcaaagttacataataacattgactcgtgaactaaggctagttgacgtcccaattacgtaaaaactgtttgtgtcatttctacttttttttctttcacttgtttatttcttcagctctgattatttataattagttttttgaaaatctcaataaacaagtaacaacaaattgtgatttttgcgactaatacatgtagccacagactttttagtcacaataaagtaatgatgatttataatttattataactttttcacttttaattataaattttattgtgactgaaagtaaaatcttttttataatatccatagattcagagacgatttgtctaacttgcaataagtaataaattaatcatattagataaatctttagaaagattcatatatatattttgataaaagcattatcacaatacaatgtacaagtttttgatacatgttaaggttaggggcaaccttgagggtaggcgagccaggagtgcgtcgcgggctcccaaaggcttaatgccctaaaattgtaaaaaaaaaaaactattagtatataaaaaattaaataataaaaaaaatataataaatattatttagtgttgtggtaaagattcttactttaagctaagaggtcaatatatcaattccacctctacatttcaatttttttacattgtactaaagcactataactataattttgataattttaccataataactatggtactatttggttgggaggaatgaaaatatagaaataggaatgagaatgaataggaacataataaaatttaaaataaattttttctcttgttacattagaatgttatttccttctttttttaaaatagaagtcatttagaaagagcattccattaaaatgtcattccaatactttaaaatgcaaccaaacaaaaaaataaaatgaaaattatttcttttctattctatttcatttcattaccatctatatcccttaaatcagccgttgttaaggtacaaatcaaatagatattgtcatttgtcaatttttgtttgcattcgcttaacaacactattataaaccatttggcacgtaaaaatgttccaaaccatttcataacagaaccaatcaaactaactatatttcttcttaatattcaagtttattttatcactattgaatcatatttcagattaaagatacttattttcttttctttgacaatatctgaacttttaggtggtagaaaaaggctcatattacaccataaaattaaataatttgttctca

SEQ ID NO: 78104 - DNA, 599 bp, Cannabis sativa
gacttacttaggtgtgggtgttgtaagtgtagcctcatacaaaaaaaaaaaaaattattgatttttttaatatttttttttattttatttgataattaaatacaaataatagtataaaaccccacaaatatattcataataatttaactaggtacaattttttttttaatatttaaagcctcataaaacaaaatttttagatccgtcactggttataccccaaccgagaaggctataagaagaaaaatactcaagactcaagcatggttacttctagaatttttagagagagcttctgtagatatatatattttgtacgttaataataattagattaattaagttttttttctaaattttattatgtatcaaatcgtgttctttaagctattcggaccattaaatttctttacagaactattgttgaattcaagaattcatgtccaattctctttaattttaataacaaacacctaaatatagatggaagttcgaaaaatataatttattatatcaaaattcaggtaaaaaaaatcctaattaggtaaatacattataaatacatgttaattgcgtatcactgttttataaaatataat

SEQ ID NO: 78105 - DNA, 730 bp, Cannabis sativa
ttttcaacatccatgtatcaaataaaagtgaaaaagatcacacaaggctccatagcccccttatgcgatcactgcattttttggcaaaaattgtagcagtgctcgcctaagtaattggctaagaaccaatatgactaaagtagttttctagaatccatatgattgaaataagcaagaaacaccatccatgacttcccataatccatgaccaaccattaccactctctggccgcaattggtggtaatggtctcccatattataggacgttgaaatgaggttttggggtcctgggacatctgaaatattattcaccataaaaatatcaagttaaaacacaccctgagggatccaagaacatgcatgcctgagagctgccatttggccatgttagtactcgcaattagaataaaatagcacaaaatttccttcagtaaaatggtcataactctcttaatttttatttgaatgatattttcaagacgaatctatgtgtatctcatggtaatatctcaattctgaagttatcgggtctaaaatttgctcacaaggcaagctagtacacattacttgggaattgatagcagtgtaattaagtgtgggatgttggagaaccatgccacagtccatgtggcatcatgtgcgagcagtggcatcccaaaacacatatttccaatacttctcaccaatgtcatgaattccaaggcgagaggtgacattccttgtcactcc

SEQ ID NO: 78106 - DNA, 2326 bp, Cannabis sativa
atctactcttacaaactgtggataatgataaaattattcccgtaggtgtactgtgtatatggtaaatctgcacatgtatctaactcacttttaattgtacgaaattcattggataatcataattttttttgtcggtatctatatataagtagaatttcatcaaccaattaattggagatgccaattctactatccttaaggaagagatcttaaattatgaatttatgcattattttccacaagtcaaaaagtgcagaacaaattcttacaactttgataaatgataattaagctgtttgaattttgatcaagattatgatatacaaaattgtaagcccttcttgaagggtctctatctcttttaagagattcttgtttcctcccacattattaagctagaatcaaataaacttttctcaattctcatatttttggattaaagattagaagcataatattggtcgagaactatatcgcaagttgacagatataagattaccctatcacttcatgagtgatatttttatattattcgtaaaatatatatatttcacggtgtacaaattaactaaaaggcaaataatataaaagtgaattttatgaatccccaaaagtcaactgggcagcctataaatacatgaataattataagttacagctgcattgtatagaagatgttgagaaaggtgtggggttcatgagttaatatatttttaggttttgagtttcttgcatgaggataacagagagtgaacatgagccaagaatgacttgctggctgagtctttttatgtgttgatttaaattatatcgacaataagtggctcttaaaccggcaagcttctggctctgtttggctctctatattcccatgtgagatattaagaaaaccaatcaaaaaatatatttcaacaagttgattatttatttatttattatcatggaggagaaaaggtattagactagtggtggctaatttcttctaaactgacatatggatattggtgtatttattaaatatctgagctcatgactaattattatgattattttgaagtataattactgtaagttaaaataaattaaagtttcagctataataaatatgggttgctatacaaatttttgttactatttagattgcttcgttaattgctataagagtttctatatggaattctattaaaatataaaaacaaatattttaaaatgtaaaaataaaaaaataccctaaaatttatacacaaaattagtaaacccgcaaaaatatatataaggtatttctttatattgtgcacctttataaaagtagtgtgtaccagtgtactttataaaaagttatttggagtgtatatcatgtattgtagttatggtaagcttaatttattctaatattagttgttaagttgtttgttacagacttaagttggcataacaacttggttccacttgtatcagctcatgactattatactctgtatataaacatggtcttaattaataaacacactttcaacctataatatggtataagaagattaaatctctttggaacgcaacacctttgtcttcatttgaagtactctacctcgccatcgtcattgtcctggctagaactcgagcaactagaacctggactgccagcatcaagattctgacgagtatacttcttaagctctggcgaccaccttggcctaattttggtgcctggaacaatactatttttctaaaatgacgcttcctcaattactagttgacgatccattccacaaccattggtttcgatgaagccaaatgctcacgtcttgtatttttcaatatgtgacctctaaaatcaaaagaagtataatgttcttatacaattacagagctatggattgaaatcaatttgcacttcaatcagggcaaatgacctcgaatctcatcaccttgcatcaatgtgatgactttgtaagtgcatattttggaaaactaagatctaggcggtatgaaattaagaaactccgtccaagaatcttaggtatttgtgttgttttcacttattttaccaaaattttatttactatcacgtatgttgattataaaataatttatgaaccttagaacatgcttttccaaaagagaacataaacaccttaagattaagtatacttatgtcgaccttatgtcggtcttgatagaattataaatacaataattactgaggaaacaacattataagtatgaatagatgattaactattctcatatatattatattgatcccatatgttaaaataaccaagaaattagttgtctaaaccatttaagttcattttgattactt

SEQ ID NO: 78107 - DNA, 845 bp, Cannabis sativa
tggagacatgaagaaatttaaaataagtgattaccatttttttttgtcctacatgaggaaacgtaagttaatagaatttataattgaaaattcaaaattgtattaaaataccattctaaataagcatccaacctattatatattaaattataaatgtgaaaaaattacaattgatgtgctgatgtgaagaattaaattaactaaaaatttaatcaataattaattaacaatgataaaattaataatcgtaaataataattagagataaaataagaatgaacagagtaattaaaactagaaacgatcaaaacaataaaataataaattcaataccaaaatatatacttggtcaagatcaaatctgtttatcaaagtgcttctctgattgttcaagatatctattttcaattgagaaacaaaatatcatttcgttctatttcttgtcaaatagtaaaggctattccattagtaatgaaaaaagaggttgaagggatgcgtatatgttgttcaggttgattagaaggcacaaaaatagctagaactgaatgcgaaaaagtatggaaaaatatctcgtaatgtatttaactagaaaatcgattatgcttctacataagtatctactcgttagaaaatcttaagtgtcaaattgtggtaaccaattaaagatcgcttcaatgtgatcttgagatgtagtttggtgacctagagatgtaagagtattgaaatttcgtattttaatattcctagtttaattatttaattaagtgattaattaaatgcagaataatgaaactggtactgaaaacagtttttccgtagtaacagaaaacaactctgtaactcca

SEQ ID NO: 78108 - DNA, 1081 bp, Cannabis sativa
taaatcaactatgttcttttcttagttttcctgcatttcttttcttctcaattttgattgattgattgtctagctacagttcttacaagtgtttgtgtgtgagtgaatttctggttggttgaatcacaagaagtcaatttaacttcatcaaagataagaaaatactcaatttaaaggcgactggtcataactacgatatatactatacatactttgtttagcatgcacgaaaactatttttcaactttgtgtatatttgtttatgacaattgatcaacatgtacctaaataaaataataattggggtggcatgcatttctcattcacctaccgtctacaaaaacgacattgcatcctagttgcacatatatatatttattgcattgccactaattcgaaactcattcctacaaaaagagcgcacaccataacgaacacattattatttttagaattatctacatattttgataaaataagagaaattaataagatgattaagatcatcatgaagtcttctagttattatgggtccatgttattaaagattgtactactcctttctttcttatttccggcaatggttgacagtttggttcgtcactacaatttcagagtaagtacatatatctttttctgcattaattctttcgtttataggacacacgtaccatttcaagtgtccctgcgtagagaaaaacctagaatcaagtcatacatgcatatagagtacttgaaaatatatatgtaagtacacatgcatgcatattttaatcaagtcatacatgcacatatatatatatattgtataggtactatatatattatgattatttattaagatgttatatatacaccattttgatgggtttttttcttttttattgaataaaagatattcgcgagtctcgaaatctcagattcattcataacattaattgagctttatatctcaatatatatttctttttattcgttgaattttatttaactaagaatcagaccaattagtctataataataatctcattcattaacagcaaagatcatcgctttaagcaagtaataataataataataa

SEQ ID NO: 78109 - DNA, 933 bp, Cannabis sativa
ttttttttttttttttaaaaaaaattgtagggatagagaatttgataccgtatatgactagtgtcctaaggtgggaccaacaaaatgatatgtatcttagctgtattttcacaaatgaaaaaaaaaaaaatgaaagaacagaagcagtattataattttgttccaatgtttttttttagtactagtggggattttaattttgctatagtagaatagtggggttgtggggaatataatgctattcgaacttctgttgcataattgctccttttctttattttaatttgaaataaagtcctttttatttttattttttaagtggaacatttcaagtcaactcataaacatgttgcatacatattgtattgaaatgcatatctttctgtccttttgaattgtggagcaaaagaagaaaacaaaaaaaaaaaaatcataaaaacgtaagggaaatttgattttctatacttattaaactttaatttttttttaaaccaatacattttacactataaaaaatatgccaattttttgaaaaccccaaaaataccccctcataactcaaaccctttctctctccctgaaaccgaatgaaaaaaataaataaataaataaataaagcccaggtccgatggtcggaccatggggtccgatgggtccgattggtcggacccatcagaccccatggtccgaccatcgggccactatctctcttcctctctctgaaaacgattcaaaacaaaaaaaaaggccctggtcatggggtccgaccatcagaccaggctcctttttttcaatcgttttcagagagaaagagagagaaggggactggggctggggcttcgaccgcggtggagaagaaggcttgggcggcgattcgtgggtgccgtgggttgagcgggggttggggttttcgtgggtgtcgtgggttgagcg

SEQ ID NO: 78110 - DNA, 889 bp, Cannabis sativa
aataataatatatcttcttcttattatgattattattatatataaaaatattgaatggtctcaacaactacttttttagctgtaattttggtcaccaaaacaactcactacttcacttatattacttagtgttatcctcacatgtctacatgaccattttcattgcataaatatttaacataatattcacattaatactttaaaataacactactttaatataaaaatggattttttttatttaaaaaaaactatcataatttaattttaaaaattatgcattaataatttaatatcattgttaattgatatattatataattaaaaaaatatatgtagtaaactatctttattaatatttaataataaaataataaaatatttatatatcattaaactaaatttgacacgtattatatataaatgttagaaaaagattttgatttttttttccaaacgatttatatattattgtgttcttaaactttttcaatttgttaaaaattatccttaaattatttataatattgtaaattaatttttttatcaaatttttccatatgtggtaaataacataatgacatgactacttagttagctatcatatcagtgccatgtcaatgttacgtatataattaatttttaaaaaataatttatttttttaagttaattttacataattttcttaatcattgattaatttttaatttaataaatttttaaaaatacataattttaatttttcttaattttaaattatacacatgcaactgacgtaacaactaactaaacagatttaattttttttagctcaatacaccaataaaagtaattttaatttttttatatgtagtaattaataataaaatataacattatatttttaat

SEQ ID NO: 78111 - DNA, 582 bp, Cannabis sativa
aatattatttcttatttatttaagaaaattttaattaaaatctgtctagttcgtctatatatgttcaaatagatttttaaactttctttttttgacaatatttcttattaattgtcttattgttttttttttttcaaagtatttctaggatgtatttggacacccttacctcatgagtttcaattatctcttttgtttattattttctaaaagttttttctatgtatttggacacccttagttacctcatgagttcataaagtttttagtgctttattactgtatatttatatatttgttttcattgtattaattgtgtagcttgaatacatttcatgttttgggagaaattttgttcatgagttactttttgagagaaaaagtacaatcgttatggctagatttatgacaaatttaagaggaaatctttatttaaattagtcaatttagctttataattatttgaatattcttttaataaattttattttttgggtgtgcttcaataaattagcaataatctataaaattactgataccgatataaattgatataaatttagtatattatttatttttatg

SEQ ID NO: 78112 - DNA, 1066 bp, Cannabis sativa
tattcaaaaataatcacgttgtcccggtaggtgagagtccatcaatattggactagattgatttttcgagtccattttgtgttagacataatagcctgggacataaaaggggtatgtttctagtccaacattattggactagaaaaacatttatagttcaataatgttggactagaaaaatatttctagtccaagaaaatatttctagtccaacattattagactttaaaggcgatcccacaacataaaacttaattgttggactaaaaaattatttctagtccaacagtgctggacttgaaaagcgatctcatgccgagaacccctttctagtccagctaagtttggacttgaaaaacttgattttttttttttattttttttctaaattaaatgctgtaaaattaatttcatttctttatttttatattaaattataaatatttatttataatatacaatatatttttttccaaaaaattatttataataatttaacgcaattaataaacataaaaagaatacaaattttaaactattataaatatctcaaagtttataatatttgttaaatatatatacataacgaaattaacaaatattgtattaaagaaaaaaaatatatatttaactgatattattagctaaatatttgtcctaaataatatttttttaaaaaaaaatgcttaactaatgacccataatgtaatgattctgtaagtgttgaagcaaatgtgtcgtccactctttcctcatctcgtccatcatagcttttgaatatgactttttgtctattagctacaaaatataaaagagaaattaatttttttaaaataataaaacataaatttatatttaataattattttataaatatttatgtacctctttttttatatagtcacactgattaggcgacttaactagatctttcatcattctcatagcatagtagccacactctacattacttagttagttggtgaggacactacaataatttgtaatttaaatatttacattaataatttattaaaaccttaaattatcattaaaatttatatat

SEQ ID NO: 78113 - DNA, 1231 bp, Cannabis sativa
atatatgcatgttttgatgaatttttctctctaaatttaagaaagatattttttttttcctgatttttgtaaagtagtgcgcacagatagaattggtctttctttatttctcctttattatatatatagccttccttcacttctaagtaagactcaatcttaattttatgtattattttactttaattatgatcaatatatttaagctgattgaaatatatagtttgcaaaattaagactttgatatgcaaatgatagctgcccctccatattgatcgaatgcttgatcagaaccgttaattaaattaggtacgaaaatatgtttgtgtgtagagccaatgttgtaagagggaaaaaccaaaaaaaaaaaaaaggaaaacagagaggtagaacacagagaaaaagcttcattcaatattgaactagctttatatagaactagtgtcggttacaagaattaatcacaacaaaattacactatacaattattaattaactctcaacaaaaaaccataacagcagaattggtttgattgtgtaacatttcctctcaaacaaaatggggtgaaaaccatttaaagtttatttttgggataatgaaaccgatcaatggtgagaactttggtgagagtgttagccacttgattaacggagaaggcaaatctcacatgaagctctttggcaagaatttgatctctcacaaagtgaagattaatttctatgtacttggattgggcatgaaacactgaattggcaacaaaagcatctgagttgaactttgataatctatccaaataattggtggttcagagagaagagcttgtagttcagttagaagatagacaagccatttcaattgtgttagcaagggccctcatgaactcactttctgtctagaccttgcaactacttgttgcttttggacaaaccaagggcagatttttactaagaaaaataatatatcctcatgtggaacgttaatcatcaatacagctagcccaaatctgcatcagagtaggtatagagtttcatagtagttattatcctgagaagaagaccatatgaaatggtaccttttagatatcgaagcaatctcttacatgcttcccaatcactactacaaaaaccccctttagaggcggtttttaagccatttcagcgtcagttttcgccaaattcgctaccgacgctgatcagggcgacgctaaagggtttatatgaaccgacgcca

SEQ ID NO: 78114 - DNA, 595 bp, Cannabis sativa
agttgttaaatattcatttttttttgtggtttttatcccacatctgttactggtgtaattatatacatgtcaattggcatatcaatgaatattgcaaattatattccttaaaactacaaatccacatccctttacaaatatttaaggccaaagcacgatattctgactctacaccactccttgagaccacagattgcttcttgatgcgcctagtaactaaattatcccatacatcagagcaataaccactggttgattgtttgtcagtcaactcttaagcccaactagaaactatgtaaacttcaaagtctcagttgttgtgttttctgaagtgcaaaccaagacttggtgtcatttttagatactttagaatatgatacactgcttcctagtgctcctcacaagggttgtgcatatgttgactcaccacgctaacaaggaaggtgatatccggtctagtatgagagatacattatttttccaactaatctttgataacacaccctctctactggagttgaatcctcactttggattactttcaagtttggattcataggagtgtcaacaacttgctcccaatcattcctatttc

SEQ ID NO: 78115 - DNA, 666 bp, Cannabis sativa
ggattatatggtttttgagccatatttgcagtaggattatcaaactgtttggagttggtagagaaagatgtgagcctatctagcttactgtcgaaactgaggactgtgctagagagctcctgtcatgagagggttatcctggcttcaaggggcacaacaatagtcagatattgagctcctaaactagacaagacattacctcgaagcagattatcagggtaaggctcccctgccagagcaagagtgtccgcccacagtcgcttttgtttcagataatcaatcatggattgagaacccttccttactgtctgcagcttggttctgagatcctccatattagctcttgaatgagctccatacaaatcttcaagggttttccataggcttgcagcatatctgcagccaatgacttcagaggcaatgccttctgtcatcgatccaaaaagccaacccatcaacagttggtcatgagttatccaaagttcatactctggatttggatttgagatttctgtttcaccattctcagatattagaaactctggaggacatggtctggtaccattgagaaatctttccagacgatgccctctaataatggtcatgaccattgtcttccacagtgaaaaggtactcctgtccagcttcattgtgaaaggctggctc

SEQ ID NO: 78116 - DNA, 640 bp, Cannabis sativa
aaataaaaagactacctaattgaaaggaaggacaaggaagtaagttagagccataggttcttgcccttgcggtgagtgacagcgatagtatttcccaaaacttcaacatcaaagtctgaggcgaagatgtcgttgatgactttggagtcgtcagctacgaccgacctcttcatcttcttgccaagaaagttttcctctacaaccctccaaactgcctccacctccggtcgctctgacattttgggtgttctgattgtggcacaaggctagcacatgtgagcattgaccacatcttagaattgggcaaacagaaaagagaaaaactactcttgattaagtatagattgaaattcaaatgtagagataaggtacctcttactgtattcgttactatcagaatgagcaatttcctttgccactttaacacccatgtaatgggtgaagaccagccctcttcctctgtttcctttctgtatgccctcctcgaaatacttcataaagatcaaacgaagtcctttctcggaggaggagtgctttaggattttcaggcggtggcttacgacattgaaacttttggaagaagaggtttgatagtttgcattggagaagaatggggttgggttattgattcgagagatct

SEQ ID NO: 78117 - DNA, 595 bp, Cannabis sativa
atccacataattattaatatttataacacaactgaatttcttttaattgagagtgattttgagacatttattaagacgctgaaggaaacctgaaactttttagttggaagactggtaactatgtgtatcaatgtaaatatatctttatttttttgttaagttgtatattttcgtttgttctgaaaatttataattttacggcccataatgtgattaagtgggcttttacctattagtatggttgagctttcttctatatttataatgaccgtctaacttttattttaatctataaatgcttattttcaatatcaaaaaaaaaaaaaaaaaaaaatagtattaaacctacttgtgggagaaggaacagcaaataacaaatataccagaagataaattataaacataagaaaatataaattctacaccattttgtgaattttctttacaaaacaaacaagcatactattagtctactaggggcgaaaccttgcctttagtcctgtttttaaaggcatctttgctcgtttaattcatgtaaagtagtacttaaccaaacatgagaggaatgcccatcaaccaaaaaaaaaaaaaaaaa

SEQ ID NO: 78118 - DNA, 909 bp, Cannabis sativa
tatatatatttttacggattttattttttatttttttacaaaaatataaaagttattttttttttgttgtttttaaaaactaattgttttaacattgctgacttgctattatgggaaaataacatgatttatttatgttattttaaaaaaatatcatcttgatattgttactgaaaacaattttttttaaaagaagaatagttaaaggcttttaaaaaaaatattttgtaaataaaagaattgtaaaaatgtaaatatatatatatatccatttatttttaggtgtattatgtaaatttctatttttaggtgtattatgtaaattttcttttttagttcgttagtagaattagttggccttattacactttattgttaataagttttgggtagggactatttcataaatacacaaaaacaacaaaaaaattataaaaatataattttatagaattttaaatatttttatgatttttttgattttatttatagaaaatacggtatttttatgttgtactcatgttaatttattgttgattttttgttatctgtatattattttttgttgttattttgatgttatttttaataaaaaaagactcatcttaacaaaaaataatttaaaattatttgtcccataaaagtgtatcaaatttgtgtgtacatgtatcatcattaccctaaatataaaaaataaaataccattatataacctatacaaaataccaaataaatgagttcttaatttaatattaattattttttttaatttcatcacgtacttattagtatatcaaaaatatttttttaaaaaacctaacttaatttaatttatatccattatgtataaagataaaatcctaaaagaaaaaaatacctctaacttaatttttgccccttgaactttga

SEQ ID NO: 78119 - DNA, 787 bp, Cannabis sativa
ttgcatggtaaggaattgtaggttagggcttatatatataatatatggtaggaatattaattaatggaggaatatatattttatatatatctagccaaataataaaatgatcatttatagcatatataatggaggaataaataagacatgtatatacatatatagcatattcaataaataataataaggttctctccaatgatattgttcttcccttagccaatcatatgtataatagggacatttctttaagaagaattagatgatgatatatatgttactcaacttttttgggaattttattttgacattttttttgcctagctagatagttatatattgagaataaaaattaatccatcttttttttttctttttttctttttgaaatgttaaaaatccatctttcaatattaataaataataattgtcagcagcaaattcacaaaaaatggtggtggtggtttggcatagtttttatgggacttattactatttataattctcttgaataaatattatttttttgaaagcaatataaattcatgtatagtatttatttgataaacatgatcttgaataaatattattattactaaaaaaatcatatttacttatacaatacagataatatatataatggtctcgttaatttgcttgattaaaatattacatcgttaaatttttcaggaaaaagaaagatctttcatgtttttaatttatattttaccaatactaagacaattcatggattggtttaatcataaattttgtgattaaaagtaaa

SEQ ID NO: 78120 - DNA, 2243 bp, Cannabis sativa
atggctgagagagtgactttgttgggccaagcaaggaaataaaattcttgttttgtgaaagaataaattctagtaggggaaatgattgtggacttttggctagagatatttggctcatgtaactacttagggtatgaaatagtctcttctcagttcttttcaactactcggtaatcacttgtcaagttaatttgtaatttttttttacacattttgtatcggttgttcaaaatatgtaatgtaagccgaaaactgaattgattttaattttttatcacctgtgcttccgcgccaattttatatggtgatttgtggttttgtaacagggatggactctttttgagatactaagatatgctccccaacacaactggtctgcttatgaggaagctcttaaaacaaacccagttttagccaaaatgatgattagtggagtggtgtattcgataggagattggatagcacaggtttttattatgtgttgagtttgagcatgaaagttcagcagtttttaagttcttatggagtatttacgaacttaaattttgtgtatttgcagtgttttgaaggaaaacctctatttgagtttgaccgcacacgtatgttcagatcgggtcttgttggttttactttgcatggttccctatctcactattattaccagttctgtgaggtgattaagcttatattgatttgcacccttcaattactttccccgctttttgttccttattttcttaacataatagatcgacttcattcaagactatttcatattgtttcaggaacttattccttttcaagactggtgggtggttcctgtcaaagtactctttgatcaaacagcatgggcggcactttggaacagcatttatttcatagtcttggggattttgcggtttgagtctccagtcactatatttaaggaatggaaggcgacattcattcccatgttgactgtaagataaacttgtgtccatttttttttattgaatatatattattgccaggaatttctttgacattcccagacctctttaaaccaagccatacccttcaaacttcaaccgaatataggttaacctagtaatctagaatctcatgtaccttaccattacgactaaccaaaatagagagggaatgattagccctagctctgatttgtctaccaaagaaaaaggtccagataagttaatcttgtgagaagctagttaataattgtagtaattgtacagttgtcattcttttattattctttatgaaatgtgtcttagttggctgagttgtatttttttagctgttgatgtggaaattgttttgagtatatccctaggagatctgttagagtggagaaaattagtagtaagagttttgactcacaataatcctcctctcgaaagattggaataggagagaacaaacttcttgaaagcttgtgatttgtaaccttgtccatcaattcaataaagtttctgtgaggaatttcagttaattgtttgtcaaattgaagaaataaattcttactaagaaaaagcttatcagggaacttcattgttgtttcttcttttccaatggtttataaagttttctcttctaatagtctcctagttccagagaacaccgctaatacacaaccgaggcttgatctgcttatgtcaaaataatatttggttttacttggcatgtagtcattgcccatagtttgggttgagcttgtgtttaccaaaaacaaagggaaacaagaacatttagttaaggtttttacatgaatatgtgtatgttggaacttttgcgtgtataattttatatacatattttaattacgtttatgtttgttcaattgatttttgcaggcagggtggaagctttggccatttgctcatctaattacctacggtgtgatccctgtggaacagaggcttctttgggtggactgtgtggagctaatttgggtgacaatactttcaacgtaagtatccatatgatttattttttactacctatattccgcgaaattcttagaatttttagtagttataggtaccatgtgtggtctacagaaaatatagttgtacgatgaaaacacatcttgttttgggttaaaatctgacacttacgaacatattttctattgctagttattcaaatgagaaatcagaagcaagaatagctgaggcaccagtggaagctgattccaattcctcaagcgtaactattaatgaggtatgtgttagcaacttttg

SEQ ID NO: 78121 - DNA, 1314 bp, Cannabis sativa
gaagagaaggctactcttgagaagtctgtgtcacacgccaagtgatgtttcaccctttgggttttcaaagcaaagttatcacttgaattttcatgcaactttaggcttccctcacagaagcagtttgtctcattaaaattcagcatgactctcgcatgcacaaacatttttgtgcgtgaaagatcactgggggtatgacacgtcttcgaccctctttcccaaagagaatgactgcttgaagtcttgcacacacccagtaatgtttcaccctttgggttcttaaagcaatgtcatcgcttgaatttttatgcaactttagcctgcctcacgactttgaagttttcctcattaaaattcagcatgactctcgcatgcacgtacttttttgtgcgtgaaagatcactgggggtacgacacatcttcaaccctccttcccacaagagaagaactacttgaagtatgtcatagcccggtgatgttttgccctttggatttttttaaaacaaagtcatcaccctttggcatgcctgtgcatcattcccatctttgcctccaagttctctcttaaggccttctttatctctctctccctctgcatagcgtagggatcgagagggacagtttttgtggggaatgtgaaccccacgggaggaattttcagaagggtggtaggatgatacgagcgaagccaacctgtactagcaacaaaatcttgcctttgcctttttcttccaagatcgatatctcctatgacccttgaagaactagttttctccatagtgggcctaaatgtaccaacaaaggacaccgtaatgtcaagaggttcagtgctatgtaagaccccaaggttcttttcctaacaaaggtcgtgcaaatagcgccaacattctcagaaatatctcaactcctaaaaaactctaaataaaatgaactatgctaaagagcacttaccggtcaatgggtggaggtattatgagtatggctacggtgtgccgtgcccagcgatgcacacttctcaaaatgatgcagttaggaaagtctcaaaagataggagaagggatgaagcaaatgcccaagtttatatacgacagatagagaaaatgtgaaatttgaaaaaatgatggttgctatgaatatttattgagtaccaagaaggggtgtcttccacgaggtgcgaacagttcgaatcactcactgaggggtgacctgagtgttgggtgaatgagaagttaagaagatgtatcagctcccaacgtttaacttccatcattgcatgctttgtgaaatgttctcagtaaatgaagagtctgctta

SEQ ID NO: 78122 - DNA, 596 bp, Cannabis sativa
tattgaagtgtcatgttttttaagagagatgggtgtcgaagaacaagacttctccactcttccttgtcaatcctcccatcatgttttgtatcggcttcctcaaaagtctataacaaacaaacaactcacaatttagtatgtaattaatcaaatggtttcagtatggaactactaaaaacagaaagaatgtggtaggttaccttgtcgattatactttcaatgacatcgtccgataaattcatgccagattctgctagtgtagccactaccatttgcttcacctcttgcctttcgatgaagccttgctgtttgagatcgtacagctgaaacgagactgtgacaggaaaacagaatatgaaaatgttgcaattctcattctcataccgaaaataacagacgaaaaattctattggtttaaaaggaagtacattcaatcttgtcatcgataggggcattggggtgaaagacagaaagggcacgagcaaactcttcgaaacctagtattccattgtgttttatgtcgaacaagtcgaatacctgaaatttaagagattatatagcacacagcttatgaaaatactgaaattgatgtcaca

SEQ ID NO: 78123 - DNA, 578 bp, Cannabis sativa
cattacatcatctcctacggacccaatattaagattggcaagagtatgacgttcatcaactaaaaagagttcatgggatgctaaaggaggcaaaagacttttgcgaaggaacgtacacccctgttttcaacaacaaagtcatattatcttgtataaactatcaaagatttagcattactaagagaagagtagcaagtaaagagatacctgacaatagaccacgtctttctctcagtcacaagcctcacctcgaccgattaatccagtacaatgatgttgcatccatatgttagcaaatttaacaaaaaactcaccttctctttctttaccgggtaaacgaaatgtgtcgtgagatcgttttgagagttggaaggaatccaacaaacatgactattttgccctttctaaatcccctatctttcaatcatgaggaacatgttgatcaaatccaaattgtctagccaatacacgatcaaggcgatatgaaatgaatgaccaagataaagatttcggatcatctcgaaggcataactgtggtcagggaagataaacaataaaccaaaatcctgcttccccag

SEQ ID NO: 78124 - DNA, 528 bp, Cannabis sativa
agatttgctttgggttttttagaaggtagaaaatactatgcccagcccattatgtctcattatgtttgaaattttttatattaattaagatgagattggaaacttccttactatgagtttagggacggtgtggcacgtagctaccatgcaatacctaatcctcatgtaatttctaacaactattttaacttattttgcttaatgaattaattatttaggtctaaataaagatatgagaaatttggaacataatatttttatcctacatgtctaataaaaattaatttgcacaatagacactgacgtgaaaataacacactactattacgtggaattggcgtgaaattaaagtctaataagtgagcccaattgtgatgaagattgtctttcatatgtttacatgtacatagtgacgtttaatttaatggataatatcggtaatattatcttaattatttattttgttatagttaaccacacaatttgatttttgggagacactacacaaaattttacttttagtcacaa

SEQ ID NO: 78125 - DNA, 653 bp, Cannabis sativa
tgggctttctgtctctttctcgcctggcgagaattaggcttggcttggttagtagtgcacgcccattctgcctcgctcggcctgtcggcccgctctgaagaattcatgggccaacaggttgggcggacgaggaccgtcgaagaagtgcctcgacgcgccgcaaccactacttcttctccttctatgcaattatgaactctggcttctttcgtttggtagggcgaagaaaggctactttaatctaggaaacagtcggaaactcgagagggtcgcctttggaagcatttgccggtaaccaaagcgtcactccttccttttgattatgtcgtgactctgattgaatccaatccataaacccaaaaacaaagttcgtttcctttcgtcaagtaggcatatgaaccacttttgctttgttttagactctactggaacaaagaaagaagggggcagaatggagaaaggaaagggacaagggaagatccatttcttttcttcttcaattgatcatagcccactaggtgtgaacctcacccttgataaacaaaataaagaggtacttgaacagagggctgtggaaggccaggccagcagaactggcatctgtttgctggattgatagcagtgtgagggtggttatagattagagctcagaa

SEQ ID NO: 78126 - DNA, 1815 bp, Cannabis sativa
  modified_base (854)..(858): a, c, t, g, unknown or other
ttttttttttttttttgcttttagttaaaaaataataaataatatcgagttgagaattaatttattttatgacttttctagttcatctcaacaattctacaaatagtttagtgcattaattttgtgatagaagttaatatagagtttgatgcattaatttttaatatatataaatgcctatatattttaaaagaataattatggcaaaagtccttaaaaatttagggttgatgtagattagttctcaactttaaaaattggcagtaatagtttctaaggtcaagttttctggtagaggtattcacggattgatttggtctggattttcaattttttcaaactaaaccactattgcagttttttaaaaatttaaaaccaaaccaaaccaatgaaatgatcaaagtactcaaaaaccgattggtttagttcgaaccattgttcgtatttcgtagttgttctatttttttttacaatgatggttcatttttttagtattttttttttacttttaataagtttataatacataagtaataataaaaattattatcgtaataatataaattcaatattaatattctacttaaagttgttccaaaatattaatattttgttcaaaaaaatatattaaatatatataataattatacgaattggtttggtttgaaccgataccgaaatttctaaaactgtgaccgaaccagaaaatttaaaacggtccagattggtcaaatattttacaccgaattcatttggtctggtctcaaatggtttggtccggattagttggggtttggaaccacggattatggattatatgaacacccttattttctgtaagtccgttggtcccnnnnntaactgatccgttaaacccaaataaaatgccacatgccaattttttattgatctaaatattaattttaattaaaattaaaataaataataaattaatttccttttttgaaaaaagaaaagcaaataaattattttaaacttaagtaattaatttatttttatttattttttcttttcaattttttcattctcatgacccttgctcttcttttccccccttgtcttttccattctcaaccagttttcaccatttccactcaccgttctatctctcttgaaccccaatctgaccagccccataccatcgcatcaccccaaaattcaagtcttcgtcctcaggttctcctggacttttccttcaacccagcgacgccatcatcacatccctttgtgcttcggttctcttagatccattcgagctacactacctcaagattaatcgtcgtcttttgtttgtacaatgccctttcgtccccatgcttccctttcataccccgttcttcttgctgctcaaattttttttttttttagcaaaataggtttctagcgaggggtctaaaaatgcttcatcgtcgaagcctcaccctgaaatggctccgatttgggtatcttcgaagtctgacaagccaatctttaattttgaatcgatggttgtgaaaggcggagaataagagaagatgctgagcaaagagcttgcaaacaaataaaaaataaaggtggcagtttagcatattaagatgggcagtgaggttgttccttggcctctccatcaatggaatttccatggccatggacgagtttatctacgaagaagaagaataaggcgagaaaaagcaaataaaaaagaaaaagaataaaaaatgttattatttttattcatttattgggtaaatactattttggaccctctgttttacaaaagttatcaattggaccctgtgttttgttaaatgacaa

SEQ ID NO: 78127 - DNA, 560 bp, Cannabis sativa
ttgataaaaacaaattgaatgctcaataaaatgcacattaattaaaaaatattttgacaactaaattgccaaaaaaggacctaacatcgtgcattcctaacatctgtttatgataacgaaccttggtgcttggggatgcatgatcttcattgataaatgatacttgcttttgatagtaaaaaaaaataagtgaaaatatgtgataaaaatatgaaaaaaaaatcatactatatattttatatttttatgatttttttttataggttttcacttattttttttagaaaaataatattacttttacgttgcttttgtaacaataacgctaaaataacattaatttgaaataacacaaaactaacattcaatctgtttgtaaaaacaaatcaggttacattttgataggagcaacgtcaaacaacatttttttttgaaaataataaaaaaaataacattcagtattttataaataaaaaaacttctataaaaatgtaaaaaaaaagaagttaatccatattatgaaataattcctatatttaattcacacatgttagtttgca

SEQ ID NO: 78128 - DNA, 511 bp, Cannabis sativa
aattataggatcttgtcccataaaaaccaaaattttttccatgtaaaaccacattagagacaagggaatggatactaggattagggtaagtatgcccgtgttggttaggattccgagttttcgatattgctttgctccatatgcttgtccgcatagtgtttccaatgcactagacattcctaactggttaacatgaaatgaagaaatcgagatcaagtcagttattagagtactcacaatagataatttttttaatttttacaaaatttaactaaaaatacactgcatcaaatacttcgataattttaaaagtttttcaaattttaaattatatatatgtatatcatttttttttataacttacaaaataaaaagtatcgtttataattacttaaaacttataattgaaatcgatatttagtttagaaaaaagaaaaagaaaaagagaactaaaaatgtatcacaaaaaagcttaatgaaacgttacgtttcatcaagatcccatctcaaa

SEQ ID NO: 78129 - DNA, 673 bp, Cannabis sativa
tattcttggaatagaggtacgtaactaataattgatttatatatccttattgtttaaatatatatacatatagtttaaattaattaaataataatatatatttttattattgtagaagcaaatcttctatttcttgaatcacctgccggtgttggattctcctatacaaatacaagctctgaccttgaaaactccggggacaaaacaacaggtaataattaataacttaatataattgccattacttattaaattatgtattaattacacaaataataataataataataatcatatcacaagtgtgttttagtatttctctaacttaataatattcatttaaactaaatcagccataacaatatcaagtaagtaagtagtgatgctcaagcattactatatagctagtactaccattaatttgacaacctgaatggactgtgtggattaattctagaaactagtactttttttatattaatataataattagtggttatatatagaaactacttatttctatttgtcaatttatcaactaactgtagctagggacaaattttgtgacatttatgcagctgaggatgctctagttttcctactcagatggatgtcaagatttccagaatataaatatagagaattctatattgctggagagagttatgcaggt

SEQ ID NO: 78130 - DNA, 914 bp, Cannabis sativa
tgccaagtgtgaggaaattgatgtagcccatgcagctgtttatttgggctcagatgagtctaagtatataactggtcacaacttggttgtggatggtgggtttactagcttcaaggatgttaaattaccttcccctgatcagttcttattgtaagaattataattagaaatttggttttttgaattatgagctttttggggagaccctaccatggctatggctatggctatgactatgtatttgatgtatgtttgcatttgatacttctggctagtgaaagaagtttactaacaaacttatggaataactttatggcatgtgttttaggtactgggaattactaaaaggtactgccagacgccggtgtttaacacccttttcggtatcatatcgttagtagtgtgattaagtatcagattccatataacttaagaaaataattttttagagaatatcgttaaccaatcataacatgtcatctataaaaattgttgtataccactgatgcccaataacaatgctattgaagtaagagcaacgtcaatcattgataatgaccctaataaattatgataacgagaaaacaatatcatatcctaaaccaatagattaaggagattagttaatatatttatagatatttatattctaaacatgctgtagagcgaaactacatatataccgataacttggaacgatcactcaatttgaaattaggactagtcctaaattattttgagtcaattaggttaaaataatttgtttttagcctttatatataaatgattttttcatcaaataatattaaagttatttggtctagcggtaatttttcatcaaatattattgtggatataaattacctaacaactatgtgtaaggtgaaaatataaaaggtttttttttttttttt

SEQ ID NO: 78131 - DNA, 1588 bp, Cannabis sativa
aaaagttcattcatctttctgttctttctgatcatcggagtaagcgaaaggaagcggcaacgatctgaaagcgcggtacttcccaacattgttcaggtgctcgttctccaatctgatcaccaatatccatttacattaatttataatatatatagattttgttcaaaattttaaataatttaataaaatttaaatattttgttgcgtacagtaaatcattcaaaataatgtctaactataatatacaccacaataaattatgcatgaatgtatagagatgaacctgaagaagttccaaatgccacgacgaataatttccaaggagaatacagtggttgtgattcccattctatgagttgagtgtagattaaatgctaacaccaattgcatccaagccactctcaataatatatccaacacctgttattatacatcaccatacctatataattaaattgtttgattatgtaatttaaatgataaaataataataataattacgtacgtacgtacgtaccatagcaagaacgtagacaattttgtgtgagactataagtttgtctcttaagtagatattcttggagtgccttctcaagaggccccaatcaaaaacgatgtcccaataaatattgaccaaagtggctacggctgagctaatcaaagcaaagaccatccaagtcattgactcctttctcagttcatagatagttctaaacaccaccgcaataattgttgagaggtacgtcaatgcattgtatccattcattttatctctaccctcaattaatcgacgaatgcacttcatttatgaggaaatataaaaatataataggacatcagtattcagtacagtacccaaaaccacaatcaaaattaacgacatcataacccaaaaattgatcaaatcaatagccaaattgccacaacgcccctatttatagattataaatgttaaaattaaaatgaaaatatatgctacctgaggtggttgcagtgtgtgaattttggggggagaatgggtttaattcaactttgtattaaagtgtgtgggattccagataaaatattttattggtttgagtgttttacccgaaaaataaaaatatattaaaaacataattttgtttttaagttttccaaactcttattctcttatttattttagtttgggattaccaaccaatcacaaatttcattttcaaaattccaaaataatgaataacatttacaaccaattaatttctcatataaaattttaaatatttgtctcatattccaacacaatttcaattaatattttctaaaaaaaaatttttttagcttttttaaagaaacccttattaaaaaattaataaatatatttatttagaaactatattttgatcataaagaaacaaaacaattagaaagctatgagaggggaaaaaaaaaagggagaaaatgatatgagaaaaaagaatgaatgagaaagtggccagcaaaaaagatgaaagagaataatttgggaggaaataattagagctaatattgagagaaaatgtgatgaaacatgacaaacactcttgttttcacaaaaaaaaaaaaaaaa

SEQ ID NO: 78132 - DNA, 669 bp, Cannabis sativa
tccaagttgtctagctccctcatacgaaatttaaaactctatttttgtgtaagtttttgctgctgcaaagagtggacctcttaaatgctttgtatttttttttttttttttgaattttatttttaggtttgacaagaggtggaagatgcagtagccatctgttatttctgggaacacttctcttgttgctttgatgatgcttttatgtctctcagagattaggcattgatcttctcgaaccctaaatgcttctttttttttttttttgaagaaccacttctaggctttatcattcttataatcaacaatacaatatacaagtggaaatatttttgattttgcatcttatgtgttggctgtgagcaacgtgcctccatacgcgacctttaggaatgtgccgtcaacaactatgattggcttttagtttggccaacctttaacagcagcatttaatgcaacaaatgcatattggaaactattatcttcttgtttctctatgtcaattattattcctgtaatttaagcagtcatttgtcggtaaaagtaatatttagcaactgttattcaaccaattagcaacacaaaaacaacgtttccagtttaataaatatatttcaaaaacttattttttctagtacctagatttgttttttgtagcatgtacaggta

SEQ ID NO: 78133 - DNA, 601 bp, Cannabis sativa
tattccataaaagaaattaattttgatgtaatttactctttaaccattgatttattgtgaatggcttttacatttttaggacagactattcttctcttcattttttaggcctcacatatttttttaaaatttttttgaatagttaattttaaataattataatgtatactaagatggaaaaaaaaactttggtagatatcgaaacagatgaaactgtaaaaggagaaatgctaaaagttaatagtagtgcttagcactcttcgggtgtcatatcagtgtaattaaaaattggatatcatataatttcatatattaacttttataaaatatcgttaactaattgcaatataccacctctaggtgatgctagtgagcaccactagtgcctagcaatgtttggtgtgaaaatgataactaacaaatataatatttaatggctaaatactattttaaaccatatgttttgaaaaaattactaattggattttctattttattaaataaaacgtgttacgacaaaactgattatattttctgtatttgctcgtgttaaaaattatcttaaaattagttatattaaaaaaaattatcgaaaattgag

SEQ ID NO: 78134 - DNA, 659 bp, Cannabis sativa
attacgttatatttttttgactaacgacatttctgtaaattagatcataatttagtgtgtagatgtaattttccctaaaaaaaacaggtatatttcaacttacctctaggccagttctaatccagttgtttccgctatgggccaactcggcccaaatttgatcatgtcaggccaacccagaaagttactgtttcaaaattctgacaattgataatagggacggggacccacttacctaaaaactcgaacaaagtgatctcaaatgtcagaactcacaacaacacacagttccacttctgtaacacaagacattaaaaagcattcaatcatgtattataatttatatgcatgccaatctaatcttcctaacagattttgtacacccaactcaatcatctcttaaccaggttctttctttctttctttctcttccatacttattgttttgcttatttatttctcttttattatataagaagatatatttacctttgtttaacagaaaaagcatagattgcaagataagtctttcaactccaactattttaaaagtctttttattatcatggtaaatccaatcactttaaattatttgttccaatgattaattcagaaaaggggttgggttgaattaattttaaatcattaaattagcttta

SEQ ID NO: 78135 - DNA, 1639 bp, Cannabis sativa
  modified_base (1608)..(1612): a, c, t, g, unknown or other
tgtggaacaaatgggtgtataagaaaaaggttatggtagatggatccttggatagacttaaagctcgattagttgctaaaggttttaatagactggtgttgattactttgttaccttctaccctgtagttaaagaaagcaccatcaaaatttattttactttagcaattacctttaattgagaaatccaataagttgatgtcaataatgcctttttgaatggtgatctcaaacaaacagtttatatggctcaaccacaaggatataatgattctcagttcccaaatcatgtttgtaaactccataaagccctttatggcctcaaacagtcaccaaaggacttggtattataagctcaaaactgcatttgaagcttggggatttaaaaaatctgtttcagacagttcactattttattcaaataaagacaatcacttggtgtgattgtgcttgtatatatatttgatgatatacttgttattggtgtcaattctaagagtatttaataggttatcactaatcttcacacacagttttccttaaaggttcttggacctataaattattttttgggtttttaagtttcgagtcatggttctactcttcacttatgcgaggctaagtatgctcatgacattctccaaagaataaagatgcttgacttaaaggcctgtaccacaccaatgagccttggcaacaaattgtctacttcgaacaatgaaccattcttagaccctacactctatagaagcactataggaggacttcagtatctcacacttactagacctgatctatcatttcctgtaaataagcccagccaattcatgcattctcccacaaccaattattggttttcttgcaagagagttctcagatatatccatggtacactttgtagagatttagtttttcgagctgcaaagaggatgtctcttaaagggtttttagatgctgattgggcttgacattgtggatagaaagtctgttacagctagcttctgtgttatgcttgaagggaatctcattactttggcctctagaagaaaaaaggttgtgtcaaggtcgagtactgaatctaagtatagggctctatcaaccactaccacagaactagtttcgatctcttctctcctccatgaacttggcattactttgcctcagaaatccaagctctcgtctgataatcaaggagctcaaacgttggcatccaatccaattttttacttaagaacaaagtacattgaagtcgatgttcattatgttcgagaattggtttgaacaaacaaattgatgtatgttacattacttatgaagaacaacatgcagacatgtttactaaggctgtaacatttctcaaattcaagtttctttgtagcaagctgtccatggaatatttcctgaacatcttgagggggcgtgttgaggaagtcagtgacagttgtgattacagtctagttttagttaattagctagagtcttttctattaaattgttaagtggttaagtgttggctcttgtttctcttatactctttatcttctttatataagcattgtattcctcaatagttggtaatgagaaaatcattacaaaaaatcttactttnnnnnacaacaaaatttgtgactaaagataaa

SEQ ID NO: 78136 - DNA, 653 bp, Cannabis sativa
aagagagcatgtgttacagtctcgggagaggctttacagaccgggcattgtgtagaaattggaacatgctttgttacaagatttacacaagttggaagagaatcggttatagcacgccataggaagtttaacactttaggtgggatttttagatgccagaattttcgccaaaaaccggagttgttgcttgttggggctgctggtttttcagattgcagcagactataggcactacggacggtaaaaattcctctatggtcagctgtccaagaccagaaatctgatcgtggagtgctggttagtggtataccgagaatagcttctgcctcatgaggtggaaacaagtccaaaacaacctcgggatcccactcacggtggtcaatctgcatgagtgtactgactgtattattttgcaaaccagggtgagttgaagttgtgtatctgttatggggaatcggcagccaaggggaacccactatactagtagtagtgccatcacttataacccgagacgctcctagacgaaccacatctttagctccccaaatgttacgccaaacaaagcttgggttattgccaagttcagctgaaagaaagtcagtatgtgggaaatatttagctttgtaaactctggcagcaagagtgttggggtt

SEQ ID NO: 78137 - DNA, 501 bp, Cannabis sativa
attttactctcttcaagctcattcgaaaaataagggtctagttccctttaaccatcacaagaatgtcaaggacttcagataatgatttttcttttttttttttaccttttggcatttgaccatccggttctttacactgagtggatcgagattggtattcattatgttatgtcttttctgctttccctctctctctaggtgaagtcttattataaaggttgtctatgtagatcattttcatagaactactcccacctagctcttcaaggaccatgagagggtgttccagacctttaacaaggagaagctcgacatgggtgatttggttaccacggccaactgccagaagacgggtctgctagtggccccaagactattaaggatgaggatctctccaagataacttgtcccaatatttgaaacaaactccaagagaatacagatcgggagaccattattgctgaagctgagaggagatataatgcctactagaggtgcaag

SEQ ID NO: 78138 - DNA, 842 bp, Cannabis sativa
  modified_base (67)..(71): a, c, t, g, unknown or other
cttatattctgcaaagtaaaaaaacttcacacatatatagttatgaatacatatatataaataattnnnnnattatttaatttaatattattaatttagttgtttaaaaaataattgatttaagatagatatttttcttaccgaagtgagtgcaacaaccaaggtgcttttgactacagaccgaagtgagtgcaacaaccatatctctcataccgaagattgataaccctcaaggagctactgactacagaccaatagcctgctgcaccactacttacaaatgcatttcaaaaatgatttgtaccagactctcggaagttctcccggtccttattcatgaaaaccaaggtgcttttgtcaagaagagacttttagctcataacgtcttgattttgcaggatcttctaaaaggatacactaggaagaccatttcttctagatgtcttatgaagattgatttgagcaaggcttatgatacggtagactggtgctttgtggctgatatgttaaaagctcttcgcttcccttctaaatttatcacctggatcttaagctgccttcacggagcttcttatgcccttctgcttaatggaagaatccaagggtcgtttaaaggtgaaaaaggccttcgtcaaggggacccgatgtccccgcttctctttgttattataatggaatacttaaccagacttcttattcaatgttctaagaagaaagggtttggttttcacccgttgtgcaaatccttaggccttgtcaacctgtgttttgcagacgatctcattattttctgcaagggcaatgacaagtctgttcagatggtgaaaaatgccttcaatcgg

SEQ ID NO: 78139 - DNA, 1764 bp, Cannabis sativa
taaacttgactgactaagtttttagttctgcttttatgatctcaagaattaattctcaagaagttgtcaaagcttactttttgtaaaagaactttttaaagctaaaattgaaattcattagaaattcaatcaacaatctttcaaaaaatttaaagtaacttttataagctcaaccaattagtcgttacgagaaattaaagtaagcttaaataataaatcttagagagtaagttatatatgttttgacatatattgttttatatacaaagatatatgttgttaggaagagaaagataaagacctggaaatgaagttggagatgaatgaatcagggtgaccaaatttgaaagcaatgagaaaagagcacatattaccaatgaaaggccaacccatatcacctggaggcagagaacactgtattcttctactcaccatgcttatgtgataccactcattagctctcttcattaggaccaaatttaatgcaacaaaaccacctatcaaagctgagaaaacccaaagtccaaaatttattaactccattttcaaataattgtttttgaatttcaaaaataaaaaaaaccactctaatatagtactgacaggttaagaggcctaatcctatttacacagtacttgtgtctagtcacattttttagactactctttctcctctttcatatatgtatcattttcaatgttatgcttttggaagaacttatcgaagaagatgcttttgataaataataataataataataataataacttcatgaatgatgtccatttttttgaaatacaataaactattgttccaattggaaaaaattaaaaaggagacgtatggataatctcttagagataagataaataggcagatccaagtctacattggtatgtatgttgtagtatgggtggtaatttggaaatagaaattaataactttaattgacaatttttacacactttataatataatttttttttgagaaattactccacatactattttttttaattttttttttttcatttttatagtttggatttctccagtattttttatgtagatttaagttgctttgtgatgtgaatttttgtaaaaaaaaaaactactttaaaatataaaaataaaaaatctcttatacattagtgatctaatatttatatacttaaggctaataaattcaatttccacatcattttctaggagtatgtctatgatctataatcaaaatataaatagaatgcaatagatttgacaagttttttaaaaattactataatttaggggaaattgaaaactattgagttaacacaatatggattatacatttatacttacatccattttacccacattttaataatatataatttaaaaaaaaaaaaaaagaattttaaatatcatatacatacactcacatcaacttaatcaacttcttattataatcttaaataatgtttttttaaaaaaaaattaataaaataggacgcaaagtggctttaaatcttaaattataataagtagttgaatatcttaattgaaacaatccaatatgttcctggtttttgagatcaagacacttcacctaagtaaagaccatcttctggtgttttgttctttctcaactaggcatctacttttgcagattttaatgattccatagctaaaaatatatataaagtcaattagtcaaacactctaagacaatgacattttcaactacatttcaatcaatatttaaatcattttttcacatg

SEQ ID NO: 78140 - DNA, 3227 bp, Cannabis sativa
  modified_base (3195)..(3200): a, c, t, g, unknown or other
tgcatgatgatgcaagaatcattggaacaagcattgccagggatgttagaaaaaggataaggagatattaatgtaatgtaacaagttaaacagtaagaaaagaaaaaacattaaacaatgacaaaatcctgcctatacccgatagatgctaggaaaaggtcatccaccctactcattttcttcatcatcttgtgtgtcatcagcacttaacagatgactaagcacaacttttttctttttcggttctactgtggcttccttagagtcgtcttcatcactctttctcttcaaaccttgatcctctatttcaacatgtgcagattcagcagcttcactacaagaattatcttctttcttttcaaatgactgctgattagattcctcagctttcagttcatctctatgatcaggtttaaaagatgaggttttacattcctccaaatatgagcgaatttcatcattgcttgctaaatcaagaggggtcttccctgcttttgtcttcaaactgagatttgcacctttctttaccaaatatttgacaagttctaggtgagacccttggacagcatagtgtagaggagccaagcccttccgagtgatagctttgatggaagcaccagatgaaagaagggtccgaacaacttcaagatgtcccttctgggcagcaaagtgtattgcgcccatatcatccatggcactagcaccaatatctcccccatgcttgcaaagataactcacaacatcggtttttccagaccatgcagccagatgaagtctgttgaccaatttgcttgttaaagaaaaaaaagattcatgattgaagtgctaacgtaggaaccagcaataaaaagaaacagcataacttaaatagtcaagacacacaataaacatgaaacatttctttttcattttaaaagaaacaaaaatcaaagtacccaatagggatagctcaaatggtcaagtatgtagtttgcttccataatgtcttggattcaaatctctcttgggttcctacctagcaattgttgtagtatcctaatcctagtcccaaaatattgtaaggatagccaagacgcctagtttaaaaatcaaataataataataataacgcgtagaaatgcaagaactaccaatatagagattatttggtgtatatacataaaacaatcactgcaggtgtggttgctttctttaccaaaagaatctttcaagagatatttatgctgagcaagttagagccaggaccagaagtacccagaagcctgttaattttccaatggtgcgtgataatataacactatctggtgtctgaaacaatttgtgacaatccactccattatatcatcatcaacaaccactaaactagactctgatgacttccaataagattcacttatgtgaggtgtaaaaggattaaaactaattcagattagttgtacagctgttgtactggttttgtgtgttgctattggtcaaatctattttggctgttaagagaacagtagtgtacataatttggtttgtgtacaaggtagagttagtctggggcgaagtggagattggctgtctcgaataaggcactgtaattgaattgttctcttgtttgagactaggagttgaaaaaagaaaagaaagaaaaaaaaaaggttgtattgggcactggttgggttctataagagtccctgcaaaaactgaaattggattttaatttttgaaaatctctagtttcatgtgactcctctaagattggtaataaaaaaggacctgcaagtgtggggtctttaagccaatccgctatatatgttgaaaggaaaactcttgttctgcactatcttagaggcaatgtttttgctagaaaagttaaatttatatatctttaaaattataccaataaacttactttcttgtgttattgttataaaaagatactagatcagaacacataaggaccaactaaaactcttctataaagctgtatcaataaactggcactagccgcactaccctcaatctaggagagtacacagttaattgattcaagaggatctcctccacaaaaaaccaatccaaaactgttctagactaattgtctccttaacaacatctattgccccaaatgtatctatacaattaatcaaatgtatttaaactcaaccaactaactgtaaaaacaactacccatacggctatctcttatgtacagatcacttatcatggtatatttgtttcaatggtcatgtacaatggagctaaaaaagtcagaaaaaactagtccccttgagccatctgaatgctagttggtatgtcaccaaacggatgttttccatttcaatgaacaaaatcaaaactctctagtacacatctattcccttcctaactcaacacgcgtaagtaactccaatccttcatctataaattataaataagaaaactgcacaagaacgcaagggtgtcttcttagtttcaacaacaaacctcctactcactattcactaagaatctgaaaataaaaaacaaaatctttcacaatcttaaaacccaaaggccataacaatttatactttctgctatttattaacatcatatgaccataaaatagccaagatagcaacacccatcatctcgaacttcttactaagatacccatcacacaagaattacttgacgaagttcaaaggttgaattttggtacaagtgactgtaagtaggcaacagacaaaacccttaattacataactagaaaccgaaaaatgaacagatacactatccaccattatttgaaggaagtttcaactaagaatataacaattgaagcgtatatggaaaagaaagaaaaaacaaaatgacatgaaatcaaacaatgtatgaaggtaaaagaggaacaaaggatacggagttctggagtgcttatctcgagaattgatggacaaaggatcagcagcgagtattgactgaacagcgcttaggtcgcccgacctcgccgccgagtggagctcttcccccttcttgctcatcttactttcccagttcttccccgccttttttttgggatgttgctgaaattgaatagtactgaaaataaaaataacagcatctgtgtatatggaaccggatattcattacgctaatgacattattactaataagtaatgagaataaagtgaggtaatcattccttatatatatatatatatnnnnnntagcaaaaactacgtgcgaggcacgta

SEQ ID NO: 78141 - DNA, 595 bp, Cannabis sativa
aagccaatgacaacgagtgtaagatcactttcttcctcacatttattattgtgttattatattctaatgaattgctttaatatataaattaatattgtagaaattcatatgatatttgcacaatatggttggtatagtcaatattatatattgataaaaaatgatcatgcactgtttcaaataatatgcgctaaatgctttatcgggttcttcttcgtctttcatctcatatgaaaaattatatttaattccaagattatatatgatgataatttgattaatcatttttttgaggtattatgaatttggatccatattcgtgctcatcataacgatgttgttgatatttttgatttcgtacatatttaaatttgttggtacaaataataagccggttgggatgttctttctttgttagtattttctaagttagcccatttctaatcatcatatgttatttgttctatgtcaaacattcttactgtctggaggaggttttacgaacagtctgattgcattgtttgacgatgatagcaaatacagtgataactataacctttgaagtgaagacagttgctgagcgttgtttgagtgc

SEQ ID NO: 78142 - DNA, 903 bp, Cannabis sativa
ttttataaaaatacagtatttttgaaaaaaattccaccctaaagtataaaaataaaaaagttaaaaatttcactatatagtgtaattatctttttttttagaacaaatgaaatggagtttaaattgacgatcaagtccatttgtgaaaataaatttatttttaatatatttagaagaaattacactacgattttaaaagttatttatttaaatatgatacttttaagtttgatcaatttatatagtatttttttgtttttaagtatttctatgatatttgatatgctatatatatatatatgtaaattaggtttcaaagcccatatttaatgtttttatttatttttaggtagtttatttgatgaagaaaccaaattcttgatgaaggatctttggtgattgattttgatcacatgagaaactaaggaatttgaatcgcaggatagataaaaaaatcttgtgtggctggaaagagtagtttgatttttgtattttttcgagcacctctgttttactgtaatagagttgcttcaaaactggatttataagtttttttttattataaattttacttttatataatcaacaccagtttcttaatgaataaaccaatttcttgatgaagaaatcagtttcttggtgatttttccggcgacaatgctaattctgacgacttttccagtactagcagcaactctgacgattttttcgacaccagtagctgctccgacgacttttctgacaccgacagcaaactcctgcaactttttcgtcaccagtggcaactctggcgatcactgtagtttcatttgttttattttttaaaaaaaaattatgagggaaattttaatattttttatggtaatataaatgacatattccatgtatgttaagcatcatatt

SEQ ID NO: 78143 - DNA, 695 bp, Cannabis sativa
catatttttatactcttgttcttgttttgaggatgggtttgaatatttctatttggttgtttctggttttgttaatgatcgaattatatggatatttttgaatattttattgatttgagtcttatgtgaagatgttcagtaattgtaatgaagaacaatttttcaattcttgtttttatcctaaaattcttttttctttttccctccattacaattttctccagtttgctaagttttacgtttttgttgatggagatcttttcaccacttttactattttatttcaagcacgtttttgcagtgaattgttttgaagttttgtatctttaagattttgttatgattatttattttattttttgtttatttttattacagtatttatttcctttttaatgccataatttttgtttttatcttttcttttatttgtttttatgattaatttagtttgtttattttggtgaagactaaaggttttttctttgattgctgtgattatatttttatactatatattaatattttaagaaaaattaatttcgtaattgttgtataccatatatatttaagagaaattcataggcacttgtattgataccatttataagtatttaaagacacattttaatttttacggtttttgttaaaagtcaacttttttgttttttttattatgttctttattatttcta

SEQ ID NO: 78144 - DNA, 725 bp, Cannabis sativa
tgtaaatatattttcaaatgtatacatttataaaattgtgtttttttgcacattttttgtaatataattgtttttgttgtacactaatgaaaaaacccccaaaaaaaaagtcccttaattctaaatatatcaagtcctatctatttttctaatcaaacattaatggacataataatttttttctagtctataaatgttggaatagaaatctcaaaaaaaaaaaaaaaaaatctcttaattttaaatatattatgtcccacctatttttctagtccaatattattggacatgataattttcttttctagtccattaatattggactagaaatctctaaaaaaaaaaaaattctcttaattttaaacatattatgtcccaactatttttctaatcaaatattaatggacatgatatattttttttatagtccataaattttggactagaaatctccccatatataattcatgtccaatattttttttgttggacataaaaaaggttatttgtagtagtgaatatctcccttatgtaacgtgttgggattatttagctactatgttcaccgaagcaataatcgtaaatgtaccggagttgttgggaaatatccaagtacctaaaagagctagctatatcagagtaattatgttggagtttgtgacagtcagtaatcccgtgatccataaggggaaacatcaggtaagctgtgcaatcccacaccgcct

SEQ ID NO: 78145 - DNA, 812 bp, Cannabis sativa
atagtgcttctctactacgtgtgaagaagcactatttattgtttaaaaaaatgtaaaataacttgataaaatatttaataacgaataatattagttttttaataaattatgactagtaacaattatcttaaataataatatgtaatttaattaagacatattcttttgaaaatacgattagagaattaaaattaaaaaaaaagcaagctaaataatcagctgtctaattaccagattgtttgacaaaaaactaaaataaaattgaaaaaaaattacaacatcatctatattttgtatcatccattgttcagaagatacatcattagaaactgttgtagcatgttcattcaacctcgtagcttgagcactcaactataaggtacgtaattgcacaacgaacactacattcagtctcagagaacttgttatttccaactactaacagcgatttgaaggcgagtcatcgaagaacataaaagagccaacaaaataaaactatgtcatacagacaaaattaaaacactcaaaattatgtcacagaaacaagactaaaacactccaaaccatatcacagagacaaaactaatcgcaatagcaaaaatcgaattgtagtagcaaaacataacccgaccaagccacacttaatcccaaagaaagaagggggacgagcttggttggaaaaaaaatgacctccaataactataaatttaaaaacaaaaaactctaattttttcctacttaaaagagctgtgtttttataatgaataatattatcaaactataaaaatatttactactcattacttcttctt

SEQ ID NO: 78146 - DNA, 642 bp, Cannabis sativa
  modified_base (445)..(462): a, c, t, g, unknown or other
ggagaaggtgctttcgtggcgaggattatggatttgttgtatcactactcggctgtgtacgactcgttggaagtaggtttctcaatgcagagccaggcaaggggtttagtgaagcgggttttcttggggccagaataattcctacccaccattacctggaagtccttttcaggcagggaatccaaagggttgagattttgagactcattaaacatgtttgttcatttttgaagttgtgtgtcttatggttatggaaacatgtcatttttattctattctatctaagcctgcataacatagtgtaccaatataagagcaccaagaaatggtattatcaagggggtttggtctggtctctcacacagcagaagaagaaaacaaaagaaagaaaaaaaaatgacaatttcttggtaatattacttattttttttataatttatttatnnnnnnnnnnnnnnnnnnattttttataatattttaataagtaatattacatggaccactaaaaatttaccacgtgtacattcatgtacacgtagacagttatatgtggcacttaactgagatttttggatggaagtgtgtagagcaaaacggaacctggatttagtaggttttgccgccaaaaattcaatttttgtg

SEQ ID NO: 78147 - DNA, 639 bp, Cannabis sativa
ttgttttcgcattgaaagtttggcgtcactctctatatggtgagaagtgtgagatttatacggatcataaaagcctcaattactttttccctcaaaaggacttatatatgaggctacgacgatggttaggactggtcaaagattatgactttgaaattctctaccaccctggtaaagcaaatgtggtagcggatgctctatgtcgaaaagaaccaggacaagtctttgaacttaagaagattttagcagagttggctgaggatatcactagagcagattgaattggtgattggaaaactttccaatattaccttgcaatctaatttgttggaaagcattagagtggctcaacaaagaataaggagaagttagaggctgggtcggaaaaagacttttcattgtcatctgatgggttattgcgatacaagaataaaattagtatattggttgacgaagatatcaaacaagagattcttaatgaatctaatactacaccgtactccttacactcgtggacaactaaaatgtatcatgatgtgaaagctttatactcatggccgggtatgaagagggatattgttgaatatgtgtcaagatgcttaacctgtcagcaagtcaaagcaaaacatcagaggccgg

SEQ ID NO: 78148 - DNA, 819 bp, Cannabis sativa
ggggagtgccaaatatcaatcgataagccattccccatgagatagcgggcctcattgtggattaggtctctaatactcaagatgccttttgccccaaaggacatagaattacgaaagtgggttgtccagaaagtatggccccttttaaagtacttatcccgaaaaaactgacaccataaggagttagttctggaggcgagtttccaaccaagcttagagaccaacgctagattaaactcctcaaatttcttaaagcttagaccgccccattttcttggcacacaaatagaatcccaatttttgagggcaagatagcagtttttatcaaccgaaccaatccaccagaatcgacgaatcaacttatccaattccaggaaaatggatctggtgatcatgaaggtggacatagtgtagatcggggtgctcatggccaccgagtgaattagagtagatcgaccggcctgtgaaaggagcttcgtcttccacccctcaatccgcctagccattttgtcaatgagaaacttgaaatcattggtcttgctcctcgagaagagaatcaggttccccaagaatttatcgtttctcgtcaagtcccaaaaccccaatagctccttgatttcaagtttaacatccgctgccacattagaggagaaaaccaaggatttgttaacgtttaaccgttgcccagacatatcacagtattggtttaaacatctttggacttccaacacgttttccccacttgcttcacagaagataagggtgtcattcgcatacatgaaatgagatagaggagtcccatttctggcgaatctaaag

SEQ ID NO: 78149 - DNA, 1231 bp, Cannabis sativa
aacacaataaatttgtctaaataacaatcaacaaatatcttcacatataagggaaattgtgtaccaaattcaaaagaacagaaattttacagtttcaataaaatttaaagtaaaagttgagagtattttcaaatgagtagacattcacacactttactgatatgtgttttcaggtacacagatattcttacagttcaccttttaaatgtttgtattggttatgtaattttattggagcaagaaatatcaaaaccagaaagttaaaatacacttaaaaagaagaaaaaaaaaatgtaatattgtattcactttgctttgagaatcaagggacaacaacacaatgcaggcagcatagaccctccaccaaaaaaataaaaaggtaaaggaataccattttcatactatatgactgccatttttgggcataatggcagaaacaactggacaaaataaccccccagaaaaaaaaaaaagaagaaaaaaagaaaaaaaaacatttgtcaaactcagtatttcaatttaccatttgcctctaactacgaccgagtaagagtactcaagttccattgtccctgagaaaaaaagtaaaacaaaatgagtcttgagaagaagaaaaaacaactctgatcattcatttttgttgcgaaccctttctcccaactaatcctcctttctcaatcattaacaccttaggattgatcggaattgttccaacagttaaaatgccagaagattcagcatttccattcagtttcagaggcactgaaccaactgtgacatcaaaagctgaagttatagagtcggctgagggcttcgggccgatactgagtgaaccaatttttaaggtagatacattgtcttttgctgcttcaacactggttttctcagacttcttctcattttgtagtaatgtgtaagtgacatttggttcggaggaagaaatattttcctttttcgagttactagggtcatcagttgggttatcaacattgtctattttactctgaggtagctcaacagcacagttcaacttgcggggcggacccaatgttggtacaaaatatggactttcaaaacttctaacgagtaacctggctttctcttcctgaataagtttctgacggttttcgtagtacatgaagtcatccagtaaagaagtcttcaacgtgtgatttttaaaaagtctcaacatgtcaatacctttcttaaacatgatctgcccaggaaaagg

SEQ ID NO: 78150 - DNA, 950 bp, Cannabis sativa
aacataaggtgttcatgctcacctgaacaaatcatggatgattgatcacaatatgcgaggtaatagattgatcgactacgagatcaccataaccattaatgttacctttttgttatatggagcaatggaattgaaacggaagtacggatgatggattagaatacgaaaaagtatgcgctgtaggggctttcaatgtccgaatggacatggaaggttctctaagaattcgctggccctactaactaggggaagaaacctatccttaacatcgattaattctggatataaaaatcgtttaggtgtagatggttgttgtgcgcaacagaaggtgttcatgctcaccttaacaaagcatggatgatttatcaaaatctccgaaaaaactagcttgatcggctacgagattaccataaccattgattcaactacttgattatatggaacaatggaatggacacgaaagtatggagtatgcatgacgatacgcaaaagtatgcactgcaggggctttcactgtccgaatggacatggaaggttctctaagaattcgctggccctattagctagtcgaataaacctatccttaacacccattggttttggatataaaattcgtctaggtgttgatagttgttgagcattacacaaggtgttcatgctcaccttcacaaagcatggatgattgatcacaatctgcgaaagtactagattgatcggctacgagatcaccataaccattgatgcaacaacttggttatatgaaacattggaatggacacggaattatggaggattgatcagaatacgcaaaagtatgaagtttaggtgctttgattgttcgaatgcacatagaaggttttctaataattcgctggccctaatagctagttgaaaaaacctatccttaacacccactggttttggatttaaaaatcgtttaggtgtagata

SEQ ID NO: 78151 - DNA, 3283 bp, Cannabis sativa
cacaagagggtaacacattagtcattacaatagacttttgagtcttaagactccacttagctaagctattagctacatgattacacatcctaggataaaaaaacagaagacaaatcctgaaaaagagtcttcaaatggtttatatccatcaccacttgcccccaatccgtatgcactctcaaatttgagttaatagctttgacaatggtttgacaatccgagcctaaccgagccttttgaatagaccaccttgaagccaactggattcctagtttgattgcagcagcttctgctaattggactgacaagcagcccggaatgtaagttacttcagccaccaccatccgccctgtattatctcgaataacagcacttaggccacagccaagcacccccagatttagagctgcatctgtgtcaatttgaaggacatctgaaggagttggagaccaggtagcaattggctttgaagggagaagaagaggctgctgctgttgtaacaccagctgctgatctagatactccaaagcccaatcaatccacacacggtctggagggtgctttttattaaatatgaagttgttccttcttagccaaattaaccaagaaaagcctataaaccttaagagtttatccttctcaaaatgatcccaacaccaccataaaatgtcagctggccgattcacctttggaggaagaaaattgaaaaaacccaccttttcccaaatgtgaagaacttgaagacatctccataaagcatggctagtgtcttccttatgagctttacaccaatcgcaataagtatccaaagagatacctcttttctccaattccacctttgaggggagccaattattgaacactttccaaatgaagttcttcattttaggggtaagtctagatccccaaacaaccttctaccaagctttggtttttgagttgtttgaacaattcgctaaatctgggttttgaaaagcgaagtttatagccactagcaaccgagtaatttccattagcatttagactccaagttatccaatccgatcgactagtattgggaagaataccaaggacccaaggaatatcatccttatggaaccagttgcccacttcatgatttttccaatttccactttctgttaacaaagaactaagagttacatccttaggaatagggaccttggttcggagagtaaaaggccgacttcgaggaagccaaggatcttcatttatacgaatagttctcccatctcccacacaccaacggtatccttccattaacaactctctcccccataaaatacttctccaaattgaagagccaaaatgacccaactttgcttcaaagaaactttcgttgggaaagtagagctcttttaggacccgagctagtaaacaatcgggattggtaaggattttccacccttgtttggctaagagggctttattgaaatcttccaacttgcgaaaccccattcctcccttttcttttaggttgcacaacttttcccaattaccccaatgaatcttatgtttattagagttagctccccaccaaaaacgagcaattaaactttctatgtcatggagaatacctttggtaattcgaaagcagctcataacatagcatggaagagcttgaatcactgctttgataagaatttcctttcccgcttgagagaaaagaccaactttccatccttgtaatttagcttctatcttctccctaattttcccaaacacttgcagtttatttttccccataaaagtgggcattcctaagtatttcgtatgattcttcaccaaggaaacacccatgcttgtagctagacttgttgccaaagagtctccaatcttacatcccacacacatctcagttttatcaagattaatactttgaccggaaagagctgcataagtctcaaggattgttttcaaggttaagccctcagttatattggcgtcaaggaagataagactatcgtctgcaaaaagaaggtgagataatttttgctccatagacccaaatctaagaccatgaagtctaccagcccgttcagcttcaaagattaaacacgagagaccttcagaacataatagaaaaaggaaaggagataaaggatcaccttggcggagccctctttcgggagaaaatttgcctttgatagaaccatttatgagtatagaaaaagagaccgattggatgcaattcatgatcttcattatccatctttggtcatatcccaagcactccatcataaccgccaagaagtcccattccaccctatcataagccttggacatatataatttgattgccattttttttccattaccatatcggcctttcctcatacaatggagactttcgaacccgagaatggcattgtcttggataattcttcctccaataaatgcactttggtttgaggagatcactgaattcatactttgtttcatgcgattcgctaaacatttggaaatcactttatagaccactgaacataagctgatgggcctgaattatgtcatactttggggctattttaccttcggtattaagcagattagagtctcattgaagcttcggtagtcagcattgttatttaacacctctaggcacgcttgagtgacttcttctccaacaacgtcccagtttttttgaaaaaataaacctggaagaccgtctttgccgggtgctttaagtgggtgaatttggaataaagctgtctttatttcttcagcagtaaacggctccagtagatgttgattttcagcaaggctgagtcgatgagggacacaattatggagagtttcatggagatccatgcctcggtttgctttggtgaagagctttttgaaataattaatggctatatgttctatctctgtctcctttgttttccaattgagggaatcatcaaacagccccatgattgtgtttttcttgcgtctttgggaggctttaaaatgaaaatactttgtatttttatccccatgtttcagccaaagagcccggctacgttgcttccaataaatctcttttttctcctcgacgcaattaagatcatgctccaacttttgagtagtaatccagtcttcttcccgtgttgagtttgcaaggctctctaattttcctttgagatctttagttctggctaacatctcctttttttgtttagcattccaagcctttagttttgatctacaagtatgcaacagccgagagagtacataaatcgaatccccatgttgtttatcctcccaagttttagttatgatt

SEQ ID NO: 78152 - DNA, 751 bp, Cannabis sativa
actaggcagccccagatatttagcgtgatgagaaacaaggcgaaccccaagtctagttgcaagaacatggccttgagcattgggcactctctttcccatacacacctctgatttttcgaggttgatttgttgtccagatagcttggcatatctttgaagaattgatttcatagtatcacattcagtttccttagcttcaaggaatacgaagctatcatcgacaaagaataagtgtaatacctttactctattcctcccaaactgaactccatttattctacccgccctctcggcttcatgaataaggcatgacagcctctcgaaacaaagcaaaaaaagatatggagataaagagtcaccttgtctaagaccccttgtaggtttgaatcgacccactttttctccatttattagaaccgaaaaggaaacacttgtgacacatttcattatcttatccacccatttctcctcataacccaatcctctcatcattgtgactaagaaactccattcaactctatcataagctttcgacatatcaagctttaaagccattttcttaccatttccgaacctctttgtcttcaagcaatgtagactttcaaatcctattatcgcgttgtcttgaatgagtctacctcccacaaaagcactttgttcttccgagatggcttggttaaggctatgtttcattcttcccgctaggcatttagctacaattttataaacaacattacataggcttattggt

SEQ ID NO: 78153 - DNA, 5306 bp, Cannabis sativa
  modified_base (3197)..(3201): a, c, t, g, unknown or other
  modified_base (4286)..(4287): a, c, t, g, unknown or other
  modified_base (4488)..(4493): a, c, t, g, unknown or other
tcgatcatgtgcaatatccattgtgctccagtatccagcttcccaccaaaaaaacttagtaacatacaccagcatcaatatagtattaacaagcatcgaatcagcgactttaccgttcacttcatactggcaaaaaagaaagaagaaataagctaaatactaacaaaagaaacgtatagtgtgcccatatagcaatctgattgtgaaagttttaaaaaggaagatcgggtctgatttagaggtaagaaataaccaccaaaccaactgcacaggcactcagtaaagtaatattaaatgttcttttttaccaaataaattttacaaagaaacaatctttgagcaagagggaaaatgatcgggctcaggaaatggattgtagagattttgtggcaacgcaatacaattttggcagtctaagatcacaatatcagatgattacatgctcccacatatttcaaattgtaagccaactaacttttggccccaaaaagtattggcacattaaccaacactataaacataagcaaagtggagaagaattaatgacataaacagcacaattcacaactatcccattaacgctacctgctttatgcaataggttacagctagaactgcccacgacatcattccgaatctacaatttgtaaaaactttaatgtcaaagtttttaccaatgcgaggatagagttccataccctgcaaaaaaggcaatcaaattcaaaaggatattgacaaaaagtactagtcaaggaaaggtagttatggtttgggaaattttcaatgatgacaataattacacacacttagtaatccagctgaacttaagttgctacatagcacatattctccaacaaattgaaatagtaaacaagacgataaaaacacttagcaaccaccaccaccaccaccaccaccacaattccactcaaagtcatttgacagttggtgccaagacttgtgctaattttattcttgattttggattaaaaagagacaaaaatgaataaatcaagcaatgaactattgttatttataattagtatttagacatgatagcacagaacccttaaataagactcaaactcaataacatctgataggttcattatgcttacaaagaatgtcacactccaaaaacctatcctattgagtaaacttagatgaagttatatcagaacatggcatcaacattcctgaatatgcatgcaccttcttaatctttacccattacagttttctcctaatttactacatcccaacgttagcgaatagaaaaacagaaatcactgaagaatcacacttacccaatagaaatcaattatgatgttccccgatgagccagaatcagaagaagacggtgccacatggcccttaaaacagaaagaaggaatctcaaaaaagtatccataaattcatacttgtgataagggagaaacattgtaatagttcagattccttacttttatgtataataaaacgcaaaacaccaagcttccgaaaataagggcagaatatatttctcccaaatgatcataaacagtcgaaggattgaatatgccaaacctgaacatggcaaaaaagtaagcactacgatatagtattagaacattgctcatatcaatcccaaactgctccatatcaattttaaactgaaacaaagcacagaatctaagttccaaacagcaattaacctcatgcatagttcttcaacttataataatgggaaaaaaataaaaaaatcaatcacttggaacattataaaatttcagattatctcgttaactaataaatcccaacattttactaagaatttgtaaataagagtaaaacagacgcctttatcaataacattgtaatgaataatgatgcacattagtaataagaattagtgatcactgcaataattcaggaggtgaagtctgataaacagaataagatgaataaaacctaagacattggttttagatgaaaagacactacaaaactgagttatagtgtaataacgtaatgctcttaaaaccaatggtaagccatcatggaaaaattttcttaccaccaaaggccaatataggttgtcagtgtcacaaaatacgctgccattccattagcctgaaaaaggggatgagctgagtaagaaaattacaatacgccgccttcaaaatcagcaaatagaaacttctgtgcatgtatgatgtatggaacaaagagatacaatttagcgtaagaccgaagcattgctagaaggttcaaggaatgtgatttaaggttgtatgacattttgatatggagatcatattgacataataatcaatgagtatcatgaacaccttgtatacaggccgatgccctgtaggagatatggggccctcaactctttttccaggtagaagtagctgaagtgcagcctcgaaagcagcataacacgcaattaacttccaagcagtggcagtaggtctgggccatatatcaataaatccttgcagcccatgctgctttaagtagtaaaaagtttggtaaatagagccatcagcatgtaccatagtataccatctgcattaagtataacactccgttttaatcactaaaactatgtatgttaaactaataataaaatacaatataacagctagctaaaggaggcaaatatataatgtaattaaataaagcattttttacaacttgcaaatatatagatgttaaagcatttttttacaattgaaaaaatgatagtaaaaactgcaataggaacgataatgaaagggagtccacaacccaattttaacatttacaatttgcacagaacgatgaaaaatcacaactttaattgtacctaagagactcattaagggtgaaattaatgtaatcaatataacttaacttctcagcaattaagtgtagtatcattctatcttattgttcaattccagaagaagaatatgtgatctcttaaacaagttttaattttgatttttctaattctgtttgtctaccatgagtaaaattagtaatatcaacgtaactaagacaggcccagaattattcctaatattttcctgcattttctcatcaaccaaacaggcattttgagaattaaaaaaaataagcattccatgcatactatgaagttatcaacggatctgagtgaaattcaaagttgatatacttggtcaaacacagagagagagagagagagnnnnngagagagagagagagagagttaccattcaaaaacgaaataaactatctcaagattcgaatctaaacttgtataaaacaacatcgtcaaaaagaaaagaatctccacaataaaaagaaagaaacatacaaatatatagatacatataatcgcatgaaatcacagattgtaaaatattcaaataaagtttgaaaattgaatcagagagagtaagagagattggttacagtagaataacgaatggtggacagagggagagaagggaaagcatggaagcatatgtgacgagggaggagtggacagtgttggattccgccattttcagagcttggattggagtgagtcgaaagatcttaccccgaacaggaccaggacagctgagagagagaggaaaggcgaggaggtagctccggtgaacccaagagagagagaaaaggcgaggaggtgagccaaccacgcttcaatgggtccgtttcagtttcaggcttcagagagagagagagagttaatcaggtttttggggaagatgagtggactacgggcctgggcttcgtgtctaaagcccactaatattacagcccaattctgaacctatttaaatgggttggtatttttctaaacccatgagtttttggcacaataattttaggaattatttcacaaatacatagaaatgacaaaaaaattataaaaatatatttttaccatttttataattttatttaaaaaaaaaaaaatagttcaacgccaaacaattaacaggtgtgaaatacaattttattcacccaaattctaggtattttgggtcaaaattcacccatttatgattgaatgggctcttttttataattcacaccagttaattgtttggcgttgaactattcatatatgccagaagatatattattaaattagactctatagatttattcattatagttgtaattaattaggtattacaagaaagtagataaataatattattgtgtgactatattgtccattattttggtgacaattttaaacagtgcatgtactatttgttggatacctaacccattagattagggaaatttacaaaaatacnngaatttaggttactttttacaaaaatactgtcacacggaaaagttttcaaaaatactatatttttataaaacactagtagaacacagagcagaacaactcaaaacaacagtaaaacaactaaaaaacaccagtagaacactagtgaaaacttaacaaagcatactgcagtatgaaacttataaaaaaaatacagtaaaaannnnnnaaataccgtctggcagtatttttgaaaaaaaaaaacaaaaattagtataccacttaaatttcccttaaattatgtaacaaacacttttctacactcctaaagttagtgaaccgttaattaattagtatctagaaatatatgtatacatttctttttaggtgataattaattttttttttttttacatcaacttaattaattactcactcttgtaacttttgtggtacgtgtatataagccctacaaagaaagaaaaatttgaaggcatatagaaatgggtcatgactcatgggtcatgtcatgtcatgacatgtgtgtccttaataatattagagattatgtatggtatggccatagttataaatgttataatataaatatttgtacataggtgcatgtgtgtgattgatatataagattttacaagatttaaggtgtttctttgtggaagcataatttacctaataaaaaacaagacatgacaaaacagggaccaaatcagagagagagagcactggattgactttgaatttgaagattatagagcgagagaaaaagagagaggtgatgggctaattgggttaggcccaaattcgtggtacccagcccatgcgcatgaacacttgtctacagccataaataataacaataaccaaataaatataattttactatcacacaatttttttttacaaaaattctgtttttttatataacaattgtaaaataacaaaacagaacaattaaaataagggaaatttgcggtaaaagtccccaaaaagttcagtttaatacagataagtccccaacctc

SEQ ID NO: 78154 - DNA, 938 bp, Cannabis sativa
ttattattattattattgatcatcgtcatcatctcattggatgcaaacccacctgcagctgcttgatgaccaccactacccgagaaaaggctgatccaatcgatttcctgattagggttagtgttattattcattagtaacgttgaggacgacgaggatggatgcgactggggcggcgatgagaagaggaaattattattagaagaaccaatttggggtggtaataacgatgttgatgatgatgataaattattagatgtaagtggtggtggtggtggtggtggaggcagtagggttgttggagatggatgttgatctaattggccttccatggaagattatgtataggatgatttatttgtttattaattattaatttcaaactagaataagttgaataatgagaagaggaaatgaaaatggtttgagtatggaagtttatataagctaggggtcgagtttactaggacgaaagaaagttttaataaatataggatagtggaaggtgagctaagaggttggactgacccacatgtacttatatattaatatagatatagatatagaaaaagagagagaattggttttgtagttagattattagaagattatattagggccgtagctaggggccggtacgtatatacgatctttttgtctcttacaagtattgcctaaacttaatttaagaacaaaaatgagttaataaaataaaataaaagttagtctaaacttgcagggtagggtaaaggccaactacatttcaactacttcggttcaactgccctgctagcttgttcaaacgagataagagaagacgtgcctctaaatgcatatcgttatcatctatgcatgaatttgcatgattaattctctgtttgtcttcttccattttattattttttttaattttgtttttaaaaagatatatatatata

SEQ ID NO: 78155 - DNA, 590 bp, Cannabis sativa
ttacagatcaagatgtgacaatagcaaaagcattagctgttaaatggccagaaacgtatcatcaaaatgttgcaaaacatttgagtagcatttttgaaaatttttgagaattatttaaagattttagtagatgcatatatgattatgaagatgaagaagcatttttacaagcttggaatgagatgctccagaagtataatcttgaagataatagttggttgaggcgtatgtttgctgtaaaagaaaaatgggctttggtatacggtagaaagacttttgtgcagagatggcaactactcaaaggtctaaataatgttataaaaaattatgttagctataagcatgatctactacgattttttcaatattgtgataggcttataaatgatcgtctttatgaagagctacaagctgatttcaggacatctcacataggagtgtgcataaatcgatctattccaatgataaccgaccaatccaattacaatcgaccgccaaatattagatatctaattgtggtcggatcaaattggatgttatttttgaatatccaattggattggatcgatgttagatggggtgtccaaaaa

SEQ ID NO: 78156 - DNA, 659 bp, Cannabis sativa
agatcttggggtttggtggatgcatttgtccttgtttgaaccatggtgattattaggcatgaaaggatgagatcttcatgggatgttgaagctctcaatgaaagcactaaaatgctgactagagaatttgccaactgactcggagtctaataaatgctaattaatcaccagtatagttagaaataataagtaaataaaaagaacatcaggagttatagaggttcggccccttagatattaataatgacctactcccctttttgttgtattgatattgagataatgttgcgcagattaataaggaagacaaagtgaattctagctacaactctcaagatgcttacagagaatatttttcacaaaagtactcttagagtcgagataatgatttcaagtcccttccttctatgaattcattaactatttataggggaagattgttacaattagctccttaaatgtagcaacaaaaagtaaatatccctatattctaaggcgtagttacaatctgtttggaactcctatacttttgagctgaagagctaaacccgtattcgtaggatgctggtggagatattcgtggagtttgttgaggaagaaatcgaagcctgtttggtcttgcccggactttctgggtctatttccctggccaggtgttg

SEQ ID NO: 78157 - DNA, 1127 bp, Cannabis sativa
  modified_base (222)..(222): a, c, t, g, unknown or other
tgaaacacaagaagatgaagaaaattttgctcaaatcaattacctttcttttaaagaaagtttggttgtagaagatgaaggctcgagctcaaacctttcaaaaaaatttgtagacattttccaactggcacccctttaattcaaagaaggagaacaatcaacagtggatgatttaataaatatcaactttgggaccgaggatgatccaaagcctatgtttgncaatgctttattaactgaagaagaattaccacagtatagaaaaaattcctttatgaaaataaacatgcatttgcttgggggtatcaagacatgcgagggttggactcaaagattattgcacataggttggcaatatcaaaagatgctatccctgttaaaaaatctcaaagaataatttgactagagctaatccccaaaattgaggcaaaaattgagaagttaagaaattttttatttgttcgggaagtcaagtatcctatttgacttacaaacatcatcattgtgatgaagaaaaatgggaagctccgcatatatgtgaattatcgagatcttaattgggcttacccacaagatgaattcccactccccatcactgagttattgatagatgctaccactggttttgatgccttatcgttcttggatgagctttttaggtacaaccaaatcaagatggcacctgaagatgaagagctcactacttttcagacgccaaaaggtatattttgttatacagttatgccatttggcctcaagactcaaggaaacctaccaaagagaaatgaccataatttttgaatgttatgttgacaatttagtggtcaaagcaaaagaaaggaaaaatcatattgatgatttaaaacgagtctttgaaaggctcagaaaacataatttcaagatgaaccctttaaaatatgtatttggagtaacatcaataaattttctcaagtttattgtcagatatcaagggattaaaattgaccctgcaaaaataaaaaaaacttggaattgtctcccccacgtaacttacgtcatctacatggactacaaggaagacttgcatatattcaaaacttcatctcaaatgtctcggttagatgtcatcctttttcgagattgatgca

SEQ ID NO: 78158 - DNA, 2358 bp, Cannabis sativa
ttggggaggtgagtttcaggctttttctcagttagttagtgacagtggcatacattttcatcatagttgtccccatacttctgaacagaatgggagagccgaaactggtcttacgttgcttgctcaggcaagcatgccactgaaatactggtcagacgcgttccaaactgctgtctacttgataaaccgtctgcccacacccgtatttcttggaaaatctccctttgaggtgctgttttcccgtgtaccagactacaaatttttaaaggtttttggtgtgtcatgtttcccatgtatacgtccttatcagagtcacaaatttcagtttcacactcttaaatgtgtaaacctcgggtacagtgaagtccacaaggggtataaatgtttaagtcctcatggacgcatttatatctcaagacatgttatttttaatgagtctgaatttccatgtcgtttaggatttcttaatacacaccagcctgagcaatttgtgacaatgtccactcctcattcatggtttgttttgccatcaaacactcattctacaggtacaaccagtacaacctcgactgttcctgctgcagcatcaccttcccagtctgttaatcccactgtaagtcctcattttccttcacctggctcaccaatttcttatcccacttatgatgattttgatcatatagcacaggaacacacttcagctactgcatcacctatatttccttcccaacctgacatactcagcctgtaccaacaacatccgaattacaatctgttcaagcacctcttgctcctacacatcccatggtcacacggggaaaggctggcatatttaaaccccgcgtgttctcggcaagtgcacaatttgatcattccactgttgaaccaacttctcttccagctgcccttcaacataaggggtggaatgctgcaatgttgattgagttcgttgctcttaaacgcaagggtacttggatacttgtacctccttctgaggcatacaacattgttggatgtaaatgggtatttaagattaaatataatgcagacggaagtgttgaacgtttgaaggcacgcttggttgccaaaggatttcaccaaagaccaggagtggattttggagagacattcagtcccgtagtcaaggcagcaactgttcgtgttgtactcacctttgctgtagctcatgactgggaagtgaggcaaatcgacataaataatgcattccttaacggagtgcttgatgaggatgtgtatatgtgtcagcctcctggtttcgaagatgaacagcaacctcattttgtctgcaaactcaagaagtcgatttacggtttgaagcaagcactaagggcgtggtacgataagttgaaagctactcttttgcaatggaagtttgaaaattctaaaaccgattcctctttcttcatgctcaaagaaactggttatgtgatcatggttcttgtttacgtagatgacataatcgtgacagggaataattcaaaggaggtaaatgcttttattgcaaaactgaatgttactttctccctaaaggatcttggtcccttacactactttttgggaatagaggtctttagggacagcactggtttctatctatcacaaggcaaatatatcagtgaattattgcagaaaactcaactggagaacactaagccatgtgctacaccgattacaggagggaaaccactatcaatcaatgatggagagcctctcaagcatcctactctttacaggagtgttattggtgcactccaataccttagtcacactagacccgatatatcatttgcagttaacaaactaagtcaattcctcaaaaatcccactgatgttcattggggtgctgcaaaaaggattttaaggtatctaaagggaaccacacatcacggtcttcattttccaccaagtgacaatctgtctatggttggcttctcagatgcggattgggcttgttgtcccgatgataggaaatccgttggtgggtattgtgtgtttctaggtgactctctaatctcattggtcatctaagaaacaaacaggtgattgctcgttcaagcacagagtcagaataccgtgcattatctcaacttgctgctgaaatttcctggttacaaagtctattaactgaaatgaagttcaagctgccttctgcaccagttatctggtgtgataacctgggtgccagtgccctcgctgctaatcccgtttaccacgctaggactaaacacattgaacttgatgttcattttgtgcgagacaaagttttagaaaagaagttggagatcagatacgttccctctcatgatcaagttgcggattgtttgacaaaaggcctca

SEQ ID NO: 78159 - DNA, 4029 bp, Cannabis sativa
aaacaaaacaaaatagtaacattattcaaataaataataatggaagaaacaaaattattggcggtgtcgggatcgtacccgatctgacccgactattcattcctttttctactttttttccaaatcgaaaactcgcccacctacctaccttaacagtcaagctcaagcccaccgtcgttaccctctcggctatactcaacattctccatctccaaccctttataacttcgctcttctcgcctcagcaccactcactaactattttcaaggttcagtttggttctttcctctctgtaactataacgataactataactatatatatctatattctatacatttatttatgtacattgcttgatgattcctccatgtggagttctatgatgataagattccttactttcttgctgaatttgtattccaggtattcttttccacatattctcccttggggattgagtcaatttagaccgattccacttttttctgtttgcggagttagggttttatattttttgttttcactgatcgtgcctttaattttacttgattttccgtatcgtcttgaatcctggtatacaactgctatttcttgtgcgctatcttcttcaacgataaaagctgaaatgtatatatgtacttatttatccttttagggagggttttgatctcggataattagtctttaaaatatgattttttttttaactataaatttatgcttttgtgggagtttggtaatggcttttgttattattattatctgcgatttcgaatatagtttttgggtttgcgtgaatgagagagacggttatatgccaataatgtttctggcagaagtttttcttaagttcgttttccaatatcctcatcaaaatgtattgtttaagaaagaatgttgtgttacgttgtaagggataacgtattagtagctcattaccaaaaaaaaaaacatattagtagctggatcaagcctaagattatgttgaattacctctattgttgtaatgaattgtgtgcggacaacttttgatttttctgccgtgctattatttctttaactgatttctttgtgtgttttagattgaacggtattatgctagctgggtatagacggtggcagatatgcggatcatataggtagacagctcaaacccctttccttatatttgctatgatctgggtgttgttaggtgatctaattactgctattcaagttatattacaaatgttttcgttttgcaaataagaaaggcagagaatttaaaagttgtgtattgactgtattccctttggatgagccatcattaaagttggggtgaggatctgtttcattagaacgactggaaatttgtaacgttgtttccattcttaactttaatactttatgacagcaggctgcaggccttattatattatagccaatagattaatttgatataaaatgaacatttacatcatttttttttttcaaagtaacagttacatcatattctgaaatttgaaaatgaacagttgcatcgcattcctagattgttgcatattaaatatgagcatcctgttcacgcgtagaagatgccactaatatttcattaggtatttccagctcttgtagttttggttctttatctagaagaggtctatttaaccaccgccaacttggtagcagctatgctacccactggagcaaaggattcccaacttcgtgagaacaacagccagaaggttcacccacaaccaatggaagaggctatgaatcagaacccagaagccgttgaggccctgatatccaagatttttaccaacatttcctcccttaagtcagcttacatccaacttcaagcagctcatactccctacaaccccgataaaattcaaactgctgataagcttgtaatatctgaactgaagaacttgtctgaactaaaacacttctacagagaaaacaatcccaagccagtatgtgtttcaccacaggattctcgcttggctgctgagatccaagaacaacagagcctgctgaagacctacgaggttatggttaagaagttccagtctgaaattcagaataaagattctgagatccttcaaatgcaacggcaaattgaggaggcaaaccagaagcgaattaagcttgaaaagaatcttaagctcaggggattgttgtcaaaagattctgaaggttcggcagatgaaaatggttttttccatgtggatctaactcctgatcttttcttgtcatatgtagaagctacttttaaagctattcatgatttttctaagccattgatcaacatgatgaaagctgctggttgggaccttgatgctgcagctaactcaatcgaacccaatgttgtttatgcgaaaagggctcacaagaaatatgcatttgaatccaatatttgccaacaaatgttcagtggctttcagcaggaaagctttgccatgaaagttgatgatcttactcttacaaaggagagcttcttcaaccaatttcttgcattaagggagatggatccacttgacatgcttggtcaaagtccagattcggtgtttgggaagttttgccgaagcaaatacctagtagtggttcatcagaagatggaggcttcttttttcggaaacatggatcaaaggaattacgtcatgggaggcgggcatccaaggactcctttctaccaggcatttctaaaactggccaaggcagtctggcttttgcataggttggcttattcttttgatcccagtgttaaggtcttccaagtgaagagaggaagtgaattctccgaggtttatatggagagtgtagtgaagaatttgatgatagtagatgaaaatgacccaaaacctaaggtaggacttatggttatgcctggtttctggattggggggactgtgattcagagtcgagtttatctctctggcatgaaggttgctgaataacttcccaaccttgcagtatgaaattcaaacgtgtacttggtgtgtttactagtgtcttgtttcttttactgtaacatctcgtagctgctggttgtgtaatctgtaacttttagtcctgttctttttgtgagatggaacgatatatttatgtatctgcttaattctattttatattttgattaatttgctttcccgtttgaaagctacacagtacatatacagtaccacttactctactttcagccaatgcgaacctttaaaccccgaaaagaaagctgagttatacaaatctttactaaaggtggactttgattagactggttggctagttttgctaaaatactactttatcttctcatgatctatggcggtatcgaaagacttttgaaatcttggtccatagaatttgataaccgcagttgtaagaatcatgcaatctaagcaatgtttaaattatagcattaaggtgatcatgtcatctagttaatctatataacacgtgctccttcccccatgaaggtctacgaatgttggtatgcagctcaacacaattaaatagtaccccccaacccagctaagcattttcttttgagtcaagattccaatatcactccaaaaacaaagcaaagcaactatatactactatatagttttggtccatccgtgtctatcttttctgatatgatccaaatcttacacaacaaataaaataattctcttcattctatagtcaaccgttcggattattttaacttatgcacgtacaatgcacgataagctctctctattcactattctatttatacagttctctcatcacaacaaagtatctcacatatacaatttatgttaagttaaaaaaaaccactaccaagaggcaagaacaaattcatggtgaagcttacaagactttccttgtccttgatttcaagcttcctcatcctcttctacacttcaaccacagcacagacaaccatccctaggcgttcccggactcgggcctacatcgaagtatcatgtcagatcacagagtaccaggacctatgcatccgaagcctgactgcatacatccacagctctaac

SEQ ID NO: 78160 - DNA, 1294 bp, Cannabis sativa
aataccttgaatcatcttcttcgactccggaacactctgaaactgagacaactccagtagagctccagcccacctagtcaagttctacattccaaaacgaatgggaaatgtcatatcatccgtacaaatagcaatcgaagccataaaagataaaacagaatgaatgaataagaaacgaagagagagagatacgtacatcagcatcaagaggattctgggcgtaggcaacttcggcggtcttacgagcgtgctcgaagaagagaagacgatcgaagtcgctctgctgtaaatccatggctatgatttctcgctctgtacggacactttgaggagttgggtatgggttgggttcgaggctagggcttttgctacagagagaataagaagaagaaagaaaagggtttggggggctatttgattagaaacccacatacaaactggactattcgacccgattcctatttatgttttatttgtgttgtggtttttctttcaaaataattagggcttttgttttggtaacatttttaattttttaattataaaaataaaatcaaatattatatttttataaagtaaaaaagtgttttatttttattttttatttttaatataaaaaataattatgtattcaataactttcatttttattttttgattttacttaaggcgggtctatgttcgggtttggggtcgtggtccgagtctataactagtgtcaggattggaacatgtgtctgttaggctatttttagcctatttttcaggtcatttttagagttaattttattctttattattactttttagaataaaattatgcttgttttctttggttttagattttgacactttgaaatatataaattggtcaaattttaaaaaatagtgatctatagaatagataaattttacaaaaaaaataaagctaaaacttcaaacctaaattcgactatattttgatcagattttgaaaaaattcaaaacataaaaattttagatctcttttttagctttctaacacatcttgaatcagctcatttagagttcgtacgcaaaaattatgcatattttactgagagaggacgaagcaaaaaaatatatatccagtggtcgcggcgaggctttcggtggccacggcgagggactacaaaaagctcgttttttacttttctaccgtcgtcgcagcgccgactccgtacaggtcaaggagaacttcatcttttctcgttttttggttaaaaaatactctatttaataaaaggggttcgcaaattattgagagataataata

SEQ ID NO: 78161 - DNA, 1464 bp, Cannabis sativa
  modified_base (795)..(796): a, c, t, g, unknown or other
tactgaactattagtaaatttaagatatcgtctgattaacaactactatagactgtttatgtgtatattcttatataccaaaattactaataactgagttatttagagggttttattatcaaaatttgaatttaaaaggtcaaatgcaagtgaaatgatatagttgagaaggttaattacaaaaaagctctataaaaatttgtataattactttggataaaaattataggatatgtctatggtaatgactattgttttgttcctatgatatgaatgtttttatagccatagataatagaacaaatgataataaataaacaaatgtaagataatagttaatatttaggttgcagtagattatttatcatattttttaataatattaaataaataaatatttatttatttgtaaaaaataattaaataatatgttctctcttctcttctcttttctcatttctttcccttaattatctctattgacacttttttaactataggtattttcttcctatgaacaatattaatatttaatttttaaaatgtataataaacattctaagtgtatgaacaacaaatcaagtaaactattattattatactaaatacaaataaattaaaggtcactaaaaaaaattactacttttagtgataactttttagtcacaatataattttttgtaactaaatgtgacttttaagtcataacaaaatgttacttgtgactaaatcatagtatttagttacaagttgtgactaatttagttttagtcacaacaagtattgtggctaaannacatttagtcacaacaaattgtaggcttcggatcaagatcataaagtcggtggctgcaagaatcgaagttgttaagttagttagacaataactaatttaactaactctcctatgagagagatctccacatcagcatcaatcttagtgcattcgggaacatatacatgcttccgagattatggaccaaagacacttgctggagtgcctttcatataagatagaaccagttggaatctactatccagaactaccttccagggagaacagctttccaggaagaataacttgctatccggaactcctttctgaaggagagctaactattctaaagattgaactcagagtgggcatgatagtcattcgagaactctctttcgaactcaacaatcattccacaagactccttctgaaatagataagttagctgtccagaaacaacattcgagagacacctaactttccaagaacaattttcggagacatttttatttagatgaactacaccacatatacttacaatgcacataacaaaaacttagtataaaaatatctatctgcatagctaaatgtttgaactatatttttagtatcgtaaattacttatttattttttaaaaaaaacattgatataatagctactataattataataaaaccaagtgcttaaa

SEQ ID NO: 78162 - DNA, 1166 bp, Cannabis sativa
ggttttaatggtggcaatattattgttctattatgtgtcagtttagttgtataagtttggggccacatttgattttttaagcttcattttgtgtaaattcaatatcaaatatgaatgaaaatgttgtaatgaatttaggtatgtaaaaactcactgatagccacattttattcatgaattttggtatgtaaaaactcagtaatgagttgaaagcttgatgaagtttaggaaaatgttgtaatgaatttggatatgtaaaaatgttgttaagaaaattaactaaaaactttcataaaatgcttaattatgtttgacattattataacactcactgaaatggtgaattatgtttgacattattcgaattagtaagttaatttgggcctcttgctttgtactattgtgtttggtttttagtttttggtttttgcttgatgagtcaagccaagtgaagcaaacaaagaacacatatatccagataagtaaatatatagcatataactaaaagcaccagtatgctaaactagacaatacttaaccaagtttcaaatttgaacattattaaagcatttgtttcaacccttgttagtaacacaccaaaatcaagatcatataaagtcattacaaaatagggcgttccaaaagtttgccaacagtgatagcataaatgacattatatgaaacaatatataattctaatactcaaaacagttaccaaatgcattacaaatagcattcattacagattcaaaataccaactcagtgatatcagtaaaagtgtccaaattcaatttcaaacttcaacaacttaacactaaaatactatgctttgtaaatagaagttgttaaatatcaacaactatttaaaatccagctgtttaaagtcaaaatactgtcaaaagttatctaacagcatcaaaatggtagtccttctattctattactgaggaggtggcatgaattctgaagatggtctgaatgttgtttgctgccaaaattaacaatatattagtgatcagtaagaactgcaggcatgagagtagtatgttagactatatatatagtgtatgtaatatagcatatacaatgatatgaaatgcggaaaataaactgtaatcatatctataatatatgcaatgaaaggatcgatgtacctccagccatt

SEQ ID NO: 78163 - DNA, 1124 bp, Cannabis sativa
tacaaccctttaaaaaagggtctactacagtacatacaaatttccaaaacattttttttatttacataatattatatatacattttttttctatataatatatatacattaaaacaaacgatataaaatcttttgaaagttgcaatttcaaaaaagatatgaaatcttataattgagatctgtcagtgtgtacatttcatgtcagcacgatctctccctagctaataaatgtgatctgctaaacatttttaaaatattaaataacttatattgtttgctcaagaaattaacatctcactgatatcttattaggacttgctgacgcaagaaacgacactttgcctgttaaagaagctatcaaggatagcttaaggataagataccttcatggccacctctcatatcttgctcaagctataaggtcagtttttttttttcaattggtattgtacaaatataccttaattaccacaaaattaattattttgtgtacattctatttatttattgaataaaatatggttattacagtctaacaagaattattgaattccatcaaaaatttaagctagtccatattatttagtccacgtgaaataatatgtaacatgtaaaaataatttaaatctctagttatatggacctagtttaataatatcaaacctctccctataaaaagctcataattaaagagttaaagtaattaaaatttagaagtatggtattttatattttaataattaaatttaattaagttaaaagtacttaaaaaatatctaaaaatatagtattttttcagtcaattttttttttttttttgtatgaatataacatagtttactatatattttgcggccaaaattattatgtagtgcactaaatgacacagtatatggaattaattttgtgataaatatccccaaagggagtctaaaaaattattatgttgcagggaaggtgttagggtgaaaggatactatgtttggacattttgggacgactttgaatgggatgctggctatacagtccgttttggcataacttatattgactacaaagacaatttgaaaagatacctcaagtattctgcttattggttgaagaggttcctccttcattagtat

SEQ ID NO: 78164 - DNA, 872 bp, Cannabis sativa
gctttttgactaatcgatccattaatttccaagttatgcagaataaaatggctatactttggcagccaagtcgtgggctatatttcaaagaattggatccgaacctgttccttttcccgaagtggatatcgcacgtgttatcgagggcagccgatggatatttgattgtgcgacatttatctttagacgtgttaaaccaggggtcaatccacgaatggttcaattaatagggttagagctttgggttaaattgcataacatgtctgttggttttatgacggaaaggataattagtggcatcaaaaattatgctggcaattttatcaaatcggaccccaataatctctcaggtgtgtggcgggattaccttcatattctcgtcaagctatcagtgaacttgccgttaaagaagaagaagaagaagttggaaattcaaggcggccatgtatgtcacgttacattcaagtatgaagacctcccaaccttttgctttatttgtgggctctttggtcactcgaagaggttttgcgagcggttattcgatactcggaaagatcaaattgtaaaaagttatggtttggagttacaagcagctccgcaacgtcgtaactacgcagatggatcaaggtggctacgatcgggcctagctacaaaaaatagccccgtcagtactggtggttcgagcagccagcatggtgctccggttggtgtctcgttactagcaagaatcgtggaaggttgatgtagcatggaggaaaattagggtttaacttttatggaattaatcaaaatattactacctctatggtaattaaaaataaaggtaaattcctaattatgggggagccaaatttggaggagataaatgtgga

SEQ ID NO: 78165 - DNA, 563 bp, Cannabis sativa
cccatttcctctgtacgtgatacggcctggaaaatgctcagccaagggtagaataagttcaggagccatctgcatttacaagattaattagactacatcgcatcaaaattgcacaaacatcgctaaaaatcacataacttttacaagtataaagtagaatcgcgtcaaaaaagattaattagcaaatatcgcataaagtcgcacaaacatcgcaaaaaatcgcatcagccatcaactaaaattaaaaagccactgtcaacataaatcgcacaaatatcgcatagtaatcgcatacaaatcgccaaaaaacagcgtaacacttggaaatttatgatgtcagtaaaatcgcacaaaaagtcgcatagaaatcgcataatgtcgctaaaaaatgcaaaaccttaaccacactccataaatcgctcaaaatcgcacaacatcgcataatatcgcttaacatacccaacacctacaacttaatcgcacaagatcgcacataaatcgcacaaagtcgcaaaaaaacaaaaaaaaaaatcatgaacaaataaatcagcacgaaacccata

SEQ ID NO: 78166 - DNA, 673 bp, Cannabis sativa
ttggcattcccattgctgctcctgctgtgaccgttgcatggcataccaacaaaccaccgtccaggggtaggatgatggcccgcacaaaacaaactatgcggaagattactgcagctgaccctcacgtggcctagcatgccacgatgccgagcatcgaataggcccagcctactgttgaggaagaggattacgaggggaacgttgaagtccaggaagtagaggatgagggcgaggtccgtcttgatagtgcctctaaggccgaggaggaatgagttgctcgacctttgcgctttggaggctataatgaggtcggggaaccagtgtttgaggctagtgacgtcttggtggaaggttatgactacatcaccgaggagtacgccgaggcggttcctcaaaggaggcaaggtgcctttagggctcggtgggtgtgtcctccatccattgtaactcaagcccagttgaggagtttagagaatgatggatacttgggtggtgttgaatgctttttcccttctccaaatcatcgggcaactaatccaagggagggatactgtgcctggtcaggtgctcacaccaaataaggtgtgaagttgcccctgcatccgtacttcaaaaggattgcaaattattaccacctctacccgactcagttcacacccaagggcatcaagta

SEQ ID NO: 78167 - DNA, 814 bp, Cannabis sativa
catatgttgatagtgactatgctgcaaacattgacacaaggaggtggtattctgtgtttgtgatagcacaatcatcttgaattaaaatatgcaaaaggtggttactttctcaaccacggaggtatagttcatggctgctgtagatgctttcaaggaagctatatggctcaaaggcctgactcatgagctgggattcaactccgtcaacataaacatgtactgtgataatcaaagtgttttgtacttgatcaaaaatcccatgctaaatgagaaatcgaagcatattaacataaagtacctgtataatctcgaaataaaaacagcataaccttaaaatataagcagcataacctcaaaatggaacttttataaaatagaaacagtataatctcagaatagaaacagcataacctcaaaatgtatacaacttttattaaaataaaaaaaaaatataaaaagtcgttaaagtaaaaaaaatatagtatacatagcaattctccaataagtaacctatcttttaatttattaaaaatctcacactcagctaattagtgaagtctcaaaattataatcccatcttagttccaccaaaaaaaaaaaaaacaaacgttcttgcttgaaaaatattgataagtaacttgtatcaaaagcaacatttataggaaactttttcaaaaataacttaatcaaaacttaataatacagatttaacgacaacatctttcttaataatatttcataattataattaattaaaatcatgaggtcttctattattagaaactgaactaactgttatattattttatataat

SEQ ID NO: 78168 - DNA, 1190 bp, Cannabis sativa
ctaagagagaagttggcatccataagtgttgagacagctttggaaccaaggagtctagtttcattaagcaattgaatggtaaatttgtaagacagaaatgcctgttttggatctggcgatgttgagcccaaggaagaaccttagtgtcccaagatccttttattgaaacttggagttgaaaaaagttttcaaaactactacatcagagtcatttgtgcttgcaatgactatatcatcaatatagactaagagtgtaagaaaacttgtgtttgatgactctatgaataaggaatgatcatatgcagactgttgaaaactattctcaattagagttgtgcttaattttataaaccattatcgagaagcttgtttaaggtcataaaggcttttgtacaatagccaaacaaggttaggaggaaactccccctcatgtacatatcctttgggaagggtcatataaacttgttcttcgagttcactataaaaagagtattatcaatatccatttggtgtaaggaccaattgttaatggcagctagtgctaaaaaaagtttaagggtattacattttgcaataagtgcaaaggtctcaacatagtcaatgccatgttattgtgaataccttttagcaactagacgtgacttatacctatcatttgagttatattcgattttctacactcatttcttgtttgcggactaaggttggcatttaaattttgtaagtggtgagtacattatatattaattttcatttagcacatactcatggataatcactaatagtctatcaaatgatctctcttttaaaactaccatgattcgaaataaagtaaatgtattctggcaattgattttgtaaactttgtatatctatttttttttttcttatttttttttatattcaaccttcaaacacgaaggtggcatttagttgagaggaatgaaaatataggaatagaaatgaaaatgggaataagaataggaatgtaatagaataaaatttgaaatgcatataaaattgataaaaaaatcattaaattttttctcttattataatggaatggtctttcctttctttttaaaataaaaaaaagtcattccatcaaaataggagaaagagcattccattggaatgtcattctaatactttaaaatgcaaccaaacaaaagaatagaataaaaattatt

SEQ ID NO: 78169 - DNA, 594 bp, Cannabis sativa
aattgggaacaaaagattattttttttttcagagcctagtctcaaaaaagaaacagagtctcattcaaactactgaactacggccaatgagtttgacttgagataacacccatcaaatacaccaacaagaataccaaacctaccactagctctcctatcctcaagttgactcagaaaagtatcttcatagatgtgatccaacataagttttctcagcatataatcaaccttatttcattgtggaatggctttcccttctaattttgatagggactgtaaagactacaagtaaacaaatatattccaacgttgtaaggtaagcccttctgcagtccttgtcataaaatgccattcccatctgaggagtcggattaaaactccaaagatcaaatgaagaaatatgttatctgtctaataagacagtgagtacattctgagtccaagttaagacctgaggaccgagatcctaactcctttgccaacctggtattttcccactcgatagtggatttacagaaagaaaaaagccccttaaatgataatcaaacatcactaatgaacccaatcataattgcaaccatgacaactctgaaa

SEQ ID NO: 78170 - DNA, 870 bp, Cannabis sativa
  modified_base (814)..(822): a, c, t, g, unknown or other
ccttaagagccatgctgctgtgataagtacatcaatctttgccctgattgtaatcttagtttttttttctgtatttgatcatatgtaatttttctcttaggcgagtctgatggtagagaggtgttctactctagtgaacaacttgaccacgagatggagatcctaaaggctgaacaagctaattcggagcaaaaaagagaggagtatgtcaaagctctgaacaaagccaaagctcaaactgatactttggtcaagcaaagggttgagaattcactcaatactgttgtggcctcttataaatcggatgccaagaaggagagagatcgtgttgagaagtacaaggatctatactttgaagctgattctcgcatttctactctggaggagaaggcagaagaatctaaaaagaagattgaggatcttgagcaacatttttccaactttacaaaggaatataatcactagaaccaagttcttgatgaagatcatttcaatctcaaccttggagaagacaactaagaatcatatggatctccaatcaaaggtcgaagcttccgaaaaaggcactttgaaaaagttgaaggattcgaaggcagacttcttggccaagcttgagaaggcaaaaaaggcccttaacgagtctcataacaaagccaaggaagggttgggattttatgccctaaataaaacccatttcaatataatatgattttttatcaatagaaaattagaagtcatttatgtttacatgtagttttcatgtttatgatttaaattagtatacaatttatattaaatccagaacatatagttnnnnnnnnntacagtgatgtcaacacaatggaagataattgtgattatatgcttcaa

SEQ ID NO: 78171 - DNA, 770 bp, Cannabis sativa
cacaaaccaattctcttgaatactgatggaggagtaagatgtacaaaggctcaattcaagtatgagctgatgtggggtcgtgatcccagatgcttctgggtggttcgcaacgcttggcgagaaagattacaccataacccaatggtgaatctatatcgaaaactaaaaagaactagagatcatctacaaagatggaacaagacacacttcaagaagatacatcagcaggtcactgaagcaaagaatgatttggcaaagattgaaagcaatgatcaggtgcagtggtcgacgctgggtgatgcgagggctaagttaaatgaggcgcttcgtagagaagaagtgttttggagacaaaaatctcgggttacttggctgcgagatggtgatcactgtacgaaattttttatggcctccacaatggttcgacgtcgaaagaactatattcagactataaagaatgataatggggagtggattacggatcagaaggctattgcagaggcattcgtctcgagattcaattccattttcaccagaaatcccctcctatctgtgccagatgaaaactttctagctaatatgagtatcaatgaacaagataacaggagattggtatgcatcccaaccgaaaaagaaattgaaggcagtcttagatcaatggggcatgacaaggcaccgggcccggatgggatgtcggcgggcttctatcttcaacattggagtgtggtcaagatggacttcattgacatggtttcccacttttttacgag

SEQ ID NO: 78172 - DNA, 1064 bp, Cannabis sativa
atagtcacaaccgggtgtttcaggagaccgagttcgggcccgaaatgtaatttgaattgaaataattggcttttttttaatggtgataatctacaattatattggatttctgtgtgcatgaaatgactaaactacccttgtatgtgtgaatatgtgagaattggccctaggggcattttggtattttgacctttattgatatactttaataaaaattgaatttcaaggaaaagcaaagaaatttctggcttttgtatccctctcacccgacccttctctctctatctctctaacctaatcccaactttgattttcggaaagaaatttgcttgtgttaagcttgcttttgaggaattaagcttagttgtggcttgaatttgaggtagttcttctcctcactctttaatttttaattttttgctgagtttgggaattgaaagcatgctcttctaagctttgagtgttcttgattatatgatgagtgaatcgatgtttgatttgatgaaattgggtctttattgcatgaagttgttgtacattttattgtagagttgaggctgtaatttcaggggattttctaggttgaaatttaggtatcaaaatgggtgtttgctgctggaaattatatgagttgggtgtgcttgaagctcaagttcatgagcttgagtattgctagtatgaagcatgatttatgtgtatctgtaaactgaattttcagggtatataatgagttctgatgcatgtaatatgtattttaatactctatctttaaattttatagtttgttgatgtgttttgagagttgggatgtgatttgggaggatttgcatgtgtttggttgctgaaatttgtgtttcaggcggctagtttttgggtttggaaccagtgccgcggaatggtctgagcatgccgcgacctgcccctgttggtggaacatgggatgttgtcccaggtgccgcgacatggcttgggcatgccgtggcccgcccttaaattttttgggtagtttggagttccaactttgaaaattcataactttctattccgaactccgatttgggagt

SEQ ID NO: 78173 - DNA, 835 bp, Cannabis sativa
agggaacttaggttatttttttctttcttttttctttcttcacttgcttggaattttgaaacttaggactactggcaggattaaccgggtagcattcatttgggaacaccgcaagatgcagatcatatgataagtgcaccccatgaaagtcatccgttcagtttagatattttgcactattctaaagtcaattaggaccaatttagtaccactatacatgtgagaaaaaaataatatgttgtggaaaaaaattaagttgagtatttgataaattataaattgtaaaatgatatgaattgttaaaattttattataatgataatgatattataataaaaaaaatatgtaaaagttgacgttatataattttttttattttccatatttttatttattattttcagcctaaattataaatttatatgcatctgataaagaaattataatatttttaattatatttttatcacatgttaagaaaattagaaactcaactatagacaaaattccaagatgtggtttgttaataaaaaaaaataataaataaatagaaaatattgtttaaaataaaataaaaaataaaagatttatatataaattattttattagatttgttttaatattttgttatatacaataaataattaaatgtatttttagtaaaaataaatttattaaagtctttgaaattttatattttaatattcctaatttattaattaattaattaattacaaaataataaatatgatattgaaatagtttattctgtaattacagaacacaactttataactactgaataaaaccagaaaataaatagtgtagaaaaat

SEQ ID NO: 78174 - DNA, 688 bp, Cannabis sativa
gaaatgtatgttatagtgtataaatacgagtatacataatacgtacgtatacgtaggtagtggattttgatgagacaaagggatatccttaaccttcttgtcacgcatatcctgtccaccctttctctccacgtggccacgtgacgtgtcttttcctcaatgggtcccaccattccagacattgacaatattgagacttgaattacatcaaagctgtctcccatctcttccttttttttttgaataaattttgtcactttcttcttttcttattattttattaaatattaagtaaattttaaactatgtaatgatatgtaatggttcttcttcaataatgttttttagtttacttattgagaagatcaagtcaagttgaagaaaatgttaacgttttctacatatatttaatttgacttaattttcattaagaatataaatcatcaaaacaagataagtagttggctttgttgagaaattgactaactctaccacacaagtgaatttttttttttctactctttggttttgtaaactcatttaaaacgtgagtaaatttcaaattaatttaaatttaaataataataataattcatgtgtacgaaattgaaaactgtttcaggataatatcgagggaaaaagctgatggtttcattccatagtgacttttttagcaaaaaaaaaaaaa

SEQ ID NO: 78175 - DNA, 747 bp, Cannabis sativa
caacataaaccaaaaaaaggaaatatcatgtgctcatgctcttattgtgattaattagacatgaatagatgcaataaatgtggccaaaaaggtcacacccggaagacatgtcataaccaagcaattagacagaaattgttcctttaatggtaatgcatatgagacattgtatgtgacacgttaatgcaaagttccaaatagtttactattacattgtatttttttttcaatagttgcacaacaattgatttaaagttgtatcacatatgataaatataaacaagtcataaagtattatcaacatcttatttttatgttaatgcaaagtgctaaatagtttgctattacgtttatcttttttgttttgagaatatgttcttaaacaagaaaaagtaataaaaccatcaaataaacaaaagtctaaacatcttggtttataacaattaaaaaaacataacaaaagtagaacaataactgtcaagacaagacactgcaacaatcacttccttgggattgccctgttgtactcaacaaaagactatgaacaacttgaggatataatttttgctcttaatacccaaaaaatgactgaattgagtggtatgaaacattgtcatcacatcctttatttttcataatcttttcaataacattgtaagtgcaagtagaataacacttggacctgaaatagtcagatgggtaaaacttataaacaactaaaacataacaataaagataaaataagaa

SEQ ID NO: 78176 - DNA, 3949 bp, Cannabis sativa
cacttattataaattatggaatacttgttagtgcttacattttaatttgtattaattattgataatgataacaattattgtgtaattagtcaacaaataataaattttatgtacaaagataaaaattgaattattaacaaaactaaaattatttaaaacacatagttgcatgaatataataaatgatcataaataaaatatcatttatagttgcctataaatgaaaacaaaaatgcttaagctcataattacaactaaactaatctctccctaaatactattatggaagatccaaatttgttggcatccaaatatgaatttgctgtgaaacctagcgatgaagaagtagttgacctcgacaacattgaatattcgattcctaccattgatttttctcttttgacatctgacaatcttgatcaacgctctaaaattctcgacgaccttcgcaaggcctgtgaagattggggtttcttcacggtaaacaaataatattgttctaaccttaatttattattttgcaataacatatattaacatgttcttaattaattgatgtaatgatgtcgattaattatagttgatcaaccatggaatttcgaatagtgtgatgaagaaaatgatggaagtaagtgagagttttttcaatatgggagaagaggagaagaaagaatttgaaggcaatggtgatatattagacccaatatgttatgggactaatattaattgcaatattgggggaaaacaagtcctcttttggaggaattttattaagttcattgctcatcctcaatttgagtcaccttacaaaccaattggctttaggtatacataatattaattattcttcctatttaattattaaataattaatttataaaattttatttatttatatataatttattaaatattgagtgctactaaaatgttatataattaataacgcaacgtaatatttggtgattagtgtagtttaatataaaaaaatttacataaagtatctaaaatcgtactttttttttttttacattttttataattttatttttcattttttttacagatttgtattattggagaaaaataattttatttttaattgttgtaatgttatactatatatagatgcaacgtgaaaataacgtataaaaactaatcaaacaatctaaaaacaacatgttgtaagaaagaaaatctataaaaatataaataaaaagaaatagaattctctaaaaacgcaaaccttttgttgtttttgagtatttttgaaataattaatccttttcgttttaatatcttatgttttatcgaaatacagactatagttggtaagtatgtgatttgaaactatatttacttgggtacttttgaatttcgcaaacaaattttatcaaattaatttgatcatttctagcattagtaaaatcaaacatatggtatcgagtttgtattactgtcgcataatgttcatcatggcaatatgatatccgataacattaatttttgataatttgtttagtactaattatatttttattaattgaataatctatatgtactcaaaactaattaattgaaatgtatctatatatattttgataatattttaaagagaggctgcagaagagtatgggaaaagaacaagagaaatatgtggtgtgttaatgagaggaatatcaaagacattagggttggaagagaattgtatagagaaggctacaaatttggatatggggttacaatacttgctaatgaatgattatccaagttgtccaaatcctgaccaagtgattggactcccacctcacactgatccagctcttatgaatattcttatccaaaacgacgtcggtggacttcaaatcctacataatggaaaatgggtcaattggaaagccatgccctattccattattgttgacattggtgatcaaatgcaggtactatgtaacaaattatatattgtactatcatactttatatttatatttataggtagaacattgttattattagctatcactccatcgtgccgatcaccttcggcaccttttataagtgatgttttacgattgtttagtgatattttttaaaattatatgagactcaatgcttaattacactagtagcggtacgacactaaaaaatattaatatttctcatataatatgcatatgaaaattttaggaaaatttgtagagatattaattttgttcttatttataggaatatttttttattattattttcagtatattataattatattatagtagatattctttttatttttatttaattgtttacaattaatacaacgcttaaaatttgattgaaatgaactgaaaatatatataagcatattttgtttttatatatgggtggagttaattaataattttttattttattttcaacattttaaattattttgattttttttatatataagatgtctgttataattataatatcaacgtcatatatatatattattaggatcaaaagtgatactactactttgttaaaaaaaaataatacttacatgaaattctccttatatattatgttgtgggttaagttgttaacaaattaagcccttgttaataaattaagtagaaataataaataaataaagaaaaaaagcaagaagataagagtaaatattatacaaatttcagaaagaataatgatttggacacatttaaattatacatacttcttacatataataatatttaattaatcttcactatataattaagagtacatttaaaaaaatatatataattaagagtaatgtgatctctatttaaaaatgtatataggtaatttggagtgtcaattaatcttaataatacctaacccatttaataatcatgtcgaaaataaagccaaactcaacccgttttaacttgacctgacctgtttataatatttaaggaaatgatcaacccattaacatgtttacaactcttttatgaatcaattataggtcgtattatttttgagttaggtgtatcattcctgaaaatgacccatttaataaataggattagccgtgtcaacttaaaaatgacttaaatttatttaaggttaatcttagtatatttatttcgtgtggattttaagtcgttttatcgtgtttaatcaatcttgctactcttacatgttactttgtgaaattattagtgtgtaaacatgtatgtaacattattgtttccgaaatatataataataatacttaattagagttgattaaagtcgtgggaaatattcaaatattaaatgaattttgcatgtgagatatcctttgtaaaaggatttggaagaaagtcaattagaggacaaaattaataataaaatttgcatgcatgtgatattagttagttgacctatatatatgagattaattagcttaattattatttgttattaattccatgtgacagatcttaacaaatgacttgtacaagagtgtgaaacatagagcaatagtgaataataaaagcagaagaatatcaatagtgtctacacatggaccacaagaagacacaaaggttgtaccaatacaagagcttttagaggcacatggccaaaccccatcttataagcccattccattcaaacaatatatgcaaattctacaaagtccccaagtcttactccaaccccctcttaacctaataagactctaatattcatgataaataatatcattatcaaacactttctatgtatatttcatttgcttgtgtgtttttataatgttttaataaatgtcatcaagttgtattgttgtgtgttcgtagttgtatgtttaatttattggataatgtattttatatatggataatgattgagacacttttaaattacacatacctaataatgatgaagtagctaggtaagtactagttgaaattctatattttaaaattactta

SEQ ID NO: 78177 - DNA, 980 bp, Cannabis sativa
gaaggcatatggattagtgtcctacttcttgctattttgttccaagatgaaaatgttgctttatcttccacaacaatgcgcataataccgtcacttgctcttctgcttagatctgatgaggttatcgacaaattctttgctgcccagtcaatggccagtcttgtttgtaatggtattaagggaattaatcttgcgattgcaaattcaggtgctgtttccgggttgatatccctaattggtttcatagagtcagatatgccaaatcttgttgctttatcagatgagttttctctagtaagaaatcctgaacaagttgttttggagcaactttttgttattgaagatgtcaagtttgggtccactgcacgtaaagctatacctcttttagtggatctcttgacaccaatgccagatcggcctgctgctcctccaattgctgtccaacttttgacttgcattgcagatggaagtgatacaaacaaattaattatggctgaagctggagctttggatgctctgacaaagtacttgtctctgagccctcaagactcaacagaaaccattataactgaattattcagaatattgtttagcaaccctgatcttattcgctacgaagcatcagccagctccttaaatcaacttatagctgttctgcgtcttgggtcaagaaatgccagattcagtgctgcaagagcactccacgaactttttgatgctgagagcatcagagagtctgagcttgcaagacaggctgttcaaccattaattgagatgcttaatgctgcgtccgagagtgagcaggaggctgctctcgttgccttgatttctttgacatcaggaaattcttcgaaagctctttttttaactgatgtggaagcaaactcacttgagagtctatacaaaattttgtcctctgcttcatcgttagagttgaaaagaaatgctgcacagttctgctttgttctgtttagcaatag

SEQ ID NO: 78178 - DNA, 1898 bp, Cannabis sativa
attggacacacgacttggtgagtataggaatagtagataagcattccatttcagtttaagaagaaaataataatgcatttagcatttaggacacattaattccataaaggctggctcttgctttcttctacaactcctcttgagttgttccttgtccacgtcagctgcattcctatctattctattaagaattcaagtaaataagttcaaatacacatgttaaacatagttgttattttatttataaaaaacaaaaaatcaaataccacctccaaaatactcatacaatcaaacatccttatcataattgaccaattgaagtcaaaacgattaaaaaaaaacattgttgaatattgttttggaaaatttacatgtcttggttatttttacagaatttttctgtttataacactaaaaataaaattaccgtgcataaatgaaaaaaaaaaaaaaattaaatgagcaataaaatatttaagccttattttttatactataaattatttaattttttttaaaaaattaacaaatatacaccattataaaaaatataataaccaaacaaattttgaataccgaaataaatatattaataaaaagactagaagtctagagaagtggatgatagactatttttttacgcttcaattgtagttgacacgatttggcaagtttaaaatgataaggttcacaataattttctgagtaacgtcatgcattatattgactctatctccatttgttacacatattatagttcttgtttgtttgcctcgttgagggctattgcggctcccttttggtctcctcctccggaagattggatcaaagtcaactgtgatgttaaagttagtgttggttttatgtatgcagtgactctaactagggatcaccttgggacgattttgtaggtggcgttgaacatgctcaactttactggccccttgattgatgaagcagcgacttgcctgttggctttggagggtggtttcgttaaagcatctttttgtggtaatagagagtgactcgaaaatgattatcaagacactaaagggagccttctccactaggggtattgataattatatgcaacaatgtaaattgctctccaaccatttgttaagttgtaatttttattttgtctgaagaacttataactttgcagcccataatatggttaagtggacgtttactaagagtgttattggtttagtcaatttgtcttctattccaaatagtattatcggtaatgactatgaagtctaactgttatgttctagcttttctatctataaacttcttattttcaaaaaataatccaaacttaattttttatataaattaaacaaattacttttgtaattataggcgtagttgtaatattattctcaaagtttgaatgctcattcctaatgttaaaattaaataaaaaaaaaattaagcatcttttttaattaataaggttttcagtttctctaatgatttttttttttttttttgttaaaataaataaatactattgttctctaaaaaaaaaaaatatattattattgagtatcaataatgtcgaacacctgtcttctaattagttagcaacatcttataattggatagcatatttttttaaaaattattaaattttaagagaaatacaatccatagtatttaacactgagatataatattactattggtatattttaatagcgaatccatttattttactttaataaatattataaaaaattactaactaattataaaataatacctgaaggtaatgttagacactataaatatttcgcaatactcttaaattaatatcgcggtgctaccgtcaaactcctgttacaacctcttagtcaacctccacatccaaaaatacatgtcggaatatt

SEQ ID NO: 78179 - DNA, 757 bp, Cannabis sativa
attagtaaggttcatggctgattcccacccacagcagcaagtctcattagggtaagcaaaagtaatagcaatagttaaaaaaatatagttaatacctcaactagagctccaattaaaaattcattatatccataggaagtgcttaaatctttcttaagttgatcaacgtaatctttccttgttgccccttcttgcctcaaagccttaaaatttgagagcactcgaacaactaataaaaaaattaaacttggttagaattatcaagtttgtcatacaaaattgtattaaacaacgaaagaactcactctctttgattctcctctggagattctgaagatcaggaggtccttgagactcttcttcaagttcctaaatcattagtaacaaagtctcagcatgaaggtactgaatgttaattaattaaaccaacataattaaattatacaacaaattcaaaagtacactaaccttcctagtaggtaacctaaactcgtcagattcatctttaatattcaaccgcatttcttccattgcttcttcctcttccctttgcttttcttcatcgatagctcttgacttggcctcaatatctccatccgaatcagaatccgaatccaaacctgaatcagcccctgaaccatcttctacaataacaataaatgagaaaatcgttaataatccagtgcagtgagtctttcttaatttttcagcaacaacaacaccttcagagaaagagagagacgacttggttaagaag

SEQ ID NO: 78180 - DNA, 587 bp, Cannabis sativa
tcccgtacagacttgggggcaaatgttatcctaatttttgcactctgacgtgccatcacacgatggcaacatgtggaattgacactgggtacccactcgcaagacacaaggcgaacaaggcacctcacacatccgcttggacaaagacctttagactgagcagtgagcaatccgcgcaccatgccaacacttagcaaattcagctttcacatcgtgagtcatcaaagaaatccctataattttgggatcagattacagagatatggcaagctttccaaatcccaggattagtgtattatatatttactatgcaatctttctgcttatatcaattgtaactaaaagggaatacttcctctcaaagcttatagccctataaatagtgattcgtactcattgggcaaaagggtcgagagattttgtctaagaattcataattagagatgttagtgtaagagctctaagaaaaggaacctttttccttgttcttaagtttatacaaataacgaggattagggtattaccgaacttctcggggctgaacctctataaaattcttgtgtctttattcgctttattacatttca

SEQ ID NO: 78181 - DNA, 971 bp, Cannabis sativa
  modified_base (37)..(38): a, c, t, g, unknown or other
ttaaagaaaaatataaccatatggttacaataaaaanntaaccattgaatagtcaccctatctattattttgtagtagtgttgagtatgagtaatatatttttctcaatatttatatttttatttaaatatttattatactagcttatttattttatttggggtggtaattggagatcaagataaatagttcaaaagctatggaaataattttgttatatccaaaattccgctatgtaccagaactgtcacgtgtcctacagaaagaatatgaatcaactcaatgtatataataatgacattatattattaaatgtaattcaaataactcgtgtcaattaaatacaagtttgatagaaatgttcaaactcgctaactgtatagctttatgcgagacaagaataaaaactattaaattagaattgacaagacatatgttcaccttggaataaacagagtagcaagatataggatacaagatatcagagatggtgaaaataacaacactcaaccgcctcacattattcacaacatgcatcactaatacaagtaaagggatacagcgagatgaagtgtttccaacatttagtagtttttcctattaagatggataagaagaagaactcaatttgacgagatataaccatcctagtcaacataaccgtctaaaggataaaaacaaggggtagttggatagttattagatattatccatgtttaaataaatgaaatgtggggaatgtccacgtttcatcaacaattgtaaatgaattaatcccaataaaataactgcaaataagggctgaatttatgagaaaggggacgacaaaaaatagagagaaattctattattttcagatattgagatttattttctgcaatctaaaaaatatctctaataaggactcgtggagtatgtaaattttaactacaaaaccacgtaaaaattttggtgttatttattattattaa

SEQ ID NO: 78182 - DNA, 698 bp, Cannabis sativa
aattatacagttacagtgtaattacatggtcagacaaacatgctaaattgtgtaattaccttccattacacacaaatcgaattacattgtagttttccaaatacactaataagtgtaatgcatagagtgtcattcatccttgaaaatgattgatcgtttaaatagtctgctctcaaactcaaagagtacttaaaccgttttattagtaagaccaggttgtatagtgccacatcctttaatattagaggaacgtggaccaaatcttaattgcagagtgaccgtttggaatagatactaggtcactcatttgacttgatcgtttaagtaggcatgacttcaataatggatttcggcgtttggactcactcacgtaaaattatttcacaaatacacaaaaataataagaaaaaattacaaaaatataattgtacaaaatttagatatttttatgttttttatgattttatttatagaaaatacaactttttgatatatttttatgttatagttttgttaattttttttgttatttatatattatcttttgttattattttaatgttattcaagtattaattttttgttacttttatgtaatttttttattatttttcgtgttaagtttataaaaaaaactgttaaaatatatatataaaattctgaacataaaaaatattaaaaaaataatattttatgta

SEQ ID NO: 78183 - DNA, 1125 bp, Cannabis sativa
gatccaattttccattaaatttaatagtgaattttcatgaaatttcattaccattatattattacttgatagacaagatttgactatagagtataagtctcttcatttctttttaaattttatcaaagacctataaatctatgaaactagctattaaaaatgtagtagagatgatcaacaactcaatcataacccgcccaatattcatataataggacaaacaaggagaaaacactcaaagtaaaagaaacatttggtgaagactgtttcaaaatattcaataataaatagttgaccattacattttgtcatcataagttcccaattacattcctactacatagacatatacagcccactaacatatatatatatatatatttatcaataatggccctgtctattaataaataatcagagactacagtgtcaatcttttcctattggactagctagtaataaatagagaatcatattatatataatatgaacaattatttcagaaactccaacgaaattgtcctaattgtcgttattcttggagtatgagatcgaagtttcaaagaaatttaaattatattatgttgaatttaattatataatataaagcaacgagcttttcttcttttcctccataaatatcattattatttccatctcatcttcaagctatggctaataatcttgattagctcctttattcttttttctttccaaggagacatctaataataaaaaagccagaaaaatattcaagagctagctaccaagtaagtaaaatccctgttccctttaagaacatttaatatatgtatatgtgtatatgttaacatagaaagcttattggccatataactgtttaattaatacagagagaaatggaaaatcatgccggtgatttgagttcggaaatacatcaaaggtactgaaaactttaactttgatgaaaaacttttaattcctaccatcaggggcggagccaggaatttatctgagggggggccaaactataataaatcttcaaaaaaaatatatattattaaattcataattaaattaaaatatagaacgtctctcttgcatgtcacgaaaatcatctataattgaatctatactaaatttttc

SEQ ID NO: 78184 - DNA, 607 bp, Cannabis sativa
cattttcagcccaaatcaactcaatggtgtcaaaggtgtcatttagtttgagttaataatttctttctatttatttatttatttagttgcattttaaaatattaaaatatcattttaatatataatgactttttcactatttaagtggaataatttaataatttttttatgcattttaaattttattctattctattcctattcttattccaataactattttcattcatattgtatctttttaatcctcttaatcaaaagcaacataaatgttgtccatgtttctttacgatagttaaataccttattgtatcattttagaccccaaaaattgattatcgatgctataacaaatcatataatttcaattagtgaatctggtaagtatttgcaccatatgtctatatggaacagaaaaatggtcatctactgtttttctcttatccccaaaccttttcatttttttaccccctttcttatcccttctctctgctctaaacctttgcttctgtgctctctaccatgccttatcctttcctactatctcccttgttttcccggctctcttcttgtcccttcctttgtgtcttcgtttgttcagccttct

SEQ ID NO: 78185 - DNA, 921 bp, Cannabis sativa
ataaattattaagacttgtaattagcataattaattaattgaaatttaattatgattatgacttacttattatggtctggggaaaccccttgaaagaagactctagttttagctggatccacattggtgtcgacccacttagcccatgtgttcaaagctttctcgtacgcaaccaatctattcatgtctttcactaagacttgcccatcttgaatcaaatcccatctgcactcaaaaattagtttttacttctattaattaattgtatatatatataaacatatgtattatatataaataaataaatacgtacggctgttttctgccagtgtgaagccaccagtgccaggtgttgaagatcaaaacgtcgacgtttttccacaatgttgcacctcgaactgagtcgagttgaagaactcgtcccacacttgtgcctacaatatccactagaaatgcattcctagagaacattatcttcaaattgtatgcctgcacaaatttaatttattaattaattgttatcatatatacaatatacttatatatatatgtatattttattgttgcacttgagttgttaatatattattataatgttttctgattaattatcaccacctaacctaaggataacaaagtgaatataataattagggttctctgagtcaaatatatacttcatatagttactattaaagtcaaaaaaatcaacttattaatttggaccatgcacacttaattaattaataatcaacaatttttggtaatattaagagattgcccactataagtacatgcactagttaatttatagttaccagcaagtacaacatacttttaattaaaagagaaatcttataattatttttataaaaagtatgacctcattatatatatcaactacgaaatctcttgctttta

SEQ ID NO: 78186 - DNA, 560 bp, Cannabis sativa
aataatttttaaataataataataagtgtatcaatataaacatatcgtgtgtataagtagtgacacttaactggatgacatgttaaatgtactacttgttcagtaatttggagggttcaccactttaaatgcaagtgaaaacgacagttagaagggtttagccgccaaaaattcttttaaaaatgtaaatgtataaaataattaaatcatataaaattaaaatattacacattatttattatttaatatactaactattatacaaaaatataacttaaaaaaatataaaaataatactaatatactaaaaaatacaaatacatattataaaatataaaatattaataaaaaaataagtaataaattaaacgggttctcatcaaagcgaaaagtgtcattatcccttcctcgtttaacattgtaataaaaataactttcatccccgttccgttctctatccttatcctgagttccccataattaagaaaatgtgcaaccttatgtatgtaccaatatttttttaattgtataattttaataatgttctttatgaaaataaa

SEQ ID NO: 78187 - DNA, 940 bp, Cannabis sativa
ttcagatgtggaaacttcttaaaagccttgaagcaaagttttggttatcttagttttaatatgttttgagtataaattattgttcaagttggaatactagaatactactgatcaagaattttgttttattgatttttctcacatcttgtggaatgatgtgtatgtattgataatatttgcagtagtgacaccataggtttaatgcctttcacatatgctcttaaaattgttttaaataggttaatttccccaggagagtatctgtcctgcctctgctaatacgtttgtcttgtttgtgacttattaaagagatttagggaaagctggaacaaaatacacactccctttaaaacaaattacatactcaaaaataagatattttgttttgtttttttaagaaatcccactcttgttaatagattgattggttataagacaccttcaatgaataatataaaatatttgtattaaatttgtattaaaaatttgtttattaatgttttgtaataatgatgtaaaggtggccaaacttaaggaagaaaaagaaattagaagaagaactagaaagaaagaagagaggatgaatcagaatcagatagaagagagggtgacaaactttaatttcattcatggatactgagataaaaggatttgtagctttatttagctaactacaaataactaaatgcttctataagttcgattctcttgtacaagacattaagtccctcccacattgtttttcaatcttcatttcatcccatgtaacatgtttgagtgttcacaagtaccaataagtctatgttacaacaacagcatcataaaactaaatcatcaatcagatcaagtaaagtaagccaattacgtgtttatttttggcttaaaaaactatattgatcttgtattcttaggcaagatatagaaccacctttgtggttgt

SEQ ID NO: 78188 - DNA, 7439 bp, Cannabis sativa
tggtaaattgaatgatgccttcagataccacaaccagtgtgacaggtgggaactgtcccactgtagccgccggtgttgatgtttctccagcaaaaatgatagtttcaggaaataagttgaggggaataatggtggtacgtcccactcctctgttgattgtgtcaacaggtgctgttccattatttgggagtggaacattcattgttccgacattgaacgatacaatgttgttatctctattcgtctgatttctacgaagctatttcttaaattcaagcagtcaagttatcattatctattataggttctaattgtaaaagtattatggacaagattaatagctcttattgtaataattctatttttaatgatattgttaattgtatcaagaaactcattgttcagtccaaatttacttatagtttatgtgccgagggatagtaacaagctagcctattgtcatgctaattaagacaagcttagaattagacactgagtgtatttggaatgattatttatcttccatactaacttgactactctatctttcaacttatttcattgatgaaagttttcaggtttaaaaaaaaaacaatcatcaaatataggtacttatagctttgttaaatttgatttattagtgagtgtggtagcataagttaaaaaataataatgttaatttttttttaaaaaatgtattaaataaaagaaatttgaatctgatgaacccaagagagaggagagactggagaggtctccaataataaattaataataaggatggaatctacaattaattgatagtgattgatctatctatctttcatcacacgtacgctagaaaagtaaaagaaaaaaagaaaagaaagcaatgactacgagagacaaacagttaatattatttccctttttagagagagaaacatcataataaaaggtaataagtttatttaagagagagagaaaaataatacaataataattataattaggaaagtgattaattaagagaacaaagcaaatctcattcacactactaatcaccactcactcaatcttcaaaaaaaaagaagaaagaagaaagaaagaaacagaagaagaaattcaaagctcaatctttagagagacaaaacaaaagaaatcatttttgagtcaaaatttttattttggaaaaagcaagttttttttatataccaaaaaaataaagagagaatgattgtttgtgaatgaaagaaaagaaaagaagagaagattaaaacagaaagtgggttttagagggagaaagtgaaggttttctagagagagaaataaaaggattgagatgagtatatatattaaaatagatcgatagatagatatagaaagagaaagaagagagagaaagagagggtcacatggcatgtgagcacagctgtgtgcattgccccctccttccctcgtagtcagtcctctctctctctctctctctcctctttgataaatacccttctcatcttccttactccgacttttgactctctctctctctctctctccccttctctctctctccttctatacagaagccaaagcttttccctctgtccttctctaatggcagaaagcatccggccctaaaccgaaaccttctactttacttcaatctaatctcaatcgagagagaagcgacaaacactaaaataagaaagaagagaaaaacaatgaaaccccactcttctactgccatttcgctactctctctccttgtcgccatcatcaccttgttatctccccagtcaccgttggcggtggcctcctcctccgccggttttagtgatatccagaagctgttgagcttcaaagcttctctccccaaccaaaccgtcctctccaactggctacataaccaggacccatgtaccttcaatggcgtcacttgtcgtgggaccagagtatccgccatagatttaactttcgtctacttgagcacgaatctaagcgccgtttactcctttctcatgagcctcgatggtcttcagtccctgactctgaaatcagccaacctcaccggctccattactcccttcccttacggatccaagtgtagctctctactcacctccgtagatctatctcagaacagcttgtatggacccatttcggatatttcttacttgggttcttgctcgagcttgaaggttcttaatctatcttccaactcgcttgaattttcggcgaaaggctcggccggcctcaagtttggatttcagactttggatctttcgtggaataagatttcagggtccaacgtcgtctcttggatcttatctcgtggtgggtgtaatgagatggagtatttgtctctcaaagggaacaaaatcaccggctccgacgacggtgagatgagcttctccggttgtaagaaattagagcatttagacctttcgtcaaacaatatctcacttggtattccctcttttggcgattgtttggctctgaaacacctcgacatctccggcaacaggttttccggcgacgtcgcccgagctctctccagttgtcggaaccttgccttcttaaacctcaccatcaacttgttcgaaggtcctgttccgaatgtcccgatggaaaacttgcagttcctcttgcttgctgacaacaagttcagtggcgggattccggagagcttgtttgattcctgctcgactttactcgagctcgatttgtcagttaacgagcttgttgggatgatccctgactcactaacctcttgctcgtctcttgaatcgttcgacgtttcgaagaacaacttctccggtgagttgcccatggccattttcatgaagcttcccaagctgaagtcgttggctctttctcacaacagatttttcgggaagctgccagattcactgtcgaacctcccgagcttggaatccttggatctgagctccaacaatttttctgggtatattccagttggtctctgtgagggacttgggaacagtttaaaggagcttagccttcagaacaaccttattacgggtactattccagaaactttaagtaactgttctaaccttgtttctctagacttgagcttcaattatttgaccggcaaaatcccaccaagcttcgggtccttgaccaagctcagagacgtgatcatctggttgaatcaacttaatggtgaaatcccacaagagctttccaaaatgcagtctttggagaatctgattctggactttaacgaactcaccgggcctattccttcgggtttaagcaactgctctaatctgaactggatttctttgtcgaataaccggttgagtggcgagattccggcaggactgggccggcttccaagtctctctatacttaagctgagcaacaactctttctatggaagcattccgccagagcttggggactgtaagagcctgatatggttggatctcaatactaaccttttgaatggatcaattcctccggcgcttttcaaacagtctgggaacatagccgttaacttcatgacgtccaagacttatgtttatatcaagaacgatggaagcaaggagtgccatggagctggaaacttgctcgagtttgcaggaattagaccggagcaactgaacagaatttcaaccagaaacccctgcaacttcacacgagtatacagaggtagtatccagccaacatttaaccatgacgggtccatgattttctttgacctttctcataatatgttatctggaagtattcccaaggaaatggggaaaatgcggtatcttttgatcttgaatttgggccataataatctctccgggggtatccctgaagagctgggaagctccacaagtcttaacattctcgatctgtcaaacaaccggcttgatgggaagattcctcagactttgactcagctctctatgttgatggagattgatctctccaacaacttcttaaccggtagtattcccgagtcgggtcagtttgagaccttcccaccatacagattcgtgaacaattcgggactttgtggctaccctcttcctctttgtggtgctgactctgggaatggtgcaaattctcaccggaagaagtctcaccggctggcgtctttggccggaagtgtggcaatgggccttctgatttcgctcttctgtatacttggttttatcatagttgccattgaaaccaagaaaaggaggaagaagaaggaatccagtcttgacgtttatattgatagtagatcacattcgggccctggtcatgtgagctggaacctaactggtacccgcgaagccttgagcattcaccttgcaacgtttgataagccactgagaaaactcacttttgccgatctccttgaggccaccaatggcttccacaatgatagcttgataggaaaaggtggttttggggatgtgtacaaggcccagctaaaagatggaagcactgtagccatcaagaagctgattcatataagcggacaaggtgatagagaatttacagctgaaatggaaacaattgggaaaattaagcaccggaatctggttcctttacttgggtattgtaaagtaggtgaagaaaggcttttggtttacgagtatatgaagtttggaagcttagatgatgttttgcacgacccaaagaaatctgggatcaagttgagttggtctgcaaggaggaagatcgccattggggctgccagaggactggcttttcttcaccacaattgcatccctcacattatacatcgtgatatgaaatcgagcaatgttcttcttgatgagaacttggaagctcgagtctctgatttcggaatggcaaggctaatgagtgcaatggacacccatttgagtgtcagcactctggccgggacaccaggttatgtccctccagagtactatcagagtttcagatgttctacaaaaggcgatgtctatagttatggtgtggttttgctcgagctacttacagggaagcagcctacgaattcgattgactttggtgataacaatcttgtggggtgggtaaaacagcacgctaaattgaagatcagtgatgttttcgatccagaactcatgaaggaagatccaaacctcgagattgagctcttacaacacttgaaagtagccagtgcatgcttagatgatcggccatggcggcgtccaacaatgattcaggtaatggcaatgttcaaggaaatccaagcaggttcagggattgattctcaatccaccattgccactgatgatggaggttttggctcagttgaaatggtagagatgagcataaaagaaggctcagaagtaagctacaagcagtaaaaaagagagaacaaacaaggaagaaaacatgttggaacccccaattttttttttctccataaattctttggaagaaagaagaaagaaggaagaaggtggacaaaaaacacttctctcagttccccccaaaaaattttccccctctttgccactttcaaatgggttaggaacttgctcctctttgtgtatggattctctaccattgaatgtatgtaaaacttgttatttatacataggttgttttttttttctctgttatgaaatgtgtatataaacagctttttcagttgttgatgttcttcttaatccggtttcttttctagttgttggttaggagaaagatgtaagagcatttgattcagataaaatcctgaaaaaggaagctttgtgacctcatttgattgatggtgactacttaagagggttattttggcacttcctttgagctacttgattgtttgccaattgccattctatatttctcttctttcttctttgctagctactttaccctcttctctattacaacccgtaaatataaatgcctttacactaaactcttttttcttgatcagtatgcttatgcatgtttttctctcatttttgtagctttgtcttgtacgtaccaacatttatgctcctccctttgttaattgttaatgtgggacccatcttaagttctatttatttatttttggaagggaaactctcatatttcgtttttgcaattactcacctcagcaccattaagctttttcttacctttaattttaattttatttttatttttttttttttttcaactaaacttttttgtttttttgcaagaagatttaattaaactgattaacgttgaaattgtgttaaaaaataaataaacagaaactaacgaggggttggaatctcaaaaatcaagattcgtgtattaatgaaatatggagacaagccacgcaatgtatcaagcaacacacgttcttctaatattaataaatataccaaaatttatacatattaattaataggagatgttacatactttttttaaaaaaagagatgttacaaattactaatgaacgaataagaaacaataatttatctaaaaaaacataataagaaacaataatttaaaagatattgataaaaaattagtggatttagatctattagtactcttcttatgacctttctattgaaagtttgaactttcacacgtcagcccttaacaatttaagttacaaagttttgttttcatcgtaaaagataagtgtacacacgtgtaatgatatttttgcccttaattcaataatactatttatattgggtacgctcacacgactgcaatttggacaaactacggttacccaaccacaccatactatatatttaagagtgataaaacgggacaagctacaccaatccaaataaaaatttcatggattaaaatcggaaaaattacatgtgggtcgacacaatttaacataaaataaaaatgagtcaaacacgatacaagtcgtttaacacaaatttaacacatttaaaatagttttctgaatgaaataaaataaaaataataataatatatttatgtaaaaatatatatttagtaatttagtattaagttaaaaaaatttaaatttaattttgtttaaaaatattttaaaaatttaatttttattatataaatatataaaaactacatatacataaatatatatataagttttttaatcaacatatatctatcatttctttataatttcagtttcaataatagcaaaacgaattaaggtaggtcaacatgcacacgacataattttttacgggtggagttaggattgagaaaattagacacaagtcaaaaacgagttgacacgcctgacacaaaatatagaaacaggtcacataaaatatgatataaacacaacatgatgacacgtttttccacccttaatattcaccaaaaaaaaaaaacacgagaaatgctaaaatgcactagtgtgcttaggaccctcttacatatcaatattattattagtgtaattaagtatcagtctcattctcatataatttaatgtaataacttttaaatagtatggctaaccaatcacaagacaacacgtttaaaaagtg

SEQ ID NO: 78189 - DNA, 618 bp, Cannabis sativa
tttctttttatgaaatgcataatttctggacctgactttggggacaaaatcctaataataccatgggatttagtattaaatgagcaccgaatcaacctcgatatttcgaggcctattaattacttttttgaaagcatcgcttgaatgtatccagatgctttcctcgctggactcttctttcacatggatgagatgttatttcggaacctggagtggcctcttcaataagctcggtccattatcttgattgcgcccgcaactgggcctataaaaattgaatttggatcttgaaattacacgtgttcctctttcaaaaacacagataacatatattaaccatttattttaacttcagatcctaactatatatatttgcttaataatgttgctgcgtatttcaacaacgctgacttgacaaatatgtatgtagacaaatatggggaaaagtatggaattgtatttttgttaatatcaaaattattatgttatacatgtgtacatctacttaattatttacatgacttggcttaaggtagattatttgttaatgtaatggtcggtttattcagttagcagttaagggaagttagttagttattgttagttggctttcctatt

SEQ ID NO: 78190 - DNA, 736 bp, Cannabis sativa
ctctctctctctctctccgttttcacttgcgcgatgtcgtatttcatctgcattaacggccacctccatggagcttgttggctggtgctgttatctgatgacgacgaggatgataatgacaaaaacaacgacaatggcgattgtggaggttaataaggatttccaccctttttgattcgtcgcagagagagtttgatttgtcgcagaaagagttcgttctaggggttgcttctctatttttgactattacggctcaatcgtctgctccggctcccaccagcgacggtgagttctctcagtttttttttaacagatttgaattattaattttgattatatatgtcaatgcagccatggttaatgaaaaattagggttaaagaaaaatgggtcttgaaaatatgatgatacactgttgatttctctctaattgaatattagggttttctttaatcaaattgtgtactgtttgtaataaagatttaatttttttttttggtgaatttttaggggcaatgataaatcaagggattgcatgcctgttgatgttggtggctttggtattgacatacctaattcactgaagagagattatttgaattggggttggattatatgttatttattcatgaaattggggaaaatttttgtggatttacataccaattagtgttctgatttagacaatttattgattgtgttgttgaggattctattctgtttggtcactgtaaaaaa

SEQ ID NO: 78191 - DNA, 2235 bp, Cannabis sativa
ctcatctacagaaaatacaaatgttactgaagatatttaagctgtcattgaagttttgaaaaatcagacactagaagcctaggaaggatattcactgtagaaaggatataaaatcattcatattaatatataattagtttataactatacacaaaatttaaggaccataagattgaggatagaagacaataatgtagatgagaaaacacttatatagagccataatgataaactacattaacgggtgactttctttttgttttgtttcttttctcttagattttcccatgaaatacttcaactaataagattcagttccatttctcaataatggtatgcaaattaaagatgaccttgaagagaaggaatttcaaaaaacatttcaaaccagaactggcaatctacctcttttctgctcttcagcaactcttcaatcaaggattggcatgacagtgcaagcttaacaagctccaaccaccctttacctctaactgctattactccggtatcaagaagtgttctaccatcatctaagattgcgctattcttgacaagttcctctaaacttggtttttgtaagagattatcaactgggctgatcatataactattttctagacttgcactcttagacgccacaacaacaccgtggttagaagcaatatccagggtgattggaacggtgatgatacaggatgtgtcctccggaagaatcaaggtggaggcatcaaaacatgggagaacatctccagtcatgataaatattccacctaaaaaaatgaagaatatttttttattaaagcatcactgtgactatgccatcatgagtagtcatcttaaataacagctcctaaaataatctcataagcggcacaaaatagtgaaacgagtacaagacaagtcaaagcattagtatatatatatatatatatttatatatatatatattactattctcgatcaaagatcggtcacattgtcacaaatttagttaaccgatttgttgacttttcccactatatctcaatattataaactcagattaagaattttaacgcatatgaaatcactcaactagcaattaagaaagtaaacacaatgctaagtttcaatagtgtgaatgaaggaacaaataaccttcatttttaaaagcttgtcttgcacaagaagcaattgcaagtatgtgttctaaaagcagaggaactggcccatcagggtcatctgcagctagatagggaagtggcaggaacacttttcccatagggtttgcccatgggactcttttagagtcacctccagcgtgaagcaaaagcacatgcctttttgcaataaagctaaccattgatgggtgaaatacttcatctttggaactctcctgccgcacaaaatgaagcagaaacgccatttttggtcacttccatttgttggtcgttaaatagcaaatcaaactcagcatgtaaaaaattttatgaaatgggagatatggagttctcttctctcaacaaatgatgaatcagacaaaaatataatatcgaaagtaaacacttgaaaatagaaaataaatccaccatccatgttacttgaaccgtgtcactatcaaaaatctccatttgtaatcacatcaatgcagctatcaattaaaacactcgtatatttcaacattccaaaacaaaatcgagtaagtagcaaattgttgggatacctctgaatcggagccaagacccaacttctgataatgcctagcgagtgcgtgaacagcgttaagagtagcggcaccggagccaatcctctggccaagcggatcggggacggcaatagtaaccgtggaggctgcaatgcggcccattcgcttggcacgcttgagctgccactcatagagctgagcttgctcggggctagctgctgtaagaacgatagcatcccaggtgggaaccctggagggatgcctcaccgacagcctcaaatggtaccaagactttcggagaactccttccagatcagccttctgcttggttctcgaaaattttggccttctttggggctccatgcttactttccgtcactttcccgggaaagagattaagaaaaatacagagaagtgttgtgagtcgaagtctcgaagattgagcagaatctgatgagtgaattgactttggtagttagttacatatgagattcacttcgcttcgcatttctcagtaaactctgaagctataatcaagtagtaggacgacc

SEQ ID NO: 78192 - DNA, 573 bp, Cannabis sativa
ggctattacactcaaactgtaaactcttctttctttgtcaatagttgcatcagtatgaacccgaaaagaaccagctgaacaatcgaacaaagctggaggatcctcaacttgagcaccagtagcagcaagagatttctgctgtgcatccaaatactgaagcaaaaaattactacaccaagcaaacacttcattaggagggataatagttctcttatacaaagcattttttctctgattccacaaagcctagaaaaagaataacaaaagatctgcagaacccttatccatattggagaaaatattagaaaaaaaatgtataatgtctaagtgtctattagtattataaaagtgagcaaaatttgtagccttccaagctttcctggctctagtgcattctagtaaagcatgcgtaacaatttcaggttgcaggttgtagaaaaaacacataggggatggaataatatgtctctggaaaaggaggacagccatagacacagaattagaaacaattctccatataaaatgtttgactttaggagggattttagcatgccagactttagaccaaaagaa

SEQ ID NO: 78193 - DNA, 783 bp, Cannabis sativa
ttgaaaacttttccgtgtgacagtatttttgtaaaaattaactcaaattcaagtatttttgtaaatttccctttttttttaattatattaaatttatcttgtgcccataaattgttaaggccaactttgaattcatgtatatatcataaatatttttgcttatattttgtgtgatagcaggtttgaaaaacaataaatgggctagaatcctttgatggaaactatataggctatttttttttatgatttggtcaaactttaaaataattatgtgaataaagcttttcattttttattttttgtgattatttgaattatttccatattttagtgtttaagattttgtgtgaatgtgtttaatttcttatatgtttgttcatttcatccattttttcaaaaggatatctatgcaattttcatgtagttttaataattagggataactccacacctttgttataaattaggttgtcatcattaatgttacactttaaaagtaatatggtgcattgaaaatcatatcaaaaccaacaccaaaaatagtaatgtgataccttaaaattataactaccaataaagataaaaagaactgaaagaaaaatagtgattgtgacacataatttgcacaaattacttatggaaattaattacacatgagtgtaatagactctttattttacttttaggttgtaacttttcttttatttagggtgcgtttggaagtaattgtgtaattactaggtagggtaattactagggtggtaattacacagtgtagtaatt

SEQ ID NO: 78194 - DNA, 536 bp, Cannabis sativa
  modified_base (388)..(389): a, c, t, g, unknown or other
  modified_base (489)..(498): a, c, t, g, unknown or other
aattagttatgattttttgaatttggatgaaaatatctgaaatcggacgcacacgtgtgcgcgcgcgggtatcaggtatcgctcggacattatgcctcttcagagacgagctgatcgagaactctcggacatagccctgtctgaagggctgctcaagccgagcatcctcgaccatctaaggctgcatgcagcctatttcctcgccgagcctccatcatccgcgcgcgcatgcttacccctttgcatcaattttattttcatcataacttttgatttaaaaatcatttttcattgaaacaaaattcaaattttggtaaaattttgtgtagaatctaaattttcaattaaaaatctaatgatcacaataaaattaatttttaattaattnnaattagttttagatattagtaggctttgaatttaaaaatttgtttttttccaaaaaaatagtgttatggttaattttgaaattttgattattttatttannnnnnnnnnaagatcagatattacttattttattattaaaatttgaa

SEQ ID NO: 78195 - DNA, 528 bp, Cannabis sativa
gttgccatttgaatgattcaaccagggttattggctactctactactctacttagaaaaataaccaaagtgtaagatgtaaaaaaggggtcattaaagtatgtcttatgcccaataagcccaaaacattaagcccaatgatcatgtcaagcctcatgctaaggattagatgaacgaatgacacaaccttaacattttaatacagcagaattaggtttagatccatccatcccaggacccaaggtaaacgttgaatagatcatatgcataatttatatagcgcttatttgggctgaatctgtatatataatgactgaattctaccgttaattagttttgtacaatgaaacatatatacgcagctttcaaaaccatccatgcctgatttcaaaaaagaaaaaaccatccatgccgtaagctatagctacatgcaccgttaaaacttaaaggagctcatttctgtgttttaacatcaatttgttttgatggtatccgaagcacatgagccatatgtatatgtatcactaat

SEQ ID NO: 78196 - DNA, 631 bp, Cannabis sativa
aaatatataatattaatatatatacatattctcatacaaaataattaataaaatatattcagagtaatgaatagtattctataaatgtagagcttgaataatttagaatatagattttatatgtgtcctttttaagacgctaatggagtttgtgctggcgaaactgaaaaaaaaaaaattacaattttactaatatcgagtacttatttatgccgcaaaaaaaaatcaatcattaagtttatgcaacttataaacaaagttgagttatgtaaaaggttgtttggtttcataacacttaaaaaactaataaaggttgtttgacaaatttttttaaaaattgagttttgaaaagctagactgcagaaaacatcaaaatactatttttaattttcaaaaataacttttttttgtctaacatattatattttatattttttctcatatgctaggatcctaaacccggaaccgaattcgaacccaaatcggttcatgtaatagtatggtgttaaaatattaatttttttaatatgaaaaaaatctaaaaatagttttttagatttaaaaagttgtgccaaataccattatattttttaaaatgacaaaaaactattttctattcttacttttaaaa

SEQ ID NO: 78197 - DNA, 751 bp, Cannabis sativa
  modified_base (703)..(726): a, c, t, g, unknown or other
tgtattcagattgtttaaatctggtgcatgttgtggtgaaagggaaatccccaaagtggaggcttgcgttggagttttatggtgttattgactttgactttagtctttgccttggattgaagttctttgtaacgttgtaaagtttgtttaactctttgcgtagttttataatgttcttcaccaacaatctgaggttggagcctagttgacgtcgaatctaaaagatctactgctggatagatgcctttggcggccaatcctcttgatagtacgatagtcgcattgttcacccatgtcttggctaaatggagtctatagggatgactgcaatgaatatttaagataaaattatatgcacttattcaaaaaaaaataataataataataataaacaaagatatttttatatagaatttcaagtttaatccttaatcaaattttccgtaaaccaataaacccaaatcaaattcagattaggatgggattagaacaaattttaatcttcttgggcatgtttttcgaaaattcagacctagcagtcccaagtcaattgggttcatcaagttttgagatttatcgagcataatattcgcccctacatcatattatttaagagaagacactatatgtaatgttttgataatttgatttaaatataatcatccatcatataattatgattgttataaaataatataaaatnnnnnnnnnnnnnnnnnnnnnnnnaagaagaagatgaagagagaaagag

SEQ ID NO: 78198 - DNA, 635 bp, Cannabis sativa
ggcttttgatgctttaaaagtttatttgatagatgattactttctgtttaacataattactaatatggaattagctgctagttgccttttcaaacaatgaaggttacttgatagaaggttgcctcttttttaaaagtaagagatacattctaatgttatctttcgccattgttttgctggttgttttctcaaagattaaaatttacttttattgtcttaaagtttacttgatataagtctttttcctcattttttgtttttaagttttaagaacttttggatgttgccttttgcttctatgtgaaatttgtattgtttgtcctcaatggttttgaatatggttgccttctgaaatattaaaattgaattttaatgcctttaaaagtttacttttattgtcttaaaaatttacttcacaacaattgcctcctctttaaatgtaaaaaatatatttgaatgtttccatcgctatagtttttgagatcctaacgtttgtcctcaaatagtttgaaacaacaaaacaaaattattgttttgaaatttgttgctggttgcttgctcaaagattaaaatgaacttttgttgcctctaaagtttacttgataggttataaaaaaaaaaaggaaataaagttt

SEQ ID NO: 78199 - DNA, 515 bp, Cannabis sativa
ctccgcgttgccagcagtcagggaactccccatcacggaggctctttccgagtttggggcctctatcatccaggagcatcaattgatcggctaaggacctcttaacctctcttgattgcaatccacgttttgcaattacaaagatgcggataacaataagtgttgctattagtaattattatttagcttaaaatataacttttttttatcatcactttatatatatttaatagagcaacattttatatttaaatgtgtttaattataaaaataaataatttagcaatatttttttattaaatgttgttaaataagtgtcattaaataatatttttgtaggagtaggatgcaaagtatgactagtagtctattatagtttacttaagaggtttttttttgaaatacatacatatataatttttaagacatttgattattctagatatctattctatataaagtgtgcctatataacagaattattggtttataagaaattcatgggtgacttttta

SEQ ID NO: 78200 - DNA, 1014 bp, Cannabis sativa
ggtaaaataattcccaacattaatgtcttccatctaagatcatagttttaagatcctggtaatacttgtgagtagatcaagatttcattgaagtctcccaacatgatctaacagtttttgattccaagggccaagtccattaattcttcccataaccttttccgatcttcttcatcattcatgccataaacaaaagaaacatgaaaaaccttcttacccaatgtcacctctaaatgaataagctaacttgagcaaaatttaatatttctatggaacaaaattggtttccaacttactattattctaccaccagggtgccaagcactatttatcgtaaaacatcaacctttaaacatatttaagtttaaagctcataacttaggagctttaactctagtctcaagaaggccaaccaagcttactttcaatttagagattagaatcattagatgcttaacctctaactgtttgttgctcttgttgatctctcagacattccagctcatgattttatccattttagatgggaagctctcccccagctgatcttatagcctgaatttcctcaatctaacattctacttcttctaccaaagaacattctcctcctattgccaaagcttagaagttattcaaaatatcaattgctggtgtagcttctataatcttcttccttgcttaaaaccttctttatttatcacaatgtctcgcttttcttattccatctcctctttttgtttattctcaacctaaatctactttgtcttgaatgttgcagtattttccttcttcttacacattgctgccgtgtgccccattttttgcattctttacacaccaacagaatccattcatacttcacgttaacctcaatctcttgatctaatttattgtaaaatgagataattctaggcaattcttgatgcattctgacttttaagggaatcctgagaaagttaagacattccctgttctttgtaaccaaatctaccataagtggttctcctaattgcc

SEQ ID NO: 78201 - DNA, 951 bp, Cannabis sativa
cttcagcttctccttatttcaagatccaactactaactcttttttttttgaaggaagatccaactactaactcaacaaaaaacagttgcagtaattctagagcaatagaagaatagcaaaacactagaaaattgtttgactactcaatttattgcataatgcatacccctttaatgttccttaatgttggcctaatataaatcttattaacgtctgcggatttcattatcaaaaaaggtattcacagctttatatagttagttcatcctttaaaaatatattttaattttataataattttaaaattatttaaactaatataaatatagcattgtaccaattataacatattttttatttacactattggtcatttaacaattactttaaatttacttttttaattacaatattactatcatttttttaaaatatacatctaatttattgattcattaataataattactttttcataatatttactaaatttttatgtcaaatttaacatattttttacctcaatccatccatgtcagcagaagtagaatttaggaagtattggcaccattttgaaaaataaaaaattagtgtcacccaaattttagattaaagacaaaacttgttacaaaccataagaatttctaaatgggataatttttaaaaaaaatacaaaaataataaaaaaaattacaaaattacattgtacaaaattttaaatctttttacgattttatttacaaaaaatacaatattctaatacatttttatattgtactcttattaattttctattatttgtaagttagtttttatcgttgtttgaatgttatatttctattactttatataattttcttattactttcgtattgttttataaaacaccataaaaaaatgtaaaaaatttacaaaaaaaaaaaaagcagtatattatggaatttctaataa

SEQ ID NO: 78202 - DNA, 615 bp, Cannabis sativa
aagtacatcaaccaataaacttcatctttgccaataaactataataaagtgtattaagagcattatccaaagacaatcttgttggcagagacaaagaaatagaaaataaaaattatatcgcatgtaaattagatatgagcagtaggtaacctacttcttcgccgcctagacgtgttctcttcctcattgaacacgaaattccactcatttgatctgaaatttggcttgaactaaaaggtgaactttgtgatgaaattaatttctcagcgttggaagccgaaatcgaaggaaagttctgagacagggcaatcaaaaagccttagaaatacccaaatctcctcctccattaccgatagccaaaaccacaaagacaacattgagttgagaacacaaaatagtaggagattcatcgacgagagactctagaccattggattattggggcttcagggattgaaatttgggtttgggagaagaaagaagaatcgcaataaatggggatgaagaatcgcatataacaattttgatttcttggggaagaattgttgggattttgttagagaagagaagaaataggaatcgtattttgtttttcattttatttttaataataaa

SEQ ID NO: 78203 - DNA, 837 bp, Cannabis sativa
tgataggactaattagagcttaagaaattattaccttaagtacaggatgatgaacctctggcaaattttgaaaaattatagtgagttttgctcattttgtgttaaagtaattaaatttatcactagattaaatatggggttcagtataatgtttgctctatgtgcaagttttctccattcaaagaaaagaaatttaattttacagttcagagtgttcaatgaatcttctaagcaagttgaaggtgaagtcaacaagtacttgttttgttttatctctatttcacatatgtttgattagtttagctaagaaagaatgattgaattttagatgtcttatgtatgtatgttaaaatgtaagcttagaatagctcatttttctttaaagtaaagaagattattactagatatattatgggttttggtataatgattgctgtatgtacaagttttccccctttaaaagcaaagaattttagtttacagttcttttgattgtcccttgtttgcaggaactcagattttcaaaagtcagttaaggatctgaaggagaaggcagaagagctaaaaggggttaaagaagagctaaaagttaggtaatttttaactgtggtcattttttagattttgttgatttttcaaatttttagtttagtttttattaggctgagacatacccttgtatgtcaaggctgggtggacacttcaatggaggacctgagaggctaaaatggcgaatgcagaacaaagcaaacgacggagcagctgtacaagcaggtggatggtgtgtggaccaacgctgaagcaacagcaaagaaggtcagttcaaattcatataat

SEQ ID NO: 78204 - DNA, 875 bp, Cannabis sativa
catgcatcgcctgcacaaaaattcgccaattaaggtaaaaaatacaagcaaagaaatattacaatataacaaatatgactttgggaatcaaaatatagaggcgtgggtgtaccaaacttcacaattcccacatcctatctagatgcatacctttacaatttactacaaaactagatacaggatacttcttgtccccttcaccattcacaatcctgaaaaacatttcatttgtatgtaagaaaaaggaagtaaaaacaaacgtttcttcagagttatacaacaaaggtagataaaagtcataaaattactcaagatgctctttaatgcgctgaaggagtgtgcttttgttccctgtcagtctcaatccattcttccttagataaatcttacattggtcaactttcaacttctctagctgccccgctgccacaacagaacgaataaaaattattcgatcattataattaataaagatcaattctttcataaatgaatagttatatgatatatataattagttcatgaaggaaaaaaagagaaacccttttctgggctaaccttcaatctttctttggatttcctctaagctcttcgcatctttttcatcaagttcttcatgattaatataactcccattggggtcctcttcgttagggacatcaatatcatcacaaatactattgattccccatgaaaacacaataacaaaagtaagtctcaactcaatccaatatgaaaaaagacgagaaaaaaaataaaagattttagacacaaacctagcctttgttttcttcttgagtgaaagcttggaaaattttttctgagtttcttccataatactgtaacttgggtcctcgtccgaatcatcggagccg

SEQ ID NO: 78205 - DNA, 694 bp, Cannabis sativa
aaatagtgattgttactattcggacaatggtcgtggatatcgttgtcgttgcaagcaaggatatgagggaaatccttatctcaaacaaggatgccaaggtatatatatattccaaaattacttatgtgtaatttactttagtttaaacccgacccaactctgaacttatatcttgtttcacattttttgttacaaactctgttttttgtggtgttaatatatatctttggtggtggtagacatcgatgagtgttcagatcctaatatcataccacattgcaaacgatgcaaaaacatacctggaaattacacatgcaagtgtccatttgggatgcatggagatgggaaaaatgataattgtcaaggatttcggtttaccacattagctacaggtaactataattgtaacaatattcattaattctgtaaatatatcatatacaattattatatcaaaatgagtatatatgacaaaaaaatttccttcaaacaaaatagaatccattatagaatttattgtcggattatttcatatatgtttatatgcaaaaaaaaatgataaattttttacatttttatagagctactgtttttttttttatatatatttttatggatttttttataaaaatatagattgttgtttttcacttgttttcgaaaaaatatcgttttaatattgttgttacgggaa

SEQ ID NO: 78206 - DNA, 1181 bp, Cannabis sativa
caatggctattgagattattgtagagtttcttaaaaacaaagtcacctctaggcttttgtacttggctcgtagaaacatgtaagaaccctagatacttaccacacattttgttttaactctccatgcatgctaggatttattctgctacatgtttgtatatttagaataattttttgtagttacatagtagcttgctgtatttatataacccgatttttgctttagaccatcgcactggggatctttcattcagcggatgcagtttcttgaagcaaattcatcagttttgcggagtttaaaacacataactcccgatgtctttacacaattgacatctgatactcgtaggttacttactcgtgaatgcaaaacaatatcacagcatgattttcatgcagtcttggcctctggaactacactatattctggtcagcaatctcatggagctacttcttcctccttttggcttcctgttgatctatttcttgaagatgctatggacgggtcacaagtggcagctacaagtgctgttgacactctcattggtgcgagtcaatttaagcattccatattgttaatacgtggactgaataagctgttgattataaatacaaatcagcgttattgaaacaatattcttcttgcaggcttggtaaaggcgttgcaggtagttaatggtgcaacatggcataatacgtttttaggtttgtggatttcagcacttcgcctaatccaaagggtgagaattatagcaagttgtcttcactgttgattttatgatgatggtaattttacttgagactagacaatttagtttgtttgtctctatgcacatgagcatcacatttggtgtttttggtgtcagttgtttgtaaatgaatagtttggtggggctttggcacatgaactgcagacaattttttgttttgcacaaatagcaattaaatttaggcaagtgtcctgccgtcatttttacttgaacaagcaaacgttttagacttggctcatgtacaaccatacccatgtggcttgcacagcttttcctttatatacatatatttgtatataaaatcatgcttaatggttctcttataagcctgaaaatcaagtcttgcgtatggaaaaaatgagaatgtttaatttttaattttttcttcagagatttttttttttttttttt

SEQ ID NO: 78207 - DNA, 678 bp, Cannabis sativa
acataagaagtcattaaattattaccttccgattatttgagtaatttcttcaggaattaggcggccacgtacagggtctaaatggataatttcctttagtggacgtagtgtaatgtgaatatgtgattcatgtggaatctttttgggtgaaataaagcttaattatatgcatttatcctcattttattcaagttagaaaaattataaaatttaagaaaaattcaagctcttttcctctctctctctctctctcggcttggtgtggattgctagggttgggagttcttcttaatttttcaagcattttaaaccaatctaagtgtagttcaagttgtcagtaaggtccttgaacttgttcttggtaatttcttggaattttgaagaaaaatgatgatgaattgcatgcttaacttgaagtgttgttgctggtgtgtttgtgagataatttcagaggtttaatcttgtttaattgagtataatagagcaggttatgatgcatgttagttgtgttgttaaaagttttgaattttggctcaaaaactatgttttttaagataatttgatgaattttcgagccttatgtaaaggccgcttagctttaatttagaaattagcagataatcaggagttaattatgagaattatttatttatgcttaattattaaattatgatgatt

SEQ ID NO: 78208 - DNA, 529 bp, Cannabis sativa
tatatatatatatatatctctttagtttaaaacaacacattcatgagtattgaaagtattggaaccatttatttgatatcccaaggcactggcatatatataataacactggagaaactatataagattgatttttttttttttttttttgttaagtactatgaaagattgatcgagttgactttattgtattattattaattgaatatgtatatactgtatatgttagtatcatttctcgatcatattgatcatatatatatactgtatatgttagtatcatttctcgatcatattgatcatatatatctatatgtagattggataggttaagagtgaaagagaaagaaaaatgagtgtttgatttagacctagaatttaataggagggtggacgcaaatatttttcatgtataaaaatatttcaaaaaaaaataagtaaatataaagaaaaacataatcaatattttaatttctaacgaaaaagatattaaatatcaagcactaaaaatcttctaatagaaaaaaaa

SEQ ID NO: 78209 - DNA, 1796 bp, Cannabis sativa
agactcaagtgatgatattacataccgatatatgaaatcatctgataataacaatcctcttctttcctgaattatgatttatatattattgttcttttgaatttttcaatcctttaaaaacagtctttaaatttgtcgtaaaataattttttgtcaaatattatcacatgtgacaaacagaataataatgtaattgtttaaacaattgacatataagtgtcatatcaacatcatgtgtataattaattttacaaaaataaattaaaaactttaaaattagttttacgtaatttttttaataattgatttttaatttaataatcttttaaaggtataaaattttacttttaatttttaaattatacatgtaaagttgacatgacaattatttaaatagtcatatttttaaggctaattagaaattttgtcccctgaacttttaagatcgtgaaaaatgctccctgaactattgagattgttggatttaagaacttttgtctaatttcattcaatcttactatttcagtgattgtttatatactaaactatgctccctaaattttgatatttaccaaattatgcccctcaaactttaacatgtactaaatcatagctcttaaactttcatccatgttacttttttactaaaattggaaaaaaatccttaaatccaacaatctcaatagttcaggaggtatttttaacgactttaaaagttcaggggacaaaaatactaattaacctatttttcattttaaattatgcattaaacgctggcataacaattatttaaacaactatatcactattctatttgccagatacgatatgacaaaaaaaaaatattttattgaatagtttgagtacactaaaaaattcaaggggacaaacaaaaatcctaaataacctatatataattgtgtgaatatttcatattatatcatgatagattttaatcgttttataattatttatattgtgcaatatttatatatatatatttatatgttaagataatcattcatatctaaatattcaacatggttttatccacataatagcataaattattaatcctacgtgacttttgcggtccataaaagatatataccaatccttaaccccaagatagagttttggtaaaatatatataagatactatattttattttgaggagtggtaattataatctattaatttagtatattttaaagtttgagagacatgatttgataaatattaaaatttaaaaaacataatttagtaatcaccgaattagtaaaattaaatgacattagataaaagtcattaaatttaacaatcttaatagttcaaagaaataatttttaacggttagaaaagtttagaagacataatttggtacatatcaaagtttacgagataaaaatagtaattagcttaaataaaatgaagtgtcaatttctatttggtcaatgatagaaccctccaactagcaagtagctaatcttcaccttttccttacaagttcattaacataaccacatacttatatattaaattaactaaataataataatatacaaagtgggttgcatgtaattcttcctctgcaaaagaaattgtctgcagttgatcttgtctccaatattaaattcaaaaaaaaggtacattttttgcttttccttttagcattttgctgaatattaaaaagtcaaaaaaagaagatctagctatgaaataaaaagctaattaaaaggaaaatataaagttgaattaattactattattcattatataaacacacaaacacaat

SEQ ID NO: 78210 - DNA, 1185 bp, Cannabis sativa
atcaaaacagattgatgttgccaagtacaatcatcaacgcgaagtctctgaattcacaccacgaaacactgtaaattcccaggtagcagtggcagaggcagagctcgatatgcttcttgactcactaactagcgtagagattctcgattcaactcgtttaagttcagctcaccccatagaagaagtatctgcagccaagtttcaacttccgaaaaagaacctggaagatgacctagatgacctacttaatcagacgcccggtttgatgaaccgaagcaataatttatttgaatttaaggtaggaaagagtgagaattttattcagtgtaatgtctctcagtctcaggttggaaccaagtctgaagcattggatgactttgatgcttggatggatacaatttgattatgttctaatttaatttggttttaagtaacaaaaattatgttttaggaagtatgtgtcattatgtatacatatgtttataattaatttttaaaaggttattttttacatgtaaacggttttagtcctttttttcctattgttttcagtgcctattatattatgtgaccctttttttaggatgtagtgtattatgtatttttggcttttagtttttttttattcattctcagctgcaaaataatatatgcacttaaaattcacacacaaacttgacacgcttatgtggcaactaacaagtaatttcaactaatcatttttatttatgattggttccacttattaaaaattacttaccattttagtgtgtgatttatgtgtgtatatatttatttttattttttaaattaaattatatattttcatttacttgtttgtttcccatagattgatataagctttctttagactcctatttgggtttcaattttgttgctattttgatgaatgatactagtaccaaagaatatagtaatatagttttgtgttgtagaatttcatctaggtatgaatttttggcattgatttatattacacatagactaataattgcagtcatccttgatttttttgtatgaaatatagagaaactctaatgaatcaaattcccaacattcacatgggaaacttcgatttgttgtataatttctcatcgtgcctcgacaattgttatacttgtattgcatgacgggggcttaggcgaggaagaatgatctccctcc

SEQ ID NO: 78211 - DNA, 708 bp, Cannabis sativa
tttttttttttttgaggtgtaattataatgatcagcttccgcctccgtatttttagaaatcgaaaaaataaatgtgattagttttttataatgacgtatatttgaacataaaataaattataaatacataagtgaaaactcccctattttttatacagtgaaaaaaaaacacgtgtgattgtttaaatttaaaatttattttatattaaaaaattgaaatttattttattttataatttattttttgaaatgataatttatttcacactattttgaaatggtccctatgagaatcatactctcaatatcgaaggcagaaattcaaatctccccaatctccataccactccaaatccaatcctataaacgattctcactgacccatgaaattctaacccagaaagtaacaatcttgaatgtgcccagaagctcgatcaacaaatcgactgggtttgagcgactgaggtgggttctatggtatttctttcctggaatggagtttttagatctgcaatagctttattactcttccatatattagagttcaggcatgaggtaagtattcatataaaaaaaccctaatttcaaataaagagactaactttttctttttgtgtgtttgttgtggaaatgagaatgatttgcagagcttaaatgtttcgcccaattacaggtgtatgaactccttttgaagcttccaattactta

SEQ ID NO: 78212 - DNA, 647 bp, Cannabis sativa
tatgatttcaattacatgagaactccttctaaaaaaaaaaaattacatgagaacttgatttatttatatatcacgtgtacaaataatatttttaaatttattttcaatatcctaaattattaattaaaaataatagaatgattttatataattggagatctatataaaaaattaggattaaaactttaaatataaaagaaaaaaaaatagtacattttttattgacctcttgggtatgttaaatgttgttattagtcaacataattttaaaaatatacttaatctattttgttcatgaattagtatagatactctttggtatgaattcatctcattttttttttatggatgtatcatattattttcaaaattttatgaattcaatattttcaatgaagcttctttatttttaagcaagagtattttcaataaagttataaagtaaaggtgcttctattgtgaactccgtaaaaaaattaagtgtattagtgaaaaattcattgtacgtaattttgatatttgaatagttatagttttaattttttatatatagtagtgtatattatagttatttataatataaaaaagaaaaatagagatcaaacaatctatttctcacaaaattatatttaataaattatttaaat

SEQ ID NO: 78213 - DNA, 611 bp, Cannabis sativa
ataagatggttcagtatccacgtactgtttttgttgcagctttgcagcgacattatgcagttttgcaggctctagctttggaagaagatgagatgccagacattaaagatgaaacagtgcctgatgacgaaggcatgtctaggtaaatatgtttgtctactagtaccactctttaggggtattcattagaccacatctaatattttcagccctatccagatccgatcctattatatattggattttagatttaccattcaatccgatccaattaatttcagcagtccaattgatcaaacattcattggatgttggattagatcggttctattcattggatgtatttcacgtatatctattggtttaattcgggtttatccaatattttagacttagtattttttagatcggatcggatccaaccaatattttaaatccagtatttattggattggatccatccaagccaaaaataaaaagtaaaatttaatgttaattttatatacatatatttttattacatataacaacataaaatctaattactcattcaaactaaatgaaaatattaatatgtttgattggatgttggatgtattggattttggaca

SEQ ID NO: 78214 - DNA, 779 bp, Cannabis sativa
gaaaccagaacgctccttgtgtgctcttccctgaaaaagagataatataggtcaaccaaaacaaagtcaaaacaaaaagcgtatccaaaaggagagcacatgagcgggaacaaaccagggtgtgtccaccagaaagagcaacaatgtccacatcactgaggcccattgtgccaaaaacttgacgtaaatggtcagaacctgaaaaaaccaaagtataatatgagcaccaaatcaattctacacttcatgtagtcttgtaaatgtaatatacgaaataagaattggatgtttagaggtatatagttacccttggtggcatcaggaagacggccttctggtggaggctcaggcttgtcctgagatcaaaaagaatctaaatatcagtaaagaatgatgcagaagtagaaaaagagctaacaaataatatctaaatttccaaacagtgtaaatgaattcacactaaaagtaaaaccaagacatttagaaaaacaatgttataaatttaacaacgcaaacgaaatgtcaagtacaattacgagaatgaaataaagggaatacaacattgaaagagctaataattacatgaattttacccaattagaaataaaacaaaatatatcaaattcttccaacatttcttaaaatccaaccaaaagtaatagaatgagcaaactgaaaacattacactcactcaaataggaaaagtggtaaagacaaaaaaaaatcgaacgaaacattaattctaaatcgtataattaattattaataatattttttaa

SEQ ID NO: 78215 - DNA, 609 bp, Cannabis sativa
tcttgaattaattagggctatatacagatttacagtatttctaacatttggtatcaagagcatccctaaattagttcttgagaatttatagtaaaatattggtcttccattttattttttttattgaacgattaacgattttggttataatcgttttaccgaatttatgtttcattcggtgatagtcgttcaagttttatatacatatattactgttttcaatatatgattttattaattatatcttttgatgattggattggtttattgatgtatgtgtttttcgtttcctctgttgttattcaattgtttgaaagttaagtatatatgaatttatcatcaaaatgatatatagatacatttacagttcaattttgttttattattggataagttatatacaatccaacgttttgtgtgattacttagtaatctatttttttcagtataaatgattacagtatatatgattctctttgaagatatattggattatttcaatcccgatactttattattattattatataattttaattaaataataataatatataatacagtaacaattaaattcaaattttggtttaaaaaatttattaaggatat

SEQ ID NO: 78216 - DNA, 958 bp, Cannabis sativa
cctatttatagccaaagtgagtgatttaaaataattaataaattattttaataattttctagaaatttctatcataaatgaggtaggtgagatatgagaagggtagaatggtaaaatatacaatgtgcaatttattggctaagagaaatagtaaaaagagtcaaataaatgcaagggaatataaaattataaattattttgaaattgcctttcaaaacaatttgaaaaatggcagattgaaggaggagacgacacttggcgtacatgtatttgatgttgaaactcggattgaaggacgagcagacaagtgtcgctcatgtgatggctagaggagaggagctgctggagagaaaggggacatgcgggtcccacgcggctggcgctggcaggctgggcaggaggagacaggcacctcacgcgccctgtctggccgtgaaccacacgcgcccgtctgggccctttgatgtgtgatcggacggctcgtgatgggcttttggcttgcgcgggagtggctcctctttccagccaaaatttgattttctctttaaagaatatactcctttttcttcaatttattttctatgctcccaataattttaattcctacaataaaaaaaggcaataaattaaatctaaattaaatattttcaacataaaaatatatcttattaatttcatgaaaatattaatttatttttaatttatcttatactttaagcttactaaatgtatatttttcactattaatcacctgatgtcccgcaaaagaggagattctaaatccccaggtgctcctgaccaagtgccggtaatcctagtcacaatttcgggatttacacatataggtttaatccttaattccacatttacaaaatatatacttggcattaaaaatataaatattcacatagagctcaaaacaagctttccaacggtataaagaactcccaaatcggag

SEQ ID NO: 78217 - DNA, 836 bp, Cannabis sativa
tttctatgttgaatcataatcgtgaggctcaaatttggttaacgaaaatatgcgttaacactagtgatccatataaataagttgtgactacatccattaatatcatgtcgagttttcactcatagccaggctaactaaatatcttacatccaacacatgagaatatgtctcttcataatcaatgcatgatctttgagaaaaaccttagaagtcttgctttgtatctcacaactttatttttctcatttcttttatgtaaacttatccatttgtatccaacgagttttacaccttcaggtgtttggactataggtccaaattttttgcgtgtaggaagtgaattcaattctacatgaattgcttctttatattttggccaatcttttctattttgacatttttgatagatttaggttcaagatccttgtttcatttacaatttctagtgctacattataagtaaaaatattatcacaattactttgagtcggtctcattctcttcctgtattaacatagtttattgagatcttattatatctaatatttttaggtacctgaatctcttcaagagatttattttatgtcaacatcttcctcaaaattttcaacctcttcattagggccatcttgattattttctcctattcttttttcaggatttttatctttggaatcaactggtctaccatgtttcatgcttgctatagaatcattagctaaattgtccttctgggacttcaattcaatctggagtattttcagctgaatatgtaatattataattttctttaggtcagtgaatgcatctgttaattgatttgtaatattttgcaa

SEQ ID NO: 78218 - DNA, 1128 bp, Cannabis sativa
gggggggggggggaggtgtacctcacggttctctttatgtcttttatgttttgtttattttgtctttatgcgtttggttttgtgtagtagtttttttattatgtttatttgtgtgttatattgaacaatagttttagttgacagcaatgaatcgatgatgagacttttaattgttcgaaagataatgctaggaaggtgataactttctcataaattgtgtgctcaactgtagttaatgattgctcaagcttaatttttaaatttttcacgataattgaatcatcataattgctaacattttaaaaagataagtgcatgtgtaattgttaatatctcatctcaaccactctagaacttgtttgaaaatcatttgagacgaaatcgataaattacatatgattttgaggtatgatatagataattttttttagatcgattgagcttttcaagcctaccctatttgtgaatttcctaattttacccaatttgagtctaaatgttaaaatcttatttttttgaccctatacaatagcctttgagcctaaaaatattatatttttcccttgttcatcctttttcaaatcatagtatatggatgatttatgtatttataaagatatgaaaattttgttgaaaaaatttgatgtttatgtatgagttaagataaaaaaaaattcctaaaatgaatgttcgtaaattacaaatattacatatatgaaaaaaaaagtgaatgaaaacatatgacatgaaaaaaaattcactaagaaatataaaatgaatacttgcaataatataaatgtggggaaattagtaagtttatgctaaaaaaaaatgcaaaattgaataactcaagagaatgattgaggaatactaatgggaatacttgaagaggaaaatacatatgtatgctatggtgtgatttgagcctaaaataactttcttactcaccttacatcctagccaaacattatgagcctataaagtcctattgatctttaaattatatgtgattacattagtagagaatgagtttgatgattaagcttatggagtagatttttttttaaatatacatttaattcgagatgagtattgattgttgcatcaaattaaaagtgaatagaataa

SEQ ID NO: 78219 - DNA, 843 bp, Cannabis sativa
aaaaacaaggtagcacacacaaatgggtccttgattgtgactcattgataaataggtaacaacaaattaggtccaaaaaaaaggaacaataatttatcatgagcgcgtgacactcacgcacaccaaaaaacaaagaacaaacattttaatatccataaataaaaaaaaaccttaacctataagaaaaacaacatacacaaatctcaaattgggatatccaaaaaccaaaaaccaaacccatatagaagaaatgagaagaggtagtagtagtagtagtggtggtggtagtaaaacgacgccgtgttgtagcaaagttgggataaagagagggccgtggacggcggaggaagatgaagttttgtgtgaatttataagaaaagaaggagaaggacggtggaggactcttcccaagagagctggcttactcagatgtggaaagagctgccgtctccggtggatgaactatctccgtccatctgtaaaacgtggccatatccaacccgatgaagaagatctcatactccgtcttcatcgtcttcttggcaaccggtaatacataactacatacaaacacagattatatatatatatatgtataactcaaattcatactcgattgatgatgcttcttctttaaggttttaatcaaaacttttgtgtgtatatatgtattattgctaggtttagggttttcttatctgggtttttcgtggttatgaaatagtgattaattattgtagctatagctaggtttagtgttttctgatctgggttttttgatgtgtaagcttttcttcagtcaaacagtgattaattatgttatatatatataatatatatata

SEQ ID NO: 78220 - DNA, 665 bp, Cannabis sativa
aaacgagctttccaacgataccaagaatatctaaaacgaagtttggagtcaaaaattatggtcaaaataagttttaacacattctgccctaaaaaacccctagctggtcgcgacactcaaagactatgccgcagctcctgggttaaaaactaaaaaaaagtcacctttaggtacccaaacttaacccaaaaataccctaacttgccaacaagcttcccaatcaaattgagatttttccaagcatttatacaccaaaatacatccaataatcatgcataaaccaagattctaatcaacactaaattcatctaactttggagatgaattaacctccaaacaaatctcaaaatcaaaaaccaaaatcataaattaagcatgtcaacaaaaacaacacactagcacactattatacaagcttgaaacccaagcttcaaactttcaaagaaatacccagaaattcaaagcaaattcccagaatttaaacataaaaaataaagccaagaacctcccaaatcaatctagatgcatacaacacaatcacatataaaacattataatttccctcaatctcaacaacatgcatcactaaaatcccaagaacaccgagaacatccacaaaagttataaacaagcttaaaattcagaaattaaatcaagtgaaatgg

SEQ ID NO: 78221 - DNA, 526 bp, Cannabis sativa
ttatatattacaactatgttttatatgagacttatgtccactgtccacttgagctagcctcaagtggttatggttctctttagttgatcaataacttaaagttctgttgagtattcttttgttttaattatttatgttctctctatgtaaatattgattttagctagtttgtgccatatttttagttagtttgtactattttgatttgactggtatacaaattattgttggcttgtttgtttacagagtgaaccttaaagagtgctattacagattttcacaaataaattttaaatcttgtcttttaattatattttaataattttagaggaattttcttcctattattttaccatttatttgttagctaattgagttttgttacatttttgacaaattaactaattttagttgggatttgatttaaattttatgtatgatgcatgttttattaactagtatactttgctttagaaaacttagcttatacaatggtagttttggtctatttggttgttttttttat

SEQ ID NO: 78222 - DNA, 1185 bp, Cannabis sativa
tatatagatgaccggaggagtacaagaggctatgtggtgttcttagggagaaatctaatatcgtagtctgataaaaagcagcatgtggtagctcgttcaagtactgaaagtgaattctgagctttagcaaatgttgcagtagaggtaaaatggatagggtcactcctaaatgagcttcaagtgcatcaacttcaatctcccataatttgggtagataatcaaagtgcagctacactggctgctaatccggtgtttcatgctagatcaaagcatattgaacttcacttacattttgttagagatcagattttagcaaaacaacttcaagttcggtatgttcctgcattgaatcaagtagctgatgtgcttactaaatccctctcaactgacagatttttttatctaaagcccaaacttcaaatggctcttaccccttttcgtttgagggggaatgttagtgttgaaagttagttaagctgttagttaggacttttctgttaagtgttggttatttctatttcggtcagttatgttagttgtactattgtctttaattcttgaatataaataaaggcatattaatgagagggtgtagcttttgctgcatcattactcttcttttaaagaaactctgtttccttcttccttggtgctctgcacctttcttgctagtcttaacatgggatattgttattgtataatcaaaaagtatgcatacatgtacaatatatttattatttatttatatatatataaattacttccacacatccagttccatcatcaaatatgtataaccaaatgcagcttactgaaatcttatgagttttcatgactcaatagtgagatgtaaagaattttgtatttccaaaagttagttgaatgatttaggccattcaaacccgcattgcacacttcccttaccgcacaaactccaattttgtatttaccaaagtatattattattttattaaaaaaatgtagccgaaatttttaattagtcaagtctgaaaacttactgcttggaattgaaaagggccacataatcaacattagtgattgtaatttattataatatccaacaaagagataaagttagataagaactgagtatggatctctccatgattttcacagaattaactataaaagatatgttgcatatttaccgcaactcaaataaaa

SEQ ID NO: 78223 - DNA, 1071 bp, Cannabis sativa
ccccattctaaaatatgaaaagggttggaaaatcattgtaacttcactctaagaaacacagccatttctcttcctccatttttgctctaaaaatttcttttaagtttttgtatttcatatttttatctccattctaattcttgtgtttgagtttcaatcttttggccttcagttagttgacaagttttcatcgtcaatagttgagttgaagagaagattacaactttaaactacaaataaaacacaatatatagtacatatatatatatgtatatatagatgtgagacaaatttcagcaccacaaacaccaattgacaagtaggggaatcaccaaaacttaaacaaggttttacacctttgtcgaaaaacttatttaccctaccagaaatacttagggaagaagaaacatggaaataactttctgaatttatcaagcatgtctagtttccggcaatgtgttcactttgatagaaactctctaattgttcacaaatgaatcccttaggtctctatttataggtaggtgaaccaaactttgaattcaattcccacactctccatagttgttaccaaacatgtatgagagattaatggagaaaaacattggcgagaaaccaagaaacatccctcattgaatgcccaacatcttaaaaaaggctctagataacatgcagcctagagtaatatcattgaacctttgacatcatccttagttaataggcaacatgtcgccaagtaagaggcgacatgtcacttggaccatttcttctgctaatatcctctatgagataactgcataattaatgttttcatgtgaaataaatgcttattacatcaatttctaatagctggaaacatccatcatatgcttttataactcccaaatgttattactttctcaattacatataatcaagcttggtccataggttacaaatcaatattcagatttgtaatctctcttatgttacaaaaatgtctctttgtgtattatttctcatataatataagtacatattagttccacattaatatgtagcacatatcatattttatataacatgtcacat

SEQ ID NO: 78224 - DNA, 888 bp, Cannabis sativa
acctcggcaacatcattggatgtacgtaaaacttttaattatataattgttgttgttgaattgagatcatatattaattaattttgaaatgggttttgtttttaatttgtgaatggatcaggtgttttgagtggtgatgtttttgctagatactgtcgtcttcgtgggtacaacgttgtttacatatgtggcactgatgaatatggtacggccactgagacaaaagccattgaggagaattctactcctcaacagatttgtgacaagtaagctggtcaacctcacaacttttttttggagaagaaaagaaataaaacaaaaatcatttggttcctaattgttatatatttcaattaagattttattttagagaaatttgtagctgtttcttgacatcataaattggaaagttatacataggtctctggtcaaacataacgatcagtcagggcctagggtggccgggccgttgtccaagacccttcaaccaattcgtataattttttattaaacttaataataatatgtattttggatggaatattgatatttaagacaacttttaagtaaaataaaaatattaatattgagttaatactgtgtttgagaatattttgttattatttgtactataaatttattagaagtaaaaaagaaaaattatcgaaaaaatgaacaattattttaaaaaaagtttaaaacgaccgcgaaatctatttgtgagtggattaatttggtttggttaaattatttaattggtctggtagagagttttacattaataatgtttgaaattaaataacatatataagatgcatgagctatttctctcattactatacacttttgcattctaatatggtatcagaaccaaactaaactctaacg

SEQ ID NO: 78225 - DNA, 747 bp, Cannabis sativa
  modified_base (720)..(722): a, c, t, g, unknown or other
ctggaggctggccaacctatgttgccccatggtagcccaggtattgcttctgcaaccctgggatgtgccatggccgcccaagtattgctcatgcaaccccgggatgtgcctgccatctttggtaagtgctagtcaacctcagtatgtgttggccagccttagtagcttctttgtataactttacttgcaaaggtcagacttccttggtcaaacatgccctttttggtctgacagtcactctttggtcggccagcttgtgctcaaaccctggccggccatacaagcttcctctggcaggcctatgtacttcccttggctagccagacatggttgtacatcttcttaacagcttgcttaattccttttgcttgttgcttaacagttttgtcatgtcttgtaaggagaccctatcccgctatgtattccacgtgtcctcattcttgatttatgtaggcataccacgttaggtggaaaaaattggagataacaagtagcttcttcaagagatgtaggaagatggaaactaaatttaaccatgtacaaatcaatatgatgatagtgccaaaattgaattgtttattgaataacatccaaaaaaaaataattatacaataaaaaaatttacttaatttaactaaatagaaattaagaatataactaaatggaacacttcttaatgggtattacccgtgaatggttactaaacaaatttaactatannnattaattttaaaaatatcaaaccat

SEQ ID NO: 78226 - DNA, 2561 bp, Cannabis sativa
ttttaaaaggagagcacatcaataacatataaaatgaaacaaaggtagctttaatctaataactatccatttctctgtcttttatctccattaaattccaaaaattacaaacatttataaagccataaattttaaagaaaacccagaaatgaaatgcgttcattcatttagtaattgacgaacagtttttgttatgtgcagaaaacccagaactgatgtgagaaagagagactcactagttgagagaagtggcagagtggaggcgtggagctgcgtcgactcacactgagggaagagagaactcagaagtcgatatttgaatcgttgattgagggacccggataacgacccgacccgacccgaccctgattctctcttctcccttttttttgctacccctcaagctatgaagacaataccaatcctatagagagaacccgtattcaaaagttgtcacaacaagactcgatagtgtctctatagactctattggcttcattcaggggcgagaagactcgcaagggaagaggctgggtatagactatagagatcgacctcttcaactttttattttcttttccttttcaaccctccaagtattttggtcattgattatcaaatttcaatactttacctccatgtttaccaaaagataaaagagaataattaataggaaattgagaaagataaactctttatcatacacatttttcattcttttattaaccagacacaaaacgaagcattccgaaaaaaaaaagaacttacacaagaaactattaaaattcaactcaatcataacaagagttatgtttacagttgagtgcaccaaatttcagcaattctcttttctctatatatatttaattttttgttctttcttctctacaccatcttctcttcagcaaaactcagagcttgacaaaacgacgatggtccttcaatcttatcatcggagcaaaagtaggatttcttcccaatcaactcaactacccttttcgccggacctgagtctcttgggctctctttaacacatcggaatattttgatcttgggaagcacatctgcagtcagagtttcaggcaatggtgacttctggcactcctcctcgtccaagcctttaaaaacaacaacttcgtgtgggatttcccacttcttcttcgttctgttctccgttccttgactcctacacaactctctccctcccccacgttgttttccggtgaacgacattcgtttattgttgtcgtttctcctgctttcgtctttgtcatcatccggtagagaccttttccggccatcattccccggcgtctgattataccggctcgccacaactctccccgtcttaacgggctttttcgcggccaccgatttttctccctctttgaatagcttcttaggttgaatcgatgaaataacagcttcttctttcttcaccgcccttttagaacccacagtcgtagcggcttgtttcggtggaggttgagttttggttgtggtttttcgagatttaggactgagacttaaacttttacctctttccttagttaccctcaattcgtcgatatcttgaagcttccaaaagcaagatttcctgcgattctggattgtctgaacaggggtaatttcaattttgctcaatcgtcggaatccggctccggaaataatctccgacggacccaaactaagacctctgcgattcgatttcggtttggtactttcttcgatcttaacactcggtttgggctccaagaacttggctggaattattcttcctcgcctctcgatcgtcttcttgtttcgttcagccttttcaattcgaagcgcttctagtcttgacgataatcgactaatctcgatctcgatctcttcaatctccgaatcaatcttcttctcatcacgctccttttgcccttctttcgaaaaatgctcaaacttcaatggccttgcatgagagtttaagatggcactattgggctgaagcggcttaatgggcacagaagatttgacagtgacaggggttttcataaacccgggactgagattctctttgctgtaatcagattcaaatgattcaaacgaacggttcaccaaatctgaatgcagagtagaccaagaagctttaatggtagaggcagagcattcaaaatcatcatcgtcgaacgcagcattattccatacctgaaggtctggcccatccatggtgtctgggtactgaagaatactactcatttctaaacgaactaaatgggtataaacgatttctacaatgtcgaaaggttatataaacgatttgcttaatggttttttacgggcgataatggtggaaagtgagagtgacttgattgtgtaagaaaaaataaaaccagagcggtttctttgcattgaagacaattttgtattttgagattttctgaccgttgggagaaattagtcgttgcgtagagcttggtgcaatattagccgttggattcgaaaccgctccttgtagacgctccgttttgatttaaagctcttattaagtagtgtatttcgttttaattggacttcaaagcacg

SEQ ID NO: 78227 - DNA, 532 bp, Cannabis sativa
attacaacatctgtcctcctcaatgaagcaagagaccttttctagcagattagagggaattatgatggaatagggtttgtgcgtaaatgggatccaatttggacgtgcagtctgaatagagttaccatcaccaatttccaagtgagacctttcagtagcttctctcttcccaaaaggagacttctctaagtgaaggagggattgtgaccttttggtgcttggagaaatttattgtgtttgaaatacttggctttgagcagttgggagaggagtggttgaggatcagtgaagattctcccggcctgttttgcaaggagtgcttgattatgataattgacagatctgaaacctatgccaccaatgaatttagaatcacaaagcttggaccaggatttccaatgaactttattgtggttattttttgaaccccaccagaagttggcaataaggctttccatttttttgcaagtggacatggggattttaaagcagggcatagcatgggatgggatagcctggaccaagatcggaa

SEQ ID NO: 78228 - DNA, 1571 bp, Cannabis sativa
aacatcctttagggaaacattaaccacattactaggaactgtaggctgacttgaaatagcagaaaaggcagctttagaaggcaaactgtgagaaaaatctggtgtaggcttgaactgatacagaccattactgagtgtcccacgcaacacctccttccctgttacctgctccttcacacaacagaaccgaggaaaaaattcaattgttacaccattatcagaagttaactttgaaacactgactaagttcttcgcaatttgaggaacatgcaacaaatcattcaacagtaaaggtttcgaactgttagtatgtattctaccagtaccaacatgcttaatttgtaacttactgccatttcccacagttattctttccttaccagagtactcagctttattgcccagtttgtctccatcggatgtcaagtgattactagcaccactgtcaatgtaccagttgtcatccttgaccagatctggtgtagccacaagagcttgatgttgttgctgatgttggttgctgtcttgcccaggtggttgtcccatgtaagtatcatcgtgcctgttatagcatatggctgcagaatgcccatattttccacagatctgacaagtagatttagagccattacctctccctgatcttcctctgccacgcttgtttgctgaacctcttccacctcctgagttgttgggatgatatggctttcgtggaaagttgggactatgtggtttttgagccatgttggcagagggagaaccggaggaatttttgagcatcttaatctgagaagttggctcattcaacctttccaagcgaccatcaaaaccaagtaggatactctgtagttcttgccaagaagtgtgaggtctagcctcgatttgaagaactataggcagataactgatgtccaaacctgaaagaacattagaaactaaatgagtttcaggatatgggtcacctgctattgccaaggagtcggcccaaacacgtttttgtctgagataatctgtcatattcatggttcctttctttgctgtttggatcttgttacggatatcatcagcatgagctcttgagtgagctccatagagatcttccaaaacagtccagagagaagctgttgttttacaacccattacttccgatgctatgccttctgtcatagatccatacaaccagcccatcagcagctggtcatacacaatccagctctcatgctcggggttgatttgaagtccaaaacctggtgacccatctgttccaacgtttgctgggataaactcgggtggacaaactttctggccgttcaaatagccatctaacctgtgtccacgaattatggtagagaccatggtcttccatagtgtgaagttctgcctatcaagcttcaacgagaaaggctgactgagagtattactgaaagggttcattccaccggagggactggaagctgttgcaacttgcagagcagcagtgttttgggtagagttatttggagctgtggccctggtaggggtttcagggacattcccttgattctggctggtagacatttctctgactcaga

SEQ ID NO: 78229 - DNA, 552 bp, Cannabis sativa
ttattattattattaaattctgtagtaaattaattacgtaaaatactatatatttagttaacaaaaatttacgttaacagtaggcttggcatgactcgtaaatctgatatttctgtaccttgttcatgccgaccagaatttctgaaccagcccagtccgttttcatattcaggcttaaatttatactttactttttcatataattactttactaaattatatttatattatattatagctttagttatatttatataacaataatattttataaataatcatataaaaaaattaactttaataattattcttttttcctaattctaccaaaaaagaattatattttaaaagataaatattttaaacagtttattttatggacgtataaaataaaaaagatacgagcacaataaattatttgaaaaacgttattttttgtaagttaaattatttcaatttttttataaatttgtaaaatattttaagtaatacattttcacatatatataaattaaaattatcaaacctatcaaaccaataattgttaaggat

SEQ ID NO: 78230 - DNA, 608 bp, Cannabis sativa
atatgaaaatagactggtctgtttaagaaatatacgagccgacacgaacaaaacacaacaagaattcgagcatggcacgaaaatattgagtctacgagttgtgctgggtctaccttttaaaaatattgacatataacacagcacgatcaatatttttttgaggcatggcatagccagcctattttttgaaaaatacagataaatacgggtcaggtcagcactcacgaacttattacaacactagtgagagttgtaggcttgtagcctgtaggtgtgagaagaagagggagtaagaaaagtaaagtgatatgtgagtttgttatgtgataagaataagaaagaaacaaaatgtatatttaaatttaagatagtaagtagatgtaatttaagatatttgagtttatttctataagtttttcatttattctaatattaactaaaatccctgataatatgatgaatcattatagtgagattgttcatgttttgttacttgtttttatcatatatttataatactaaattatcaatatattctcattgtcattaataacatcactcactcacaactatattatatcatatattttttgtttgtagaatgtttt

SEQ ID NO: 78231 - DNA, 751 bp, Cannabis sativa
aaaaaaaaaaaaaaaaacactatcggacctattgtcctaccatcgtaccccataaaacctaacccaaaaccctccaaaaaatgcagatttcacttaaagacacccttctttaacaatttaacaaaaaaaattaaccaaaatgataaatcaaattaaaacatacaattcatttaacaaagcaacaattccaaataacatttataacaaaaatagattttttttttttttttttaaaaaaaaaaaactaaccttagacattagggatcgacttctcggttcgtgggtggttggggaactatgttggtggcgctcaggttgttggggaagtcaggtggtggcgcgaggtgtctaggctacttgggtggcagtcgagggctcgggataaaatttgggagggtgcgttttgttttgttgattcatagagcttgaaatttatagggtgtttgttatgtgagattgatttggaggaagtagatttagagggaatatgaaactcaagtgttggaggggattaatattactactattttaatttaaaaaatgagactcatttggaaacataaatcctttgataattaaacttaatttaccaaatatacgttaagttagaccaggggcggagccagcatgaaaagttaggggcgccaaactgtattataaattgggcattttacaattttgtatacattattttaattaattacaaaatatgtacaaaaaaacttattatcattttctcatacacttttat

SEQ ID NO: 78232 - DNA, 842 bp, Cannabis sativa
aattcaattaccttttgatgcctaccaaggtatctttaattctttttatataacaatcgaacatccagtccaagaacttgtttgaaaaattcacatcttgatcatccaagtcaaccttaacactcaagaatagagtgggctattaaatcttacaggatgaacatatttaggtattacagtgtgtactcaactcatgggacactgtaatgagattagggtttaatctcacacacacttggaagtaacgtaagagactagagagagagaggagtgagaaaaatatcaatcctatttttttctctttcaattttatttatttattgctctttctgaagtctctctttatgatgctatatattcctatatagtataataaataaaatttttaatcctttattttaaataaaagataaatatctaattcgatttaaattcagaatttaaattcaaatataaatatctaataactgaatattaaaatatcattagatcttttatttaaataattattatttttaaattaaataatgatccaatgaagtatttaattaataattaaaagataattgacttaatttaatttaaattattttaacttaataaaataattaaactaaattaatcatgagtctttatatgtcaccctacgcgtgtagaatagccctacacacgtgggtcatattttaaggtccaaaattaatttctcaattttaccataaataaaatttattatttatattgccaataaattaataattgattaattctcattaatctcttattttgtaaggattaaaaataaatattattttctcttacataatatatttctctctttaata

SEQ ID NO: 78233 - DNA, 1716 bp, Cannabis sativa
gccttcccccatggactcatggctcttatacacgggtacgccactctagctgcttcatgaactgacaactagccctacagactaatacgagtgtttccaacatactttattctcactctcacacttcttaagaaaatttcataggaggtcacccatcttgaaattatctcaagttaagcacgctttaccgtggagttctttcgtaataagccactagaaaataagatgcaccttgttgatataggtagtatcaatcaatatatttaagtctcttcaactgtgtactcacatacctacacagcctcaaaatcatcacacttgacattttccaagcaatgtggaattgcacagcttactcagtattttcatgtacgaattacaggactactgactgtcacagtcgaatccaagccaaagtgatgaggatgtttatcatggtggctggttatgaagatcaggaaggaagaaagataaaaaagaaaaggaaatagaaaaaaaaatgttttattttctttttaacatttttatttaattttttactatttatttttattttatttattttttcatattttaaaattatttttataatatcttaataattaaaattatatggaccattaaaaacgtactatgtgtacacttgtatacacgtaagcaatctacttaactgagatttttaaacaaaaatctaataagcaaaataggacttgagttcagtaagtttcactgcaaataccctttttataactatgtttaaacataaatagcatgatttgtaaatatgaacacaataatacaactaatggcggagcgagggccaacatatgtaaaattataaaatatacactttaataacattttacatataattttttgtcatcgtgaaaaataaatggtaatcgtgtttgcattgaacaaacaattattgacgaattaattaggtattataataatatatagttaccgtaaatgtgaaagtattaaggaaactctctatgaaactctctattatgtgcaaccatccatagatcaccaacataatacatattgtttgttgatttataaagggcacaaaaggttggattacatcacatgcaagtgtgatgcacgtatttcccatggaaatattttttcactagctagaacatcttcgatagaggttccagatgaagataaaagtattttaataaccgaagatgtaagatatatgtcttcggttattataaaaaagaacaaaaccccattactttaacaactaggttacatttttaatgagcacgttttttccctttcaaattgctcatgggtttttgctcatatttttcatgagctatttgaaagggaaaagacttagtagtaatatgttgatgtatttttgcttaatatttttaatagtgctctcaataaattttctgttacatcgcttaaaatacatcactattgagttcaaatatttcggcctactttttcttttaagtaaggaaggctcaaggcacaacaacggaataacccaacctaattgcataagacacgaggagttaatcatgccgaaaggaggaaatctatttctaatgatgtcatcaatcttcaaaaaacggaaaaagtgtgatgtttccgtcatttatccacacacccaaatcagttagggcgtaagcaaaaagtttggggtccataattcaaattattgttgagtcaactacatttagctagctc

SEQ ID NO: 78234 - DNA, 699 bp, Cannabis sativa
acgagttaaaagttggaaaacaaggttgctatccaaggcgggacgcgcttgtctcattcaatcggtaggctcttccattgctacttatgtagcagcctctgatgtaatccccaaaaaaatagcaagaaaagtggacaaagaactgcgggacttttggtggggcgactcggcgacgaaaaaaacttggcatacaattgattggagttcaatctgtcaatcaaagttgcggggaggggctcgggttcagaagaattgaaactattaatacagcctttatccttaaatggggatggaaggcccttacggataaagatagcatgtgggggaccattattcagactaaataccttaatggaaggagtttcttggatgttgagattaatagtggggactcaagcttttggaaaaccgtactaagagcttgatctctacttgttaatcaagtgtgtagaaagattggcaatgggaaagaaacgtctatttggttcaatccgtgggtgccttcttccaatagaagacctacccctcttttggatgcaactcatggagtggcatgggtgaatcaatttatgtgggatgatcagacctggaatgtggatatggtaaaaagatggttcaaccgtagtgatgcaaaggtaattctgaatattcaactaccagaggacgataaaaggatgactggatgtggctgggggaacc

SEQ ID NO: 78235 - DNA, 677 bp, Cannabis sativa
tttcagcaaacacctggactagatttcctagaaacattcagttttgttataaagctataattcgaataattatttctcttgcagcaacaaacggttgggacattcaataagttgatgtcaataatgtatttttttatggtaatctaaagaaagatgtttatatgtaccaacctcaaggattcattgatccttagtttcccaactatatctgcaagttgaataaggtaatatacggtttaaaacaggcccttaagacctagtttgacactctcaaatccactttgctttattggggattcaaaaattctacatcagacacaaggttgttctttacaagaatagatggcaagttgctactactgttagtatatgtagatgatatcttaataacaggagaaaatcaagctcaaataagcaatatcatcactgcacttcacaccaaatttgctctcataatccttggctcagttcattacttttttggttttaaggttcttcgagattccaatgctatatatctcactcaaaccaagtacattaatgacttgttgacaaaaactaatatgacagatgccaaaccttagccaacaccaatgtgtgcaatcgctaagttgtctagttcatctggcacacctcttgctgatcccaaatagtatcgtagtgtaattgaggctttg

SEQ ID NO: 78236 - DNA, 626 bp, Cannabis sativa
aaggttctctcccacatgattatgtcctcaacaaaatcacaggcagccaagtatgaagacacaatctttttatccaagcaagcaataatagctgcaattataaatttcatgaattagccaaaatacagaaactaatatatactcaatcatatttaaaattaatttattgttcacattcatcttagtatatgaaattacttcattttaagatcttgttggaggttatgaggtccttagtcacaggtctactttatttaaccttaaccgtctctgattacgcatgttaaatcttgttgatgttaataataagactaatacattcattttgaaggctatacacttattgaagttacattaacatcattctccaaattctcccaagagtatcctaattatatacaaatttactagagcatctcatctctcatgaaatcaaattatatactgatttatctattgcttaattactatgctagtaatacataccggtatattaagtagcttaattataaactccacacaagaatttccctcttcacaaaacaataatcaaatgattataactacctttctcttaataatacttaaccaaattactacccaactaattaaagatacaaatcaaa

SEQ ID NO: 78237 - DNA, 3274 bp, Cannabis sativa
tacataagttcggagcaaatttgctaattattctactagaaaagttgaaaagtgagcttgatatttggagatccatgtgttacctacactttaaatggcccgggtaggtgaacaaacaagtacctttgcaaaaaaaaaaaaaaaaattaagtccacactatctatctcctgcaactaatattagctacttttttgatgaggaggcgggtgagtccctgacgttaacatttcatttcatttcattttggttgcacctcactcgactcgactcaactcaacccaactctttctctctttcttcattttctccgcctgaaaatcctttgattttcccgagaaaactatacattccagaaaagacaaaaaagaaagagaaaaaaaccagcccatgatgctttcgattgcttccattttccgtcgttctacacagctgagagcttcggttctacagtttcagctttcatcctactcttcttccgcggctgcaattcaagctgagagaacagtcaaagaaggtccgagaaacgattggacccgtgatgagatcaaggccgtctatgattctcctgttctcgatcttctttttcatggagtcagtattaccacaatccccattttctctctttattattatggttcatatgttcacttgttttcagttctcagtgatcatttcagaccataatactactttttattgttaagtatcgcatgctttcatcaatgcactatgctcatagcttagattttaaggagagcagaaaatgcattttttttgtaatgttagtgtttgttagcttttaatcttgtttgcattggaccagtgcagtggtctacattttctttaaaacccaaaatttctttgtggaatagggctaggaatttttaaaaagaaaacaagtttgttataagagaaaaactaaagtaaaaatcctaccctctgccctatttatatttggatttttcttttcttttttttttttctgtattgtcttgcttaatattttccaatgtatagcaaccattttcttctttttccaggctcaagttcacagacatgctcataactttagagaagtgcagcagtgcactcttctttctatcaagacaggtggatgtagtgaggattgttcatattgtcctcagtcatccaggtatgatacaggagtaaaatcccagaagcttatgaccaaagatgctgttttggaagcagcaaaaaaggtcaatttctttgtcttcccacaacttgtgctatctttcctctcctatgtagtactaaaacagtaatgtagtgttttatgtgagttgtccaatggtgtgctaaagtgccaaatttggcacattatatcgccagccaaatttaaaacaacaataaatacagttcttttttatattacaattttactagtaaacattaacgagaaattttaatacatatttttcagttacaattgatattttgctttttaaaactaatttgcatcttcatatgcttgtgtatgtacaattgcgaatggtgtgccaaatatatcatttgtttatttttggttccaaatttggcactatatttagatcttgcattgcattggtgatggtgtaagataccattaatttcgtagaaaattcatttctacagtgctggttgcatttggagtttttaactgcattaacactttactgggctgctattttttgtgtttgatctttttgtttttcctgaagcatacacgaacgagcatacatttatatcctagagacagctaactttgacctgaactataatcccaactaataaaaatgacaccggtgaaacaaaccttagaatatacttgtatgtaaactacgtctcataatatgattaacctgtctcattgaaaacatgcatggactattttttgtaatgggaatttaatgatattgtacttgtccggaatgaatcatgtccagtacttggtgagtatgaaagagccttgttggaagcctctcgctgtactgaacttccaaacttcagactagtgtgtgatattggcctcctatgacctaattgtatcaccaaatagagccagaggaaaaacttacaactttattgtctgttgtaggtggttactgtttattttatctcatttactgctgctaagaaccaacaacataacttcaaattaagaatttactcaagcattcctcttcaggattagttttctaaacttttaagcactctatgagcagatgctgtcctaatgtttattaacctccatggtctgacatcacaatattatattgttgtttaaggtttatttgtattcaaatttctgcagtcatcttatgaaaagaatctcatcagtctgaagctaggctttcttgtgaatgcagtattattgtcttttcctatcagagagattttgatgaccataccaaaaaaagattctgagaatggattcatgttttgtctacctgatgatttcactaagtttctgtgagaagcatttattagcacagaaatgatattcagctcattgttctttattctatgttattcctactactgctttttagtgttttatttatgttatctaatcacacttttctgtttatagcatcatctgatttgctcctttgcaggcgaaagaggctggtagtacacgtttttgtatgggtgcagcatggagagagacagtgggaagaaagacaaacttcaaccagatccttgaatatgttacagaaataaggtacctgaatttggcttataggaagagtgaatagactcaggaaggagatccattctgttaaatacagatgagttcattcaatctgatgtaccctggaatgttcaatgtcgctctcttaattactatatcatgatcattaaattgttctgtcagtagcagtgaattaaagtttatgctgctggcatgtgttttattatacctgatatcattgatgggccatcttttattatgtaaactttcatgaagattggagcctttaaattatttcttgtcatttttttttcttgatatttttcactagtcttttagtagttatgtgatacaatcatttgggtagaactcactcccaaaagctagtctaagagaagagggtgcccaagtagttatatactaccaaccaaacccatacttggtcaatgtgggatcctaacaatacaccctcctttagtcccgacgtccatgacggcctactctgtggtggcgcagtctaggcttaatccactggtcgtctcttccgtgatgtcggtccaacctaagattgcatggct

SEQ ID NO: 78238 - DNA, 2331 bp, Cannabis sativa
taatcatacctgaccaacacaagttacaaattctgaagcaaataattcctcatcaggaataactggtccaatcttattatcacctggaacattgtttgcaaagtaaattcctacaaacccaggtgaagattttgcttctgaatcgtctattgaaagtatccgagcatgaggttttttgcttagtactaaagcagcatgcaaaccattaggaggtaatggtgtgtcatcagcatattcagcctcaccagtaacctggttaaagttcatatatgaaaatcattgtggagcttaatagcgagaagaagaaaaacgaaacataatgtttctacaatcttcaactaaaatttcactggaaagaaatagaaaacaatgcaacttttaccattgaaatacatacctggagtctagctgacatatgaatctcaggagatcccacagctgttccatgttttatgatctcatagtcttgacttcctataacggttggtcggggagatgattcaacagcagatagatgagataatggaaagctcttgggaacacattgtgttgcatccatttgatgagaaacccataagaaaaatttgaaaaagaagctaagagttagtgatttcctaaactccaccatgccaccaggggcatcatccttgattaaaacatccttttgtaagactcttaaagcatcctgaagtagctcttggttccaactctttcccatgagatattcttttgttgttcttgcagaaagagagagaggagccactccaccataagcaatagatgcatctgaaacaatccgattttcacctttgtccttgaaataaacacgaaatccagcatttacaattgcaatatcatcctctcttcgatgagcctgcttaaactctttaacaaactcaaaaggtctagtccatggtaagaacactgacaacaaaatttcattcatttctaaatccaccttacgataacccaaaaaaaagctttctgcaggagttgttctgatgattcctttgcaatcaataattcgaaactctgctctagccaccatccacaaagggttcaagtcagatattggacttgcagtgcatatgttcccaccaacagatgcaacattttttatctgtgtcccagcaaaccattttaattgttcaataaaggccttgcaagatgtggtttcatgtgcagcacgctgtgctacgacctttctgaaaaatttcattagttcagatagtcttactgctgcacctatctctataccactgtctgtttcattcaatgtattgagttcaggtacatgtgtaacacaaatcaatatcttatactgaattcttttcaatctcatctcaattcccacttcggtattacctaccaaaatcttagcatctggaaacaatgctttcaaatccagcaattgttgaagtttcaagggtcgaaaccacttaagcccaccaaatccgctcaaactcaaagactttgatttcctcaacaaaagttcaggaggaaaaattaattctttgtcactataagtgcttccatctatttcagtaaacgatataggttcatacctctcagcaaaagcagtcccttgtccggctgcacatttgtcattgctttcaacttttgatctacatgagcaaggctttccagtagaagggcaaatgaactcatgttcttcaggacttcgagaagaagatatatctgtatatagcttgtcatccgttttagcaaagactcgaaatgcatcaactattggcctgtaacctgtgcatctacacaagtttcccgcaaggcattcttcaatcagctcctcggtaggagctgttttacttgatcttagcaatgcatacatagacataataaacccaggtgtacaaaacccacactgtgagccatgagaccgtgctaatgattcctgtcgaacaaaccatagaataagaatatgactctaccacaagaaaaaacaaatagtgagaaatgagagcataatataaagaaaatagtacagaagaaggtaatgttacttgaatggggtgcaggccagttttgcggtttcctactccttccactgtgataacatgcatcccttcgactgagtacaaaggagccaagcaagcattgatagcatagtgcctattggttttttcatcatacatttggcagtttatattatgacttgggataggaaagtaagaaatgacaattcatattatcgtgttatatcgtgatacatgtagcacaaagacacaacaaaatcattacttcgcatcttcataggcatatcaaaacacgaacaaacagttaacacaagacatgacacgaattaccccactc

SEQ ID NO: 78239 - DNA, 2327 bp, Cannabis sativa
  modified_base (180)..(187): a, c, t, g, unknown or other
acaatctcaatagttcaggaagcatttttaatgacattaaaagtttagaaacataatttagtatatataaaagctcgccaaaaatcctaattaagcttttattaaaatatacaatgaaacctagaaagtcaattaaattcgaagtgcaatagtttttattttttagagaaatgctaaagnnnnnnnntggtgcctagcaccctcctacatgtcaatatcgctattggttcaactaaatatcgggtcccatataatttaatataataacataatagcttttagagagtatcactaaccactgtctcatagcaatgttctattttttatttttatgaaagaattcacaatgcgaatttgtaatctgatgattggtcgattgaccgaaacacacccttagcgttattagtttccacatttaccctcttcactaatctagaatgacctccttgcctgtacacggtatacgcttcctcctcgttctcgggttcgacccttcttaggctcttagcgctgaaacgagccgccattgacgatcttttctcctctagttgccaattccatctgcatctcgaatcgctaactttcgatccccgaaaaatgttgtgtcactagaaagaatcggagagaaaaacgaaagaaaagacgcacatatttcaagatgaggtcttcttcggatgtaatcaacatcgctgccagtgctcaaaaaatcgaggtcgataataggatttctcttcgatactacaatcggattgctgataacattctcagacaggttcttgttcgcacttccgttatattttgtgattttattagcgattttattaattatcactttgaattccaaagtttggttgtgagccatggatgttctccgttatatatatattttatatataaaattttccatgtacttaagagtgaaagtagagatatttagttaacctagaaagttaagactcaaaaattaattgccgtagttgttttcttgagcttatcactgtggtgaatgatcaccctaaaaaatgtttaagaaaacacaattcaaactagaactaattacaaaatcaaattagaattatgaaattagacagcaataattttagtttgagaatgaatgaatgatggatctttattgattaggaaaaaaatctctcacaaggaaaatcacttcaagagtgatacttttattatatgagtccacaaacactatgatcttggactctctctctaaacttgtgtctgaatctaaagtatcagcctaagagattggaaatcattttgagaatagacacacctatttttagttgttggttcggctcattttaagttggtgataaagttataactaacaacaactttctctaaattcatgtgataagagaaaagatggacttattgactttgacagattaattgagtttaatcctagcaatttcacttgattagactcgcttaatctctaatccaaaagaaatgagtgaggacattaaatgtcctgaatgctcaacaagtttagacagtgcctaaacttgtctctagttacatttttagtgaaaatatttgcaaggttatcatgcgtgcttatttttttcacttgcacctacttagatgacacgatatcccttatgaactgtaacttgatatcaatgtactttgacttttcatgaaacattagatttttcatgagatgcaaagcactttgattgtcacagtaaactgtgatatcctcagatttgaaacctaacttctttgtcaactccttaagccatagagcttctttgattgttgcagccatgtattcaacttctgttgatgaaaaaactactactttctgtaggttagatttccagctgaccccaagaggagtgaacaaaaatcccgttaggctccttctagtgtctaggtttgatgcaaaatctgagtccacataaccagtgatttcttccttgaactggttctcttcactgaacacaattccagtgtttagagtaccttgtaggtacctcattgtctattttagtgcttcccaatgtcagggccagggtttgaaatgtacctgcttactactcatggcatgagctaagtcaggtcttgaacacaccatagagtacatgagactcccaacacaacttgcattgggaaccttgctcatcttggctcgtactgcatctgtttttggtgactgagatgcagacaacttgaaatgttgagcaagtggtgttgcaactggtttgcacttgaccatgccaaacttgttcaatactctctgtaggtagacaacttgagaaagtattatcatgctaagcttaggtctttatgtctatccc

SEQ ID NO: 78240 - DNA, 1060 bp, Cannabis sativa
cggcaactgataccgataacaacagcctgtgatgatactgactgcattgcatccagcaaactataaagtaatctctgttttccctgcaaagactcgaaatagaaagtaatgtctcaacagaagattcaaagcgaaattttcttccaacacaaggctctgcagcaatgagaaacgaaatgggaaatgatgatgagccatacctgagcaaacagatcgaattcatccaatatgaaaataattgttttatgagctaatccacactctctaacaacaaaaaaccatacaaaaaattcaataaatatttgataagacatcacaccaaaagctaaaatctttgctcaccgaagcatggctaacatgaactgggaattatcatcaaacgatgcctgtaaaattattatcaaaatcaagatttcacgcattatttacttgtggggaaaaaaaaaagaacaccacagagatcccaaacaagatatgcacgttaccatttttgaaaacaaaagctgattctccacgcataattgtctagctatttcctgcatgatcgaaagggaaattaagcaacaacaaactgtttaaagtaaacatatgacaatgtgaaccaactctttgagtttatattttttagaatattcagcataaattgttatcaaattaaggagaaagtaactggataaaaccttgaatgcgcaaatatcatcactgtgcaagagtccacttagcttaatctgaaacacatgtcaatagcaaattagattatactttgtattccattttcaataatgtattccttaggtacggtttggttggagataatgaaacgaaacagaaacaatttttattcaattcttttatttggttgcatcttaaagtattagaatgtcagtataaccgaatgacttttctattactttattttagtggaatcgctattccaatttgaaatagaagaaaacaccaatccttttaataattttttttaagcattttcaatttgtttgcattccattcctatcatcattctcactctcattcctattccttttactattattcctac

SEQ ID NO: 78241 - DNA, 1350 bp, Cannabis sativa
ttatagagaatctgtcgttatatataattggttattatagttggaccaatcccttttgtctatgcatcaacttgtctcactaaaaagttattttgacaaaaagttggaaaaaagcaaaaggaaccgatcttttataatgaacgatatgataataatttattattactcttttaattataataatatgatcaattattctagatactatttaaaataaaccctaatccctatatatgcagcatgttttgaaaattcaagtttttatttaactgtaacttcattttttttttaattatatagaaaagtatattctagaattaaaatatcactataatatatcttaattaattaactaattcatataaagaaatgaaagaaggtcattcttttaaaaataaaatataaataaccaaatagctggttaattaattatctttagatatagttatatattatttaagacataataatgtcttgatcatcttattaatttggtcaaaaaatcttgacaaaacaatgatattgactctcaatacattatatatacataaatatatataaataaatattaattaaataacaattagatatatgggattaatatgtcaatagtattatcttatataagctagaggccttatgtatgtattgtgacccaataataatgtccaaatatatatgtgttagaaaatgatttagttaccattttatgaatcctatatatttttcagtgtttgcagcttaattatcagtatgacacatcattacttctaatgattaggcaatattgttagaaaggtgtgagaaaatattttcttgtgtaattcccatcgtttggtgtgttccttgtataattgtctagtttaaatatcaaggctcattgagctactttttaccaaaatctattttttgagttggcagtatggccaccggaggagaccaaacaccactcaatagaaatagatcggtatatactatatagctagctccaacatgttagtacaattttagctctaacattgttcttccacatacactttgggagcattttgaatcaaccttttgctatcaaattggacagaaaaatttgtaattaattaataaattggaatataagtgatttaaggagacagaaaaatgtcctttcaaatatgtgatgaggacacatatgtatgtatctattctatactgatcattgattgagactttaatctaatttacttgtgtcttttgaagcaggtatagggtcaaaaatataattctttctttttctttccctactcataataaaccctatttttcctttcattctacttattttttaattacaacaccattttatcaatttat

SEQ ID NO: 78242 - DNA, 555 bp, Cannabis sativa
aaactaagaaactagtgatcaaacacaaaagtgagaaataaaaagcatgtaagaaaatagagaaagaggaatcacttacttatgaagtcggtgtttggcgtgatgaatggtcctacaatcgacggtgcaacaaatagcgtggtgatccctttgagtgcttaaggtcaaatatcaaattagatgaaactcccaaaaagaatgtcaaagacaaagatggcatccaaagtttcgaaacaatctgggtatggttttttgtagaaaagctcaaaaaatttctagaattttttgaaatggcaaaggtaatgaaaaggtgtttccttttttcattttatactcttgggttgatctctatcagattaaggagacaattgatccaacgggtaaaattaaaaaagaagtggaaaagatggttattaagtgttgatgtgcctcgaaaccataaaactgccaaaatcagacatgcgttttctcaaaatggattgagacaaaaaataccctcagtaatcatttaaaaagcacttttcactaaaaagaactttttaaggagcaattgtt

SEQ ID NO: 78243 - DNA, 2481 bp, Cannabis sativa
gtatataatgtcaaatttcccctatagaatccgagtcctagactgagagagtgtatttcacgaatggaagaagcgcgtaacggattgaaaaccatagggattacgcaagcaaactgaattctgaaacctgattggttaatattcgtggaacccagtgtgaatgccacgtgtaccaacctctaaaaaaacccgaagcgtctggaacttgtacgtctcctccttcgcgaacctataaatatatttacttttttaattataatttttcaaaaaaagaaaaaaaaaatcgaagaaaatttcgctttgtttcgtattcagaaaaatttactcaaaatatctaaaaacctccattactggtagaagaagaagaagaagttttcagttcctgacatggataggcgattaagcttagcattgttggttttgttattgtcctcggcttttcttatagcttttggagccaaaaatctcgacccgtacaaggtaagtttctctctcttttttgcatttaggtttgtctcgatgaatttgaatgggttgttgatgcaattgaatgccattatgctctgaaagttccattgtttagagagaagtttaattggaactgttttgaattctgttttatgaattttgttgattttattcgttttttttaagtaaaaaaaaccaatctttcctttcaataattatgacttatccaaaaaatttaatcaaattgagaataaagtacagaacttgtacttgaatttggaatttgaagtaaaggtcctccacctttttaagaacaattagctcgccttgaatcattacttagttataatgcttgttaatgggtttgaatcgccatcagttttttatttcctgattcgttaagtagaaaattgacatttttttttctttttttactctgttaatggtttttaaattcttatcaggttcttggggttgaacgaaatgctaatcaacgtgaaattcagaaagctttccacaagtatgctcttctttttttcctacattttgttctaaaggctgaaatattgcacatttgcttgatatttaactagtatatttgctcattactgccttgctttatagacacagtttgattaggtcgcttacatattttcatgacaaggaatcacatttagaatttgttgtttggtctcctacttgaaaatgagagatcgcacaccaattgggatattcatgatgaacaatgggggttagaaggtgtgaatatattttttggcctaagcacaagtgcacaattttaaaagatctgaaattagttcatgtttacataaaatagttgctcaagttgtattttagactgagtaatggcaataataactgcggtaatgatgtggggttatgatacttggaagcttttgcaatggcatctggttggtgcttcttagtggtctacattagtatcatttgatatctgtacttgtgctaccatttcaataatggaacaggtagttgcaaatttgtcttatttattttctctctcacatgtaattaagataagagttctttgaatgtaacaaattgttgaaaggctgagtttagttttatgaagactatagaggtccttgtctgctcactctcatacaagttagtcacagaacgttcatagagtatggacacgcatcttacaataacatgttaaataatgtactttttctctttctcatgcttactcttttctaacttatggtttcaatttttaggctctctcttaagtatcatccagacaagaataaaagtaagggagctcaagagaaattttctgagataaataatggtaaattttattttcacaacttttatcattctttttcattccctttgtcttcctcttatggatgatgatttttttctttcatttgtttcatcagcgtatgatattttatctgatgaagagaaaagaaaaaattatgacatgtatggagatgagaaaggcaggcctggatttgaagctggccatcctggggatcagagtggatattcttactttacaggtggtggaccagggcatagccaattcagctttagaccaggtgattggcagaatatgggtgggggaggaggaagttcgaagtcattctccttttccttcggtggttctggtggcccaagttcttctggttctgggggttcaaatccgtttggcgttggtatggatagctttttctcaaacctatttggaggtggctttcaaagtagtcagtttggtggatctgatggtcgggctggctttcaatctggatccagaagtccctcacagagcatcaggggcattaattcgcaggtttataaaaaggaaatagttgaccaagggatgacttggcttttgttctgtcacgcctcttccctaaaaggaatccagacggttaaatccaccatagaggaggttgctatttcattgcaaggagctttgaaggtatgcacatcttatgccatcttttgtctcctaattgg

SEQ ID NO: 78244 - DNA, 1013 bp, Cannabis sativa
tattattattattcaaaatataattaaggttattatttttattaaggttattatatgattatttttattactctgagcttattattattattttctttagaaaaaaaaaatacaaaatttcttatgaataaatggttaaaatttaacaaagtacaaaattctttattgcattcatcatggcttttttaatagttggttcttttaatattatatcaaaatagcatatgaagttgaaaaaggtcatattatatatatagatgctcccatgataagaacatgaaactattttatgaaattattcgatttcctattctttttattaaattattattttccttaattgtacttttaaagattagatgaataaattataagtaccaattattattctaattctctagtaccatattagtagtgatattgtgtgcctagcttcaagaccaaaaaaatatgtttgtagaaaaagtcctcttatttcttcatatcatatatcttaattaggggcccacacactaaatgaggaattgacgtagtttagaattttaattttcatctctacttattctctattaacaatagagcggagaatcccctaatgaaagcggggatgggacgaaaaatccctaataaaaaataaatttataattatatttttaaattattcaataaattaattattatcgaaaacgcaatttaaaattcataaaaaaaatattaatacactcaaaaaaataaaacataaattataaaatataaaatattaaaagaaatataaaataaaatattaaacagatccaggaagtgtcatccacctttatgctctgattaacattcgagaataaaaaataatttttctccctcacctgtttcccatttagacggaaaatttccgtcctgaatccgtgctagaccttttcctatttgagaaatatacatccctaatcttaataatatgagtaatttgtggcaaaaccccccaactatcaatttacttgcaaaaaaccattcaacct

SEQ ID NO: 78245 - DNA, 1512 bp, Cannabis sativa
  modified_base (43)..(59): a, c, t, g, unknown or other
  modified_base (1439)..(1471): a, c, t, g, unknown or other
tcttaactttatatgtgtttctttatcgttttagaaagttcannnnnnnnnnnnnnnnnaacatacttgtgagtagatctgattggaaggagacattaattccaacacatccctcatctccactacacagacaccaatcttgttcaccaattctcactctcaaagcagtaaggaaaaccttcatccaaaccgcatgtttaaaaggcaaactgatgcgcctaccatgaggcaaatgcttaagagatgtcgcaatcaacacaacacagttgtaccctctttttcgttaaaaggggattcctcacaccagaatgtttcctcgacttccaaggattctgatggtgactcagacgattcagcggagattgttttgaaatcccgcaagggattatgaaaatcttaagttggaacgttccccaatagcgttaagacatttacgattgcttgtatgccaacaatctccccatgttcttttcctcatggaaactagactcaacaataactctcttgatcgttttcgacaactcttaaaattttctcatggtttggaagcacctagggtaggacttagtggaggtcttatgctgctatggacagatgatattgttcttcaactcaatacttttggcccctgttattttgactcatggttaagtgatgctagtgataacaagtttcatttcactgctttctacggagctcctattgtgcgaaatagaatggattcctagattttactccgttggctatatgacattgcccccttgcaaccgtggctaatcattggggatttcagtgaaataattttgaatgcgaacaaatctgggggatctctccgtagtgaatcccaaatgatagcctttcgaaatgttcttaatcactgccgccttaatgatcctcctttccatggagacatctacacttgggctaaggatagaaaaacaacaaacactttgaaagaacgtctcgactagtgctttatgaacgatgtatggccttctaactttcagcaaccaacggtctctcacttggactattttcattctgatcatcgagccattacagcagaagtcttcactcaagcaacagctcagcaacagaaaagacacagtcgttttcgctttgagaaactatggttatctgaccctgacagtaagtccattatctccaattgttggttatctaattgttctacggatcccatcagcaatgtgctgcacaatttagaatcttgtgcgacatcacttcagcaatggcatattaaaaagtatgggcgcatgaaaaagaatattgcagatgctcaatcgaaagtggattctctaaacaactatcctattcccactcatgaaactgctgctgctatcaagcatagtgaatcggttcttgatgaattgttagaacaggaggagatgtattcgttggttttatgccctaaataaaannnnnnnnnnnnnnnnnnnnnnnnnnnnnnnnnaaagatcataaataacatttttttgttgcatggttcacatg

SEQ ID NO: 78246 - DNA, 2981 bp, Cannabis sativa
  modified_base (429)..(429): a, c, t, g, unknown or other
ccatgagctgattttgatgtaaaaaaaataatactttaaataatatattatgtaataaatgatttgccatgagccgatttcttcaatgactaaaatattactttttgaagccatttttttttgtgttcggcctaatcatgattagtagtagtactaatctaatcaaactgtgattttactataatgatatatctctaatataaagttattgaataaagaatagaaaataaaaaggataaataaataaatacaagcatattttaacaaaaaggataaataaatattaaattaacagtaaacaattataaattattatttccagagtatctttcttggagtaagagacttcaatatgtgtggaagggtgcactcttaatgagtattacccattgatatttactaaataattaactataaatattaattttnaaaatattaaactattaaattttaatccaataacgaataataaaagaaaaaattgaatttctatacttaattaaaaaatataaaaaaaaaattatcaatttttacactatatcaaaaaatatatttacatacaaactatttaagtcaaacttaattcttttttttttttgccaaaaaaaaaaattttcttaattttttttcaagttcgatggaacaatctcaaatcatataatgtaaaaatgagagatttttttaattagataggaaaaactaagcataaaaactcaacttttcataatattacccatgaatgggtaataccacccatatatataaagtaaaaataaaaataaaaatttggacaatgatttgcaaaacaaaacagggagtaaagtataatttgtcaacacaaacgaaggatgagaaccacgtgcaaataagccttgcatatttctttgtgttcggcaaagtcagtattatccaaatttaggaaaagaaaacatagatcaatgagaaatctttcaaactatactatggtagtaataagattggatgtgattgttcatctattgagtaaaattacaatcataagaaacaaacaagaccttaatccctaaagatcaagatgcttgagaaagcttgctcttgcgccacctccagtagtcagctcgaatagagtcctccctttccaacacagtgcacactgttcttgccaagtccgaatctgattctggaaaacttattgcattgacaatgtctctcaactctttgtttggttgaaaaccatgggagataagatccaagagcgtgctcaaagcaaagacactgttggttttggtgcttaaaactttcaagcacactgaagagatttggggatcattcacccaagactggttgtcatctttataaagccctcgaaggtatctccacgaactctcattatcagggcgggttatgatggcttcaacggtatatttcacttcagactctctcatagcaattaagcctcccaggatgggacatcttgtaataacaaaatatctctatcacacagaagatacagaaaatccattagcccaccaaaatccaacttaatatgcccagaacagaatattgaaaactctaagcaatgttaaaaataaaagagactaactgtaactctagtttctattttgatagacttaactattgaatataccaaatacttcactattatggtaaatactgtcatagaaaaaatttatgggcataaagaatatttagcaaaacttaggagcctgatagtgggcattgaataattaagaataaaataagattgcatatcatgaggtttgtaaataagctttacacaagttaagaactactgttacaaatttaattaaaagccacagcaaattccctgtgtaactcttaaccattttataggcaaattcatgcgtagcacgtagttgtcacacaaagtaattgtactatacctgattccaagcagaattattataaatatcttcttcaatgaggtcatgacaatagttaagttcgtcttcccaccctcctagtgcctgaagaacccactgcaattatcatataaacaaatcttaagtgttgtcaaaacttatatccagttatgtccacattacacatttaaaagcgaacaagttacatagggaaaacattatctttatcgtatgtaacttaaagcacaatggtaacagtaatagacacaaacctgtctatgagaccatgcatgataatgtttagcatcaagagatagtatcttcttggtaaactcaagctccttgctcgtagcaatagttcccaatttctcagcaagccagcgtctatgatgcctataagtatctgtcatcaggattagtagaataaaatacctagagaaaactccatatgagatttaggggagactttgaacatgttgactataaaattcattagaaagaacttgctttaacaggatgtgcttaagaagttaatgttagcaagaacaattcattttagcgtaaagttttttttggctcacacttgcaactatagcactaaacaaaagacctaagaattcaccaattgcatccctgtaaatagaacagaacaaacctaagtctatttcaagtaatatcttatgtttacatctaaatctataaagcccaaactatggtctcaacaaaattggaaaattgtcaaaaagaaaggatgccagaatagaacaagtacataacaattactctaacaaaacatataaaaaaaaaacaagaaccaccttattcatctcaaacccaaatataagagctacggaatcatattgaataaaacaaaagtaagaactgaatggaagcacacaaaatataaaggaaacatcctattgaaacataggctgaagaaccaccttattcatctcaaccccaatataaaagctaaggaatcctattgaataaaacaaaagtaagaagctgaatgcaagcacacaaaatatacaaggaaacatcttattaaaacatagtatggtgattacaaatgccaatattttatgtcaagtctga

SEQ ID NO: 78247 - DNA, 4336 bp, Cannabis sativa
catatcaagctttaaagatgcaacgccatttgttcccgcagttttattcttgataggacgaactaattcaaaagcaagtaggacattatccgtaatcaagctttcaaagtttttaatttttttttaaaaaatttattatttaattgttttaatttttaaataagttattttttagttttttttaaaattttaaattgaaaatataatttggaccaatgatttgtcaacacatctcattttttattagtaaacagatctgttaaaaaagaggactagcagacttacgaaaatagtgagcttggagactattactgctaatttttgagattggacttatctacatcaaattaaagtttttgaatacttatgtcgtaaatttttcttattttatgctaataaaatgcaaactcagaaagtgaaaaagaagagctaaagtaaaattgattgaaagaaaaaaaaaaaaaaaaaaaaaagagaaaggaaagtgtgaataaaataataataaaaaaaaaccatatttattgttgtaaaaacatgatagtggtgtaaatgttaaagcaacaaaagataccaaaaaaaaaaaaacaatataaattttaaaaaacaagaaataataataataataataataataatttgataaattaaccgttcttgacatataattatggatgttatgtagtaaatttgggcatatgcaatgcatgatatttatattcttcattatattatattaaagttattaatttttaacttttaaacgttaatttgataatatatacattcaaaagtcatatgtacgaatggttaaaaaaatatactatactataagaacaaaactaaggtccttgtcataaaattattctataaataaatatatctatcatggttttaatattaaattgaaaaaggcaaagataatttaacgattaatttttattttaaatgtatccagaagtcgaaactaaaatatattttgctttatatttgttaggaaaagtctacaaatttataaatgatatggtattggtgttactggttttcagactatcaggtactgaaattatacttttagcaattagtttttcaaattttattatttattagtgattaaattacttttttattaacttaagttacatatagatttaaaaaaaatgtgatacatgtgtatttgaatttgttttcaagaaaattgtgtctagaaaacaatggtgcaaaagcgttgcacctcattgcaaatattttgattcgaaaattgagtcaaattttggcttactgaattggacccactcaacaccaagttcttttatgaaagaaagagtaatttggggagtaagtaaatactaaattgaataatagttaaattatatttttaaaatttctctaaattctaacatttaagtgttaaattattatttatatgtcatttttattgatatatttaaattaaattttaaataaaaaataaaaaaataattatctaaattgtcacataactattgtttttaaaaaattaaatttaaatattctaaataaaaaaagtaattatttgttaaaaaacaggattattatgaaactaatagctggagaatttttaatccactttttacttggtgaaaaaatagtaatattagaaaatatagaaaaaaccgtaaaatacataaaatattcaaacttttttttttctttttgagataataaaatattcaaattttatctaaaggtgtttcatacaataaagaatgtaattttatctaaaccgtgactcatataattgaggaaaagctttgaaccaatcagaatttgccaacatcaaattcttcgaaacatggattgagtgagaggaaaaggaaaatgttgaacgcatgagcaaaaaagggaaaaggggagagagagttcacaataaaaacgtgagcacggtcgtattgtatcattttcgctatgtcgtttggaatttagtaagttaaggagttggtactacgaaaacaaagaagcttatccactagtacaaataccattataaaagcaagtctcttttacagaaaaacgaaaacaaaaaaaaaaataaaaaaaaaaacttccatttctgaattctctgcttttcagaaaaaaaaaaaaaatgagttcacggaactacatctacccaacttcgatgatcaataccaccaccgtcaatacaacggtctctgattctctgttcgaattcgacgaatccgaaatatggaattcgagtccggtcctcaaccaaagtccgcctttggaatcgtcggctgtggcagtggcgacgaagaaatggataccgatctcgagagaaccgaagaaaattgggatgatgagaaagatgagcatggccaaaacgacagcgtcttcttcggttccggtcaacgtaccagactggtcaaagattctcaaggatgattacaaagaccacagtaaagtcagagatttcgattttgacgacgaaggagaaatcgagggtgaggatcacgccgtggccgggggtggttttgatggtggcgattggattccaccgcatgagtacctggcaaggacgagaggagcttcgctttcggtccacgaaggcgtgggtaggaccctcaaaggaagagacctgtggcgcgtgagaaacgccatttggaaaaaagtcggttttgaggattaattattattttatttttctttaattaacaatgggagatagaaattttggtaggtgaagatagtattagtaggagaatttgttataattagtctctgttatattaaatattagatcactaattttattttttattatgtattttgggtgtctgagttttaaggaaggacctcttttttaattttcatgtttatgtatttgtaattattttaatttgtaacttgaaaaatcatgggattttgaatgtgtaatatttgcaaaaacacgcttaagaaaatggaaaatggaaaaatatgttattttgatttttttttttttggaaaaggtttattttgattaagtgacgtaaagttttgttttttaggggatactgggttattgttagttacgtataaaatttgttattgtatttttattatttgtaactgttacattaaatattagagctctaatctgtattgtattattgtgtacttatggtgtctcaattatttttcagtttatttgtttattaaaaagtgtttcagtttttctttttttttgtaaaaaaaaaaagtagggtatctcatttttttttatatataaacgacctctttttagattttatgctgtcttcttttttttttttttgacaattttatgtttatgtatgtttaatttgaatgtatatattttttttcaaataatacgcttctgaaaatggtaatttggtaaatacgtaatttgaaatataatagtttgttttgattgtggaggaagaagtgtgttttttttatgtttttttttttgctgtgaaatggaggaagaagttaagtgacgtaaagttattgggtttcatagttaggtgtgaaagctattgattatctagaacaaagcttagacgaaacagattgcgcatgtttgagtgacaaatggcctattagtaagcatttattattgggtttatctggttttttttttctcttttttttaagaaaaaataattatattttacgaaaaacttcatcagacaaaaaaatcatcaaaagaaaaagtatattgtaaaaatacgtgtttgtaataacagacaaaaggatgagataaatacattttagaaggaaaaataataaagaaaacaacaaagtctaagttcatcttgataggccaaacaaaataaaattgtaataaaacataataaatacattaataacaaatattaatgtatctctctaaaccaaggggcgcaccttgatttaatttaggcttttctctttagctatatttatatgatgattaaaattggaccaacaacaatgccatgtcgtttacttttcagggttttaagttgatatgccggtatcagtaaataagaaaaaactaataattaattgggggtagaagttgcttctacatcatgtgaaaattgagagatgaaaaaagttattatgcctttctagaaacaaacaatatatttatttcggggaacaaagtgtggtgaaacgtgtgtcaaaatagttgaatgaagaacataatatagaaggatagcgtttgtttgtaaagattatacatcattagaattggataagaattgatttaattttatcctatcctatgtttggtaaaacatgtatataggaggatttaacgaatattaataaaatatatgagaaaattgttgcataaagtattaaaatg

SEQ ID NO: 78248 - DNA, 556 bp, Cannabis sativa
aagtttcctttgtcgtaaggaagagtttggctaattcaggggaggaaaccacaacagagggaatagagcaaagagagagataaatcaagggtccataggtgtttgagagtttttggaaagatttatgtggtattggggcaaggaggtgaaggtgtccaatgacaggaaaagcaaatgggctcggtggaagtcgaaccatggtccgacttgttgtcaacatggctcgaacaagcatggtagagactaaccagacaaggaaaagtatggtgtaaacttggaggctttccatgactgcaaccctgcttattttacttaagatgtaaaaataaaataataaactaatatatgaatgaaaaaccattaaaacaaatgattttggtaaagattcatctccataattaatttttttttttactaaagagaatattcattaatcaaagacaaagtaagcaaacaccaaagtcacaactgaccggcccaaccacacaccaaacatcccctactaaagtaggcaaaaaaacatgcctcctttcgcttatataatcttttttttttt

SEQ ID NO: 78249 - DNA, 922 bp, Cannabis sativa
tcagcagctgctgaatttgctggctgttcaacaaacgaatgtggtaaattcagaaacaacaaacaattcaggtagtgcaggtatcattctttcaagcatatctgattttccctttgttgattcttggatcctggactctggtgccactaggcacatatgctataacaagaatttttttcaatgtatatgtaactcacatcctaccagattattgcttcctaacaatgaaagcattgttgttaatcaaagtggtactattgctatttctaatgaattaagcttgcacaatgtgctttatgtcccctcattcagatataacatcatctcagtaagttgcctaactcatgacaacaacctacatgttcatttttccactgatgactttgtgatacaggacaaaaccaacaagaggaggattggcagaggtaattccaagaatggtctctatgtcttggactgcaatcctcatggcaacccgattcttagtgtttctgctcatacttggcattcaaggcttggacatccctccaacaagcacttgaaacttttggatggaaaacttaattgtaatacttccaatttacataaagacaatccttgttatgtttgccctatggcaaaactaaggaaacttcccttcaaaaataaacctacttttgctgataaaatctttgatttgattcattgtgatgtatggggtccataccatgtaccatctcactctggttttaagttttttcttaccatagttgatgaccactcgcgattcacttggatatacttattgaaacagaaatctgatgtgaataccgtgatccctcaatttttgacatatgctgaaacccaatttaattgcaaaatcaaaaaattcagatctgataatgcccccgagcttgtctttaaagatctctttctcaaatat

SEQ ID NO: 78250 - DNA, 1469 bp, Cannabis sativa
acaaattatacttgtggtgctcttcaacgattgcaggagttttataacatggatcaagtccttcagttgttaactggacttaatgaatcctacaactatgtaagggctcaaattcttcttatcgaaaatttaccttccattctctaagttttttctatagttgttcaagaaaagagacaaagaactcttggatcttacttgccttctatgtctggtgttgtccataaccaaatcctcctactaggaacaaaaaacctcgaccttcttatttcaattaccataagcatggccatctggtggatatatgtttctccatggatttcctcctagatatggtgacaaaaattgaactaaaaagttcaattttcttctgtcaggctacagcaaagaacgctgaaaatctcatgcagtgcatccaaaaatatgagaactggtccagtcaatgtgtgagcaagcagaaaagtggagtggtgttttccccaaacacaacttctaggatgcgtgaggatattaagagaattattagaatgaatcaaattaaagctacataaaagtatttgggcaatcctttcttcttcactgcgaaaaaaagagatgactatcttttcttgaaagaaaaaattttgacaaggctagaggggtggaaggctaagcatctttcacaagctgggagaacaacactgatcggttctgtcctccaaagcattccaaactattttatgtctacagtccaagtccctagtaccctatgtgaagaacttgatcgccttctggccagattttggtgggtggaaaatgctaacaaaagaaattattgtgctttgaagtgttgggatgagatatgtcaaccaaagaaatgtggaaggcttggtttccagtggtttaaagatatgaacatggcgctcctctcaaaattattttggatgatcttacagggaaatgacaaggttttgggtgagacttttcttggaaaaatactgccataaggtcaatgcttggcaagtggaaaagcaaggaacatattccagagtttggttgcaaatggggagtgtgagttgtgggatagaccgtggatcccttggcactgccagacgacattaaggaaaggtttcagttcattcacaatcatgcattatggaaggtaaaggatctgtatctagaaggaactcgaacttggaatgaaattctgattagggattgttttgaagaggatatagctcatgagattttgaagatcaaaccgttacaagaaggacctgatatcctttctggaaagctgctaattcaggtaacttctctgtgaagagtgcctattggaccaatcaaaagcatcggtttaaggatggtatggtaatttgggagaagctatggaaggcaagaattcaccctcgcctacagcttttctgttggagaatgatttttgacatccttccaacaacctgtagaactagttttatacaggtccataa

SEQ ID NO: 78251 - DNA, 1602 bp, Cannabis sativa
aattatcatataataataaattatattaacatttctcacacacatacacaatcacaaatcaatttacagttagtattacttttaaatattctaattgtatggcgaagccaaataaaaacataaaatatatatattaattatataacagggttttttggggtttctcaaatttctagaactcgaactcagcctggtttggtaccgggttgaacctgaacccgccctgcacttttctaaacccaatttttttggttttttgggttcgagtcggtcaagtttttcaggtacaaatgttttgccctagcttcagttaggcctttcaaaatgaatggtgaaaagaaaaaaaaaaatgaaatagctagtgatttgttaagggcaaatactattttagactttatattttgcaaaagttaccgatcatattctctattttattaaattacaattcgaaacttgtatattttaaaatagtatgaaataatatcttgagctgattttttgtcaaaataaaattgaataataacttgacttagagatgttatgactagacagattacaaattttgtatctattcctattagaaattggcttcgggttggttgtattaattaaaaataatgacaaaaattgagctcaaaatactatattataccattataaaaaatacaaaaaatttatcaatttataaataaatgatctaatcaataaattttaccaaaattcaaaataatatttatctttttttttttaattaatttatttattttaatattgattaagaaaaacttactttagggggatgaatcacaataaaacagtttatcatcatactagggctttatgctgctgtacactacactacataacatctctgatttaaatgatatcaggaaaccattatagtatttgacatgtatcttggtcgtagaaactacacataatataaatgttgtattggctgaaatctgaattggtcgctctattaacattagcttcaatttgcataataaatatatagaaactttaaagcaaagaaaagctttttgccagatatttaggattacagctgctgggagtcggacaatggcaataggcggctcacttttcaatatctcatgcttgacaatggcccttgcagcaatataataaatacataaatagtggataatgaatcttttatataaatatataaatctcaacattttatgagtctaaagagtcattgccatacacattatgtcatatcaatattatgcaattacgtgcctagatcttatatagttggatgtatgatatgatttaaattagaatgcgaagtggaccacacagttttgagttttatggttggacttgttgctagtggaatttgggagaacaagtaaagcataatctttttggcaagtacagtggatgcttttctttttaagacaacattattggttatctattacgtgtacaaaatttccattcagccaaagaaaaaaaaaaaagtagacaaaatttccccaaatgaaactattgatgtaggatcaataaattattagaatatttctaattaaggaaataaaataatattattgattctgataaatgaatatttta

SEQ ID NO: 78252 - DNA, 1624 bp, Cannabis sativa
  modified_base (1233)..(1247): a, c, t, g, unknown or other
ttgatattttttggttttttaattttttttttctaatgtaattctatttagttataacctctcaattagaatattatttatttagtcctaagtgtattattgaatagatgttcactgtatttaaaaaaaaaatggtagtattaggtcaaattaaataaaaataaaaataataataagaacaataaaaactcttggactacttcatagctttaataaagacaccaaaaagaaatcaagtgatcctatcataatcatgacttgtaaactcattactaaacgttgtacatgcccaaatatttatcatcatcatcatcttgtgaaattgctttaacttataatcttttatattctctaatatgctacttgcaaataataggcaacatgtgatatattttatcttatttgacttttccctttaaatgtacaaaattaataacatttttgtcttttagtgcccaacttggggtgtataactagcatagagtatgttatatggatagtggagactatacaattacaatctttttggagatgatgataacaacattaagaaatagagaaatggtaagagatgatgataacaacattaagaaatagagaaatggtaagagatgatgataactaaagaaatagagaaatagtaaaaggttactagtagtatctagtactattaaaagttttaatattaataattattataaaaaccacttagtattattcataagttatcttctcgtagtaacagtgtagaaaaagttccaatggttatattaaatatgtaatcatgatggttacatttatttttagtcgttggatcattattagacggttgtgattaatttaaaaatttattaaaaataactaataaattacttataacttgatactaacctgatttgatatatttctttaaaaaaaaattataatattaatttctaaaaaggttttattaaatattttaattaaaaaattaatttatttaagtctaaaaatagaaattttacctatcagtgacctattacagcaggttataaaaaaaatgtaaccatgatggttacatttttattgtaaccattgaatactcacccgtatagtgtttacactctaaacaaaaatacatttagtaataacataaattttttgtaattaaatataacttttagttacgataaaaaattacttaaaattaaaatatcatatttaaatataattatcactaatttagttttagtnnnnnnnnnnnnnnngactaaaaatatatttagtcacagacattttagtcacaatataagaatgatgatttataattagtaacaattttttacttttagtcacaaattttgattttgttgtgactaagagtaaaaaaaaattgtagtactagcatcttctaaggtagaatctcgctattgatgcaattaattattgagtctcacgtaatttaatataataacatttaaaggaatatccctaaccaatcgacaatacttctaaaaaatgtttaagtactactattatccaacaacaataccctatctaataatactgatataataacttaggtgtcgtttggtaatacttttgttttctaattttataattacaaaatgaaagtaaaattttt

SEQ ID NO: 78253 - DNA, 563 bp, Cannabis sativa
ttttattttagtgggatccaagtttgggtatggggctggggccggagccgtggtccgagtttgggattgttactggggccgaagtttgggtctcaaggtccaagttggggtcggagtctaaaatattaattaagaaaaaaaactgtttaaaaaaattttgaaagtgattttttgttgttttcaaaattttaaaaattttgattctcaattaaaaaattgaaaagtgaaaaacaattttataaaatatgtttttggaaaatattttcacttttttaattaaaaaaataaaaaactaattaaaaaagtgttatcaaacacactcataactttttaaaaaatatgaaaacagagaagtacatatgtttcatttatgtgttattatgttcgggaaatttgaatatctacgcattaatttggggataatttttttccctaattgaatacatatgaaaattgaaaatatgtgataattttatctaaaactttatactacccctcccataactcaaccccatctctctctcttccccatctttctcttcgtctatctctctctctctctc

SEQ ID NO: 78254 - DNA, 7479 bp, Cannabis sativa
gtctcatcctctgaagtatgtttgtaactttaatgtgcaggcaggctgtaagttcttaatatttgcacatcatcagccaatgattgattccatacatcagtttcttcttgtaaggccacttaagttacattgacaagtttgtccgaaaactattattatcgttttatttttaattccttgaaaaaaaaagaaaaatattgaaccttctttgagattggttaagcttatgataacttccaatttccagaagaagaaagtggattgcattcggattgacggccatacccctgcagcatcaagacaagctctggttacagatttccaggaaaaagattctgtgaaggcagctgtggtatgtctctgttcaacatttaacttgtaaataggttcgaagttttctcattgacataagttacaagtggaatactggatacagaaaatgacgtactatagtttgtggagcttttttcttagtcagatacttatatttaaaatatctgtgcagctgtctattagagctgggggtgttggtttaactctaacagccgcaagcacagttgtttttgcggaattgtcttggactcccggggacctgattcaagccgaagatcgtgctcatagaattggccaggtatatttgttgattcatggattgatttctttgagttgactacacttttccatgtttgatatactttcttcatgttactaggcgtcttcagtcaatgtatactatctgctagcaaatgacacagttgatgacatcatatggtaactttcttgttcaattatttcaattctgagctcgttcaatattacccgatttctaattttggagagtttggttgtttgtctctcaactcagggatgttgttcagagcaaattggaaaacttggggcaggtaaaattgcaaccctaaccaccctcaactattattaaacactttcagcacttactataatactgcattcagatataaacactgtttacctaattgcaataacctttgttcaagatcatagtctttattattttcccttttaactgatttgttgtgttgagtagatgcttgatgggcatgagaataccatgaaagttgcagccaaccaaccgaaaagcagcccttccaagcagaaaaccgtcaactcgtccagccaaccaaaaagcagtccttcgaagcagaatacacttgattcctttattaagcgttgcaataacacaagtgaccatgaaagtgagccgaagctcaaatatcacaggcagtaagacagacacaagaacatttgcattacgaagtaggatacgaccagttttgtaaaaatattgtcattgtagcaatatttgtaggtggaaatgtataaaaagagagaaaggctgtacagaagtttggaatatattgtgagattttgaagtagattcatatcatgtagtgtgtaataatgaagttagaattgttctagtcattaataggtcaaaactcacaaaaaaggtattgaatgattgagtctagagtctgctttgaacttgcaattatgttgaactgtggctttagctacaaaatcaacaaagagtcgaaacttggattatccaaaactaaaattaccggggcggggctgagacccaaataaaacccggttagtacgggtcaaaggtcgaccattggatcggggcccaacccgtgaaaaagctcagtttgccatttctacttggataacaagtaacaaaacatttcagcagaaaaataaaattagattcaagttgattaacttagtgagcataattcaaattataaatttactgtaatatggcattctgtttttctagaagccaattagctgaggcaattaccttcataaatattggaaacgacgaaagtttatgaaaacaacataacaccaattaataagcaacattaaaagtataaagattaggggtttttagttgttgattaaggaacagaatcaacttgagcagacgcaggagaccattcttgtttattacaacattgtaagtataacaaaaccataataaaaagagctttagtaagcatcattttttttctttcaatcatagaaaaacaaaattcatgtatacaaatactaacaaatataaacactacatttgctgcaacaaaatatcacccatcttcttctccctcctgctcctatcaagtttttgagttaataagcttagacctttgttggatatttgttatcacaaacaccattttcattcactttgtcagagtctctatgtaaaaaaccgaaacaaaaaatgcctggctgctgcccacaccagaagctatgatgtcaataactgtcgagaccctctcatgtgtccgggaaaacgagctcttatttcttcgaaagcacataatgtttctgaatctagacctcctgcaaactgttgtgccaaacaaaaagagaagctcacaataagcaaaccgatggagaacaaaagaaaagttaaattgtagaagactgccattatgacactgttatgggcggtgtggacagaaagaaatagcagaatttttggtggactgaaaaggtctgcggagaatgtttgggaaagaatcaaattctggactgccacttggatcttcagaactaaacatttcgaggatctctcctttttagacttaagcagggattggtgtgtgctgttgtaataatcttgagttttttgtgactgctgtctcaattttttctacagttttttttttcgttttatttttgcttcctgttttgtttattatggttttcctcggccttaagtgaggcttgtaatgtatatcgggggaggctagtctaagacatgtggtctcactcacaaatcggttctctacttacaacaacaagcatttagaccaaaaagttccccaagaaagaaacaaaaactgcctctaaggttttacctgatgagccctgtatgcaaaatttacaccctgtagaagaagagattcttgattcaattccttatcagattccacctccattgtcactctcttcataaatgttttcacaagattcattgacgcctgctttatctgtttaaatatatgaaatgaactaataagccatacattacagttcatagtataaatggatggatgagtttgaaagagaatataataccttactcacaatccctgaatcaagcatccaatcagttgggattttgaattccttataagaacgcattgctgaatttcgcagcttgataagccgttgaatgcttttctccgacctatgaaaagaagacaaaaaagacaaggacttggtgatcagagaacagaacatatttcaaatgaaatagagatttttttattgacacaattcttacttatctaataagctggttatcttctttaaggcagcagcacatggaatatcagtgtcatccttgtaagaagcaatctcattttctaactgttttagctcacgatattcgattgcagcttctcgcagggcatcagctttcctctccggccatttgaaatgctttaacacagctcgttcgtcagcctgcacaaacaacacaatatacaaaggcaaaatacataagaaaaagagaatctttaatgagacagtaagaactgtagtggaaaggtttaagggctataacaaaataccaatgatgagagctgttcatcaagccaatccacaaactttaagacatcttctatgtccaagtacgaggcatccaacacctttgcaatcaagccattgataaactctccttttgtttcaatgtcagcttttatctggaaagaattgtaagcttacaaactgttcaagattaagatttttcagaaagaaactatgctattatgtttggtaatatctgaattcttacagctaaaagatgagacgaacgattttggatttctccaactatgctgttatgtgcactaatagctgtttgtttatgattaggactctttcttagttctggagaattcctcttcccctcttgctttgtcaacgaatgatagaattccaaaaatgctggagctttctgactggtggcgggtgctgttctagccgagggcataggtgggggcggtggaggaggtggcagcacagacattgaggatggagtcttccttgcaacatcaacaactttgggagttggactaattggtggtggtggcggcggtggttgtggaaatggagaggaaggcttcttgactatgctagcttcctgaactgtctccttcttagccacagagcgttgtagtttattggcaatgagtttctgaatgtctttgaaattaggactttgatacttcccaacagatttggtcttcattcaagataaaattttgaaaatctttagtgatgcaagatagtaagaattgtatctaagacagtcaaaagattattctatttgaaacaaaaataaagttagcttgttttcccttgtccaaactcacatactaaacaaatttttcagaatctttaatgatgaaaacaatcagaagattattctatttgaaacaaatttaaggttccttgttttcccttgtccaaactctaatactaaacaattttgagaatctttagtggatagtgagaactatatctaagataatcaaactcaaatactaaacaactgcacacactatcttcttcttcttcttctaaaaagtcaaataaaggagaaaaggttgaattttgcataattatgaaaaagagtaggaattctcacctggtcaggactgctagtagatgctatttttgcttcagcagcctcaagttcctcagccagctttttgttccgggaaagaagctctgagttaaagccatgagctttatccaactcagtcttcaagctcaaaacttgagactgcaaatctctaatcaaagcatcactcatttgaagcttatcatgcaaatccttgtttttgccatctgggttattgttgttgttgttaaaatcctcagttttcttcgaactagcaacatcagatgatctcaaccggcgtggcctagagaattgctcaacaaccggcctgtttccaagccgacccaccaacttagactcatcaagctccctacccttttgagatcccaaacccaattcaccagatttaggcttagtcagcacaagtggcctcctaggcctagaattgttgtcgtttgcatctggggttactgattttgctcttgaaggttttggtgagtccttaaattttgaaggagctctaagccgagatggggttgtagtagtggtagtggtggtggtggtagtagtctgagacatgtggggtgagcttgttgtgtcactcaacaacttcatgtattaaaaagactccatttttaaccaaaaacaaagccctgtgaaaagatttatgaagaaagatgcatgtgttatttgactatggtttaggctctcatctctatatatattcttatcacatgaatcaaaatcaatgaatgaatgactcttactcacaaaacacaagaaaagcaactctcctcctaatagaattgttcttctctctcaatgtaaaagcattgtgattaagcaacccccacaaggcaagtacatagtacgcaaacttgttcccttcttcttcccttgattagtttttatttttttaagactttgaaactacgaaagttttttagactaagctaagagaattataccctttttgttgttgaatgtgattattgtgtatgcccaccttatatctattgacctcaactttggattttgttttgttggtatagttaatgctactctaaaaaatgacaccattgtattttcaaaatggtcatttggcattataattaaggtcggttagagggttagtaagtggagatggggccttatatatatttatatatatacagtatatatgtatatatgtgtatggccatgataatgattgcataatgatgattaacagtaagacaacaaactattatatatgcgttcacatggagatggagatggggatttgtttaagcatagcttaatcattattagcaacaaaattgtaaaaaaggaaaggtttttaattcatttgtgaatgtcttttaagctcaaattggtgtatatgtttggttagatgtcacattaatggaccttcaagttttgccaatgacaaaggcaattatttatatgaatttttaaataataataataataataataatagatgttgttgttggtgttgttaattatggattatctataagaaaagcattaacaaacaaacaacaaattatagaccattctttgttgtagtggtttcaccatttaagatatagcatacatattttatgaataatatgaagtagacatattcaaatctattatgtaattggtaaagtggctaataaaaagataaaaatcagtgatgataatgttttgaagtcaaatggcatgaatagttaataagtgtaatgtgttcattcaatgcattaatttgacaaatgacatatcctttgccgtatctcaagagtcaagacaaaacagctaataggaaaaagacttagtgtgaagggaaaagaaaaccaaatagtatagtatagtacacagagaaaggtgttgatagaccaacaaattcccctagattccttcctcaatgtcaaaatcaaagtttgatcatgatggggtcatttttttttctaggattgtttattattttgtattataatagagattttacagtgggggcttgtgttaaaattccaaatctctaggatgagaaagagtaacctggctatgattcttattgttaaagaaaacatttttaaatacgatacaatagataatgagctatgcataaaaagaagcaaaaaagtaaaaggtataagaagagagagtgttagagaggggacactatcacaccccactactactaataccttaaatacactcaaaataagtccttttaaaatcctttctttgtggcttttttattttgttgttgcccttttgaatagtacaagacattctagtgacatgcacatacatattgggaatagattttgttcagttgttaattattgaaaatcaaagtatatcaaatctaatttagagtacattcaactttaattaaagtagtagtacataataaaatgtattttatttttaattaaaaaaacattaaatccattttcaatgtatagtattgggtaattagtgttataactctcttatcatttaatttttatacacaattttttttaggtaaaactcttttatatttattttttttatataaatttaaggtgttagataaatattacattaaatactgattagatgacaactgtgtacacttgtgtatacatgataatagaatctcaaagtttatacagtagtaattcaattactgtataacagtaatatttaactggaacctcaaatttatataaaaaaaataaacataaaaagaatttttgctgtaaataaccctacattatatatgtattgtgtcattgagcctgcaaagaatg

SEQ ID NO: 78255 - DNA, 2291 bp, Cannabis sativa
  modified_base (26)..(32): a, c, t, g, unknown or other
  modified_base (2098)..(2102): a, c, t, g, unknown or other
  modified_base (2245)..(2253): a, c, t, g, unknown or other
aaaaatttccgtgtgacagtattttnnnnnnngttaacccaaattccagtattttggtaagtttccctatcattatcaggcctaactgcatagaaaaaagcccaaaatacatttctaacaagcccaccaaatcccaaaacaatcagtgaaggaccacccaggcccaaaaataaaagaaaagaaaacaaaaaactaacttttaagataaatcacaccttttgttttgttttgtttttttttttttcattttttttcctaaaaaatacacaccacttttgaaaaacttgatacgtgtaccatatttattcgatatgcaccttaataaatgtgaaatattaaaagggcaccactggtgcttagtggtgcttagtacactcttatatgttaatgctgctattaatttaattaagtattgaatacaaaataatttaatataataaattttagggagtatcgctagcgaattgtaaggtgatatgtctagaagtgctaggtaccattggtgcccatcaccttctatagttggcaccctacaattagttagtgatattctctacaagctattttcataatttatatgggactcgatagttatttacactaataacaatatgacaccaaagaaagtgctaagcatcaatagtatttttttaacaattctctaataaaaaaataagcactctttaaagaggtattatatttacactctttaagaatttatataaaaacaattaacatatattgaatctaataatttactttcaatattcttttcttattttttcttttacatttagtgttaaattcaatattttttttaaataatggatttttattttgaattttaatctaataaattacatttagtgttttaaatagtgttacatttagttcttctcgaaaatgcgaagttttatttacactggcaaaacttataagatatgttgttttattatttttattttatataaaatatatattcataatttatactcattttttttaataattttttcattctcacattttcttaaaaatatacttatataaaataaatatcaaaaaaacatatattttaaataaaaacaaaaaaaaaaaaaaaaaacaaatgaaaacttatataaaattttcttataaaaaatgacaaatatacattattttcttaaaaaaaatatgatgacaaaattaaaataagcattgaaattaacacaaaataatatgtaaaaaaattataaaatattaatttaaggtttatttctaaaattaatttaagtttttttattaatttgtgaggttgaaaataaaactccacttagaaatatgctattgctattctctaaaaaattgaccaagcgacccctcccattcaaactactctttctataacttctcaatctcttaaagcaaaattttgaatctatatgtttagtgtaaatgtgaagaatctatgacaatgagtatttagaataaggatttgattttttttttagtatctaggttcaattaagattgattcaacgattacattttgtgttgatgacaatgagtttgaaaaattagaaaattaatgctgtaaatgatgcatttgtgatactaaaaataatgccaaaatgatgcatttacataacgatgcattgtgatattccacgaaacattaaatgatattgaacgctacaattttactgatgccttgatgcttaacatttgacttttgacgcaaaaacgatgctagagtgatgcttaacatgtaacaatgcatttgcgatggtctacgctaaaatttgataaaaacatcgattcaagataatttttactcagatgtgagtttaatgtgattttttttttttttgagtttattaatttataatgtgtaaaaacttaaatttgaaatatatttttaattatttgtcttaaactttattatgaatctacacactaaggtgacgtttggtaacacttttttaatcaattttttgtttttaaaattgaaaagtaaaaatatttttcaaaaacatgttctataaaattgttttcacttttcaattttttaattagaaatcaaaattttaaaacaaaaaaaaaaaaaatcactttcaannnnnttttaaacagttttttttttcttaatcaatattttggactctgaccaaacctggacccaaatcccctccccacggccctggcgataaacctggcttctgacccaaacccgaatccgatcccagacctagacccgacttaaatnnnnnnnnnaaataaaaataaaaatgaactttacagaatacactttt

SEQ ID NO: 78256 - DNA, 951 bp, Cannabis sativa
tttttatattattctcttttattttattctcttttttaaagtctatcatttttacctcttttttaaaacattataccaattttgctcttgtcgcttcaagatattctctatgtaatacatatagaaagaggtatgtttcaaataaatgtaaaattataagtaaatttgattaattaattaataaaagtagtattattcaacttacgccgggaggaaaaaccagaggtggttgactggttggaaatggaccagaggattctgtaaatgaattgggatggactgggccgaggtgtcaaatggacctaagtaattgggtcagactcattctattattttgtactactaccattgcgatttatcagattcataaataaatacaacgtttgaaaataaataaataaataatgtataaatgctaaatagcaatatgattctgattaaattatattttttttaaataatttaaattctttagaaacgagtgtgaatgaatattccaaaataaaactccaaattaagtgaaaagaatttttatactatgtattaaaatttttaattttttttcaaaaatactgtatattttttatattttgtattgtgttaagttttcacagttatttttagttgttttactattattttaatagtttattttgttattttacagttgtttttaataaagttatatttctataaaaatttctgtgtggatataaaattataaacttttacccaaaattgaatatttttataaaaaaaaaaaaaatccattaaaaagttaccatctcctatgcgagagaggatgcaaatattattctcagaaatgcaccaaaaaaaattaataaaagataaatctttctttgaatatatttttttaatattctgaaaattttattacataatttttttgaacatttttatacatactatatcaataaagttagaattatt

SEQ ID NO: 78257 - DNA, 672 bp, Cannabis sativa
ttgtctagaatccatcttcgtggggtatcatgaattaaacaatgtcgatatcactaattccgatttgttctatcacaatagagatgctcttacttctatttcaaaggtaaagctcaagatttttgtcccaaaatctgaagcattcattatggattgattgaaggttttcttacatatggatttatatcatttttccccaattgcagtaaaaatatttgttgtgagaatttaattattgttttcttttatcttttctggtttaggggaacagtgacaagtataaccaagttgttgcagtcatgcaccacaggggacatcttgctcctgatgaggtgcactgctcgtggtaatctctctatctaaagctatttttttgtcaagttcttttgcttctttgtcaaagaagttaattcatttgtttcatgggatttattgtgtaattactgtatagacatcctgtatgaagcctgttaaaacattttgtaaaatttgacttttttattttgatcaactaaatttttgtttgttaatgctttatagacaagtttaaaggcactgtctgttacagtttcacatatcgataatgttcttcatcactctcttattgcttctgtaagttgataaaagcactttggttggatgttatcttttgctgttttcaatttactcaat

SEQ ID NO: 78258 - DNA, 550 bp, Cannabis sativa
taatttatttctttaaatcaggtttttattgtttagtagctgatttaatacaaataaagtaaggttataatttcattttacaaaaaataaggaaaagtagcaaaaaattgtatttctctcaaagctctctctctctctcaaaaatttccttgaggcagctagggttttgcatttcttcatcaattgaagtagcttctctacaaaatatagtgatttctagttgttggtaagcttccatcaaccctatctttagtttttgaagtttttggaaaagaatttatgcatgctgtgattttgagtgatgttgttgctggtagagtttgaggatgttttctagatgttagatatgttgttcaatgttgatttaagatagtagtaatggctggttgttctgttggccaagctttgagctttgaagctcaaacttggagcttccttggtggattttgattctgtgtgtagggctgttttgttgctttgaaaatgttctataggttgtatagaacatgtctggaaagtttggtttggattgaggttgaattggttgaga

SEQ ID NO: 78259 - DNA, 980 bp, Cannabis sativa
ccattaatttattattgtaaatctccattccaagattcgagatattgcgtagcagccatggatttgataaatgatatgaacattctttcctaattatttctatgattatatggatattatatacacactagtggggagtcatgtcttgcatgtgctgccagtaattgccaattattcttttattaaattataattcatatgtaatatgtattttaattattttataaaacaactataataaaattttatatttatagttaataatttttagattttaaagtaaagatgtagtattgatcaaaataatttactataaatataattacgaatttaaaatttaggagtttttttatttttacactttcaaaaatatgaggatgagtctaattctagtgaagaatttgttccaaaagaacaacccctgctgatgattctagatttgaaagtgaagtgcctgaagatgatcctgtcagaaccagtgactgttcctgctgctactgatcaacaaaaagacaaaggaaaaagacccactatttctccaagtcctactcttccacgaaaaaggaaaagacccttcggtattactcttgaaaacttcaagcctcattctcattatttttgttacaatgatcatgctagagatatgaaattttatgagaagagaaattttactgtggagaaaaaattttttaatgttattcttcataatccttttggggtatataatctgctaaaagaaagatgatggatggatacattgatcggatttgatggttatgtagatcgtattgtcaaggagtattatgctaatataacttatgagagtctcgatgaggactcttttacgttcggcaaagtttttgtcaagtgacactggtattcttctattgtgaaggatgtggctaaagctctcaatctaccttttggaattgagccatctagagtagaatttgaacgtcaaaaggtgttcgggtttttca

SEQ ID NO: 78260 - DNA, 687 bp, Cannabis sativa
ggcacaaaacccaacagaatggtcaactcaagactagtgtaatagacctcactctcacatatacacacacatatatgtatgtagtacctatttagaccactacacctacctacggtggtattttccaatcactaaaatatattgtttattcacatttcacgtcaagtttaagatatgaagtgacaatacttactcatgtcatgtttgttgtgtgctttttacttcttccactgcacaatgatcttatatccttataaacctttttcatggcctataaggcacatgaatgactgcaccacactcaggtaccattccaaaatataatttaatatttgtatagacctctttcatggtatatatatatatatatattcttatgtgatacactaacccaacatcatttttattagtagtatagaaattaccacctcacacttaaatctatatatagggacaccttaaagctaattaaactaaacatagtacctgctctactataagatagagcccatgccaatgaacagctcctctacaaaacaaattttgttgaatctattatgagtcatggagtagaaacatgtattcataccatgtatatacatatagccttttattacttgtccacccatatactaagtttatactcaacatgtattgtccaatcacatcgatcgtaaacatcaaaga

SEQ ID NO: 78261 - DNA, 724 bp, Cannabis sativa
caaaccttggcttaagactagatccaaacttggctccgacctcgacctcagacacagacttggaccccgacccaggactcagactcgaacccaaacctttcttgggactcagccccggaccctaatccgaacactgaccctgacctgaacctcgatccgagttccgaacctgaatttcagtcccgggtccaaaccccagccccagagtcgaactcggacctggaccctagtcccaaccctagacccaacccgtactcagacttgacttaaataaaaacaaaaaataaaaataaaaaatgaaattacaaaatccactttgtttctttttcttttttttttttccttttaaataaaaaaccaaaagtaattagagagcacattttatttttcaataacaaaaagttaaaaacacaaaaattctaccatcacttttgtttgtttaattccttttaaaaaaaaagcagtagaaaaagaaggattgtttatatttacttcaaaagatttcatgcaagtaattttttttatttaattttttttaaaaatataaaatataataggcaaaccttatttattttttcaaatgaaatcagattatgctttgttactatttaaaaagttgttaacattttttgttaattatttttaaaaaaacatttgaaaaaaaaaaatgtacctaactaataacccatttaaaaaaaataaaaaaataaaagtgaatctaacc

SEQ ID NO: 78262 - DNA, 992 bp, Cannabis sativa
  modified_base (283)..(295): a, c, t, g, unknown or other
cttctacttctacactcctaatatttgctaccacaactttaaatcactcactagtacaaaaatttataaaattatatagttcttataagataatattaatgaaccaaattattaagaagactattataaataaaattcaaaatgtaaaaattatatgttaaaattaaataatttttttaagagtaatttacagtgtaaaatattcaagtttaactctcagttacagataaaagtgtcgaatcattatttatattttattttgttattagtatatttaaattannnnnnnnnnnnnaaataaaaatttaatgacttagactaattaaaataccacgtatcaatttatttatcatttaacagcctgatagctgttatattattatcacgaaaaataaaattttaaatatttatttataattattaattaaatttaaatatttatgccataaattatatttttaataattacatagaaactaaaacttatatattcctccttatagatttgatgaatatgcactagaaaagtaataagttctaattggtcggccttttgtgttgtgagcactatgcaaaattagaataaggatattgtttatatatgtatatattagtttctttttggcaaaactatatatataataaaaatgctgatattttccactgaaaagtcttagcctcttaggtgtgactatattattaataaaaattaggtgtaataatataaggttaaggaatggtcacttattccaaacctacaattcttgttcatctatgacacgtgacgtacctgaaatccttaatttaaatatataacacaaattaacatgtttacgtaatgtattaatatgttttaaaaccaagttaattttctagtaggcccacttagaattatttaataaagaaataatttcataggcaataatagagacgacgattttgatctaaaaacttatcttgattttgttgttttcataatattatttattgtt

SEQ ID NO: 78263 - DNA, 624 bp, Cannabis sativa
atttctaagcaactcgagattctaagaacctcacaaattcctagttcattggcatggatcctatcgattcaatactagaactagcaactgtgtgcagttaaagacattctttcctcataattagtattccaatcatatatcatccaaaaatttgagagtatgaccactccctagtttaaaagtaacaaacctaaggaaatcattgtataccgataaaattgcaaaactatcccacccatttataattatggcattgttaagaccccaaaataatagaatgtggtatacgagaataaatataaaaggtatatgagtcttcgtatgggagtgtagccttggggaattggatgggtaagggaaataggagattatgcttgaattaagtgaattgttcgtagcatcaaggagagcctaggcctctcgaatgcctagggtagagtctttgcactgtaattctctttctgcaatattaatccagccaccattaattctacttctctaattgttcttattactgttagtctctacaatttctgggttatgtaccagcagattatattagacatacaatctcttggtagttatctcctaaagtttctatttccataaaaaatagccatagcc

SEQ ID NO: 78264 - DNA, 563 bp, Cannabis sativa
ctctctctctctctctcttgttcgaagacagacccgtgaccaagagccaccacaagcaccagtcaatcttctctctctcgtccattctttctcgtaacttctttattattatttttattttgggatttatgtatgcttgtgatttttgtatttcatagatcgtcgaaaatctcgcggttgtggttttggcagaaccatggcctatatcttgacactttggtgctcctaaggccaaacgaaactcccatcttggtgtcgaataggatgaaggcgatgatacttttgggggggaaatccactatagcgatggtttaaaaccatcggttatactacacgccacggtttcaaactgtcggctatatagccaacgattttaaaccatggcctatcgtctcgactatagccgacagttttaaactgtcaaaaattcttttataattaatgatatttttccaccatcgcctattttatctagtattcacgacactcatatatgcaacgattttagagaccgtacgttaggaattctttacccggcggtgtaaagctgttgggagttctgg

SEQ ID NO: 78265 - DNA, 1550 bp, Cannabis sativa
tgtgtcaacaaagtgagtcaatttatgcaagctcctctacagcaacattggatggcagttaaaagaattttaaggtacatcgctggcaccctcgactatggtctccatctcaaaacttcctctgacttttccattgaagtattttgtgatgctaattgggcaatagaccttgatgatcgatggtccaccacaagcacatgctattgtatctacttagggggaaaacttgtttcttggaaatctcaaaagcaagtgaccatctttaggtcctctacaaaagcttaattttgaagcttagccagcactgttagtgaaatcacttggatacaacattactaacagaactccacattcaacaatctaacataccatctgtttggtgggataatcaaagcacagttctccttgctacaaatctagtcctgcatgctcgaacaaagtacattgaaatagatccatactttgttcgagacaaagtgttacagcatcaacttcaagtgaagcatgttctagcaacaactcaaattgtagattgtcttactaaaccagtatctagctctaagtttcctgatttaagaatcaaactcaatgttgtttctcaacacacattgagtttgaagggggctgttaaggaatataatagttagttagtgctagagctagtttgttagagttagtttgcctaccgttcatttatgttattttcagttaggcctcaattataatatatatatattgtacaactctttcaaactctttcaataagacaatcctttgttcacttatctttctctttctctttctctctctcttaaaataacataacaattacaagtaataattaagttaataaagttaatgtagagtagattataaataacttcaatattcaaatacaattaaaattgccaactataaagtttaaatttttaattaaacactataaaatacaaattttaaatgtaaaataatttaactattaaattaattttcgtaataatatattatagacgatttaaatgaaaaatatataaatcaatttattcaggttgtttgggtaggttggaataatattcaactcacccattgtattcattaggcaatttgaatttttcattattaggttattcaaattatattttttgtcaatttattcagtttgatttgagttgtttgtaaatttttttgaacactcctaatgtccaacatctttggaccttttttttttcattacgtgctggaacaaaacttcttatgcgctttaaatcaaatccaaatatttttcgctcattaatttttctttttgaggatttttttgctcattaattactatcatataaatgacacataaatccattctcaaacaactataatatcgtagatttaaattgtaacatacactgattaaatgttacaattttgtatgttacatatttatttatcaaacactaatatattattcaaatatactagtgtattaattattttgtaaatatttatggtgttactaatacactgcaaggattatatcaagaactaataatgaagaa

SEQ ID NO: 78266 - DNA, 527 bp, Cannabis sativa
  modified_base (464)..(484): a, c, t, g, unknown or other
ttgctaatacactgaaagaagggcatgggttggagaaattgttgtccctttggggatccaaaaccctagacgatctcaacgcaaacttcatctctgatattcaacaactcagtgattattgcaacagtttaaatgttaattttgaatcaacacttagggtgtgtttgaaaataattgtgtaattactatatagtgtaattattaagatactatttacataacctagtacttacactatatttcaaaatgtttaaatatgatgtggtaattagatatgaatttttaatgtcttgtttaaaagaatagttagtaattacacgagaaaaataatatttataataattaatatttaaaataaaaagtttttaaacattaattagaaactatcaattctcaattaaaatctatcaattatattcaattattactaatatgttaaaggtaacacttttgttttttaattnnnnnnnnnnnnnnnnnnnnnaaaatttttgtttttaaaaaatttgtttttgaaaaacaaaaat

SEQ ID NO: 78267 - DNA, 692 bp, Cannabis sativa
tattatcctacacaactaaatacaatatattttcttataattatattctccttagtaatattttttataattaaattattttgaatactttattccaaacgcttggtaagtaattgaaatatgctgttaaagttaaaaaaaatttaaaaacactcttaaaccaaaattgttttgtatatccaggttttatatggaattgatattagctcgtgtagagaacaaattgaaaatgttaagctaagcagcgcagataggagcgtaagaagaagcagagaaagaaaacgcggtttggtcttctggtttatacaacacaatctctctctggctgactcttattgtcatccttgactttgaccctttcttgccattgccttgcccctcccacccatttaccctcatcttcttcctctcaaatttcctaaaccacaaacaagcctaacacctctattcaacctccctctctgcgcccgaaatgggttgctgttccagccaacacgcagactccaaagccagtaggctaaatcgatggcgatccactggtattgtcgctctgcgtgactccaaattgaaggtactttgctctttcattttcatcttttctataaaatatctattcagtttcgttgtctttctctattttatttgggtttttctttttttacttgtttggattatgagaaaggtttgcttat

SEQ ID NO: 78268 - DNA, 2070 bp, Cannabis sativa
  modified_base (1943)..(1947): a, c, t, g, unknown or other
tgcctttctttctccattacaaccaaaaatacttattctaaagaatctcttacattttccctcaattacaaaaaaaaaaatcacgagtgtttctcagttttctaatgacaataatatattctttgaattctatactaattcttgttttgtgaaagaccaagtttcgaagaagactctcctagccgagctgatcgtgggctctatgtgtttaaaaacactcagatcaatgacctacactcaccatctgcttccaactcttgtggccaaccttctccaacttcttttccttttaattctgtaacttttctctctgaacatcaaactccatccagttttcaattgtggcatagtagattgggtcacctaactacaaaaactaatttcatcttggaatatctcttcatgtaataaaactgtgtttgatttttgtcacaattgttgtttaggaaaatcccacaaattcccttgtcctaattctgaaatagtgtacacgacaccaatatagatgatatatactgatctttagggttctgctcctcacacctctttaaatagctaaacttattacatttgtttcatagatgctatagtagatactcctagttatatctacttaaaactaaatctaaggccctccatacatttcaaatatttaaaaagcatgttaaactccaatttaattttcccataaaagctatgcaatgtgattgtggtggtgaagttaagccatttgacaaatattttaaacaactaggaatcttatatttctaatcttatccacaaacttataagcaaaatggtgttgtggagaggaaacataggcacatagttgtaagtggactttccttacttgctcatgctcatatgcctttgaaatattgggataaggcatttaggactacattttacctcattaataggttaccttctcctagacttggtgcctgctgacctttacaaatgctttttaacaaagtactagattacagctctctaaaaatctttggttgtgcttgctaccctactctcagaccttacaatagacataagcttaattttggtctacttagtgtacctttttaggctacaacctagtccacaagggttacaagtgtcttagctctaaagggagaatctatctatctagggatattgttttcaatgagtattgctttcccttcaaatcttctccctcctccacccctgttacacttgtttctctcccttccctactctcaacatctcctccacttcaaacacctacacctcctcatcttacaccaccattttttggggcaagttcctcatcctttacctctgaccaatataatgtctccatctgattacaacaataacttaactagttctaacagtgtttccagtgttgcttctcatttgcaaacaggtacacctaaaactctgctacttcaaaggcatctccatcccatgttgatgacattccaacaattacttcaccacctatgccaattgttgtccacctacactcaacacgcattgcatgattaccatatcgaagagtggcatttgaaagccaaaaatgttcatgttagaactgatcccttccaaaattttgtatgttgtccttgatgagaagtggaactcatttatgaatgaggagatgactgctccaaccaagaaccacacttggactgttgttcctctttctaaaggtagaacaacaattggctataaatggatgctcaagatcaaagaaaatatagatggctccatcaataaattcaaagccagatgtaacttccttgctttaagcctctattaggcctttccccacgaatttatagctcttatacatgagtatgttactctggttgcttcctgaactgatgactaggcctacaaaccaacacaagtgtttccaacatgctttgttctcactcgcttcctaggaaaacttcccaggnnnnnacccatcctgaaattacccaagtcaacgtacttaactatggagttctttcatgatgggctaccaaaaaacaagaggcaccttcttgatatcggtagtaccaatcaatccatttaagctctctt

SEQ ID NO: 78269 - DNA, 552 bp, Cannabis sativa
  modified_base (267)..(271): a, c, t, g, unknown or other
  modified_base (478)..(519): a, c, t, g, unknown or other
tttttttaaagaacttaaagaagaatacgagtagagaaaggcagaggtgtgagttcaattgagggtacaagccatcgaatttgagtgaaaaaataagtgaaatttagtgacaaattattttttgagtgaaacatgtgagggaatgtggtgaggtctttctttatctgttctaactttattgttacaagattcaatcatgtcaaaaattccataagaaaataccggtaatgaaactacaccatctacggttctaaatttacaacttcnnnnnttgatgggggagatgaggaggatgatgagagatgagtgtgaaaaaatacatgcgatgttagatagggtagaagagggatccaaacagaagccacgcaggaatagggttcaccaaagggatgataatgatgtagatgggaagggataattttctgatgaagagtttgatgggatgccagcaagtaactattggaaatattttaccagnnnnnnnnnnnnnnnnnnnnnnnnnnnnnnnnnnnnnnnnnnatgaattctaaaacaatgaaattaacacataag

SEQ ID NO: 78270 - DNA, 1058 bp, Cannabis sativa
ggtcttttgtgtttgcttgattattcagaattatttggggcatttgctatcaggtcttgcagattaaaagtgtgtaggtactgttgctgctggttgttcgatttggaagatggaacatgcttgtatttttttttactgttatgacttatgggagtctaatgtgttgttggagattatttgtttagggtttatttgttaaattttaaatctattttaattgtgttattgctggttttttttctccattttgaatttttattgaaatattaaaatgcaatccgcactaaaacaaccgatccaatccgcactattgcggatttaattggattgaatttaaactgctatgcggattggattggatccaaaatatgaaattcgcacttagtgcggattggatgttgtttgaccaaaaaagtgcagattggatcggatgaacatccatattctcattaatcccttaattatatgggtacgggtgggagcccagcccaactgtggttgtaattttttctttcccaactcttccgtcttccaacagcttttcaggctacttacaattttaccgtttaaagggcacaataacactgcaaacacttacccatggtgattcttacacattcatggtgcaacatacaaacctagatgattagacctcgtcaactcggcccaaaagaaattaatgaatcaacaaaaacttcatgaaataatagagcctagatgtgagaattgagatcacctattttcgttttcatttgtgatcggagtagtgaaaatatgtttcataatcattagaggcattaggcaaaataaaatttttgggctcttactataaagataaatgacatttttaaaaattattaaaaaaatatatatattttttaaaaggtattttttaatttgagccccaaaaatgagtgggcccttggcgcgggcttagcccgcttatgcctaaggccggccctgagtaagcatatataaagggaaatttataaaaatactagaatttggattaacttttacaaaaatactgttacactgaaatttttttaaaattactg

SEQ ID NO: 78271 - DNA, 1186 bp, Cannabis sativa
aattccatgtaacacattaaatgatgggttgcacttatcaatgtattttgaaatgaatttgcttagggccgtggtccttctagttagactctggacgtgtttattttcctcggggaaggcatgtaaagaagagctttaatcttttctagattagcttcaattcctcgagagatgacaatgaaacccaagaatttccttaaagaatctcaaaaattgaattctttaggatttgccttcattccataattctaaataatagagaaagcttcttccaggtcactattatgttcctcgaaagttttggacttcacaaacatgtcatccatgtaaacttccatgttttctttgaacacatccttgaacatcttgttcaatatacattgatatgttgctctgacgttcttgagcctaaagggtataaccaccaaaaaatactcccctttgtccatctggaaattggtttgttctagggctgctacatgcatcttaatctaattgtaattagagtacgcatttataaggcttaaaatttcataccttgatatggcatccaccatttgatcgacctagggaagtggtaacaaatctttcagaaaaatccttatttaagttcgtgaagtcaatgcacattctccatgttccatttagtattggaactaacattgggtttgccaaccagaccagatataaaactccctaaagaaactctatataggttaatttctcaacttctattttcactacattagcctttactgaatttaatggtcttctattctaaaagattgggtctgtgtctttgtcaatgttaacgtggaaaagtatattggaaataattctagtcttgtttgaatggctccacgctagtacatgatgattgtttttcactgtgggaacgatatgttatttcaccatcagaggcaaatttcgtccgaccttgatgaatttcgtaggatctgcctcattgatgcatatttcttcaacttcctccagtggtttgatcatattttccattcctagttggggatctaactcatcctctttctggattaccccctgtgtctgatgggcggatattttggaaccatcttctctgacaataaaaaattacttggcagagacattatagtattttttgatgcttctctggttgccttttaccatgccaatacttccattgtcgcat

SEQ ID NO: 78272 - DNA, 519 bp, Cannabis sativa
tcaaaggctataggatttgggttaaagatcaatggggttttaaaaccataataagtagggatgtaattttcatgaaactaatttcccttatttaagaggaactaacattggaactgcatgaaattttggtactaataatggatcaggtacaatccaaggcacatcaacacaacaagtggaaatagaacctaatttaaatcaagtaaaaccaggaacagaagacactagtcaagtggaaccaggtacaggaaatataggtcaaatggactaaggacaaacaacacctcatatggttcaggtggaaccagtagtttagacagaacatgactcaggacaggtggaaggaaaccttgagaattattaactaaatagagatagagagaagagaattcccaagccaaattagaacatccgctttaatgtatgggatgaagtaatatcctatgctttcctaagtgccatagagataaaatatattgaactagaatcctatatagtggctataaaatccaaagatgt

SEQ ID NO: 78273 - DNA, 660 bp, Cannabis sativa
aaagtccttaaatttaacaatcttaatagttcagggagaatttttaacagccaaaaaagttcagggggcataatttagtacagaaaattgctaattaaccttctataaattttggtaaaaaaaaatcataaaaataaaaattttctcaataaaaagattacaaatgttaggtaataccgcgcgaagcgcgaattaattccctagtattatataaattaattagatgatgaaattcactctcattttcttagttcgccacctaagcttgactggtttacgaaatatttatttcagttaataattgttgaactaaccaaatcgaccatggtttaaaatatataatattctaaacttacatacacagtcacacacacacacatatatttataaatatattttcattcccggcctttaagctgatcagtcattcatggagaaatatcagataataacttttcaatcattattttatcttgtgatctttctgtttatcatcgttgttaatgcatctactggtataatatataaatcagtcttattaatttgatgctcatccctttctttctgtaattaaagctttgtcaattttattatatattgacatattattcttggtgtgcatgatatatatggcagataagttggaaaaacatggtgtta

SEQ ID NO: 78274 - DNA, 571 bp, Cannabis sativa
tatacactaaccggtataatcttgttaccccctcaagatggaccatagatgtcatgaatggccatcttggataagtgtgaagtgaggatggtggaggggagaggcttggtaaatgcatttgcgagctgaaggttactgctaacgggaatgaggcgtatggctgattttgcaattttttcacgaatgaagtggtagtctaattcgatgtgctttgtgcgttcgtgaaatgtgggattatgtgcaatgtgtattgtcgattggttgtcgctgtagatgaatgctggtgtaggttgatcaatatgaagatcttggagtaaatactgtatccatgtgatttcacttgtggtggaagccaaagcacggtactctgcttcagcagagctttttgagacagtgggttgtttctttgtcttccaggatatgaggcaatcactaagaaagatgaaatatccggtagttgaccgacgagtgattggacaagtggcccaatctgaatcagaaaacccacggagataaacagagaatgttggagagtacataattccttgtcttggtgatccttttaagtagc

SEQ ID NO: 78275 - DNA, 564 bp, Cannabis sativa
tattataattaaatctacattaattggtttttattaatttgtataatacacatttttttttgttaatttgaaatttgtaagtgtgaggcgttttcatgagatgaagaaagaatgggaatttgaacaaataatgtcactcgaaacatttaaagatgtgcataatggatatgtggttaatgactcgtgtgtatttggagttgaagtttttaccataaatcaaactgctccaatctctgcaacactttctgtagttcaacgtcgattgatagataatcctatctttcgttgggaaattaaagaattttctaagataatgaaaaaatatgtccacaaatctcaagtgttttcttatgaaaaaatagagtggtaagctcataaaaatacatacaaaaatgtataatgtatcggtagatattcaaactaattaatattcttgttaattcttttaatttaattgtttttgttctacataggcatttaagtattggtccaaacggtcaacaaagcatagatggaaaatcattggcaatgtttttaataatggaacatccaaaagaatcaaca

SEQ ID NO: 78276 - DNA, 518 bp, Cannabis sativa
tgtagtactgaagttctaatccatataactgaatccagattggaaccgatcgtatcatctcgagtaaaatctgaacagtgtatatcaatttttgtacggagatcgaaaaactttatatactggtgtggagttggtgttgtggtttttggtgtgggtttcctcgatcgtgttaaggtaattagagtaatcaatttcatttttttgttttttaaatcttgttcaaattgtgggttagagtaagcaactgatgctttcattcagttgaccccttgctgcaagttcatgcttgcaaaagtaggggctcaatagttttaccaattattggatttgaatcaatgactctcgtcgtatgaaaacgatactctaatggctgatgttccccacatctgagtgatcgagttgcctcctctcccacttaatcaatgctcgaggccaagcacttatcggctggcggacatgcagtattaaactgacacaatcttagattcaagtttgatttcttatgcagttaagagtgg

SEQ ID NO: 78277 - DNA, 907 bp, Cannabis sativa
ggcaccagaaactataacaattgctatgtaggtacttaagagagactcaaatctcagaccttgtgggagcacactgatgaaatactgtaatttgaatttagtcctaattaattcatgagaatcgaacaataaaacataccagagtctatagaatcgattttagaataatatgatcttctaaatttgcagtgaaacccttctcaagaactttagtctcttgaagaccattatctgttattaatagctgacaaaatagttactaatctttatttactatttttaattttgccgctcatcaagatgttttgttagtgcactattcgcccgattgaatagttagtgtgaattttttttaggctgctggtggttgtcctgcagctttaaggcctggccggtggctggacttgtacagtggaactggctctgttgggattgaagctattagccgcggatgttctgaggtacacctattgaagttcatgtgtcaaatctataccattgttctctttatgttctatgatttatctacactgcccttaaaatcttacttctttctattgcttaacttctaggtgcattttgttgagatggacccgtgggttgttacgaatgtattgcgtccgaacttggaatggacagggtttctggatgcctcagttattcataccgttcgagttgaaaagttcttagaacgttcagacaaatttgttggtatgtgcttctttaatgttttaactctttcattttaatgatttgaactcttctgctgcctacttcaagtaatgaaaaatacttggaacataagttcgagttggaccgtgttagctttttcgaaaactctcactaatatgacttcttgtttaggtgaaaatgcaccatttgactacattagtattacccctcctta

SEQ ID NO: 78278 - DNA, 705 bp, Cannabis sativa
gccaggtgcttctgaagttggagtcatccggtagattattaaagcaggctatagaacttagtcaattcgacatccactaccagccacgggtgtcgataaaaggacaagcccttgccaacttcctagtagagtaggctagcttcaacgaccttcactactacaaatatagcctttagtgacactctttagtgacccgcttaaaggtgagagtcactaaatgtatagagataatttttagtgacacccattattcaacactaaatatttaactttatgtcccaaagtacatgactctaaaacatatgacgtgtcactaaaagttatttaattatataattatttgtgaaaaattaattagtttgcacgacactctacgcgcgactgtgataacttttccagtcttacatggagcgacgttatacacaaagaatattgaaagaaaaaatcaatttataatattacttctctcagttcaatcaagagttaaaataatatttttttaatttgctaaaaaaaaattaaaagtattaaaagtaatataaataaaaggatttttttttttgagaagttaaaaggccggttattgaaaccctaaaattgtgttaaagcctattaaacaaccccttctctctcatgccaacagacggctcaagaggaatcgtcttctacacagacagcgcgcaagaggaatcgtcttctacacag

SEQ ID NO: 78279 - DNA, 2950 bp, Cannabis sativa
gtgtgagacagagccttggttagatagttggctgtctgatcatgtgttgggacatatcaaattttgatttccttctttaaaaccttatctcgaataaaatagacatctagctcgatgtgttttgttcgagcatgaagcacaggattagaagctaatgcacttgcactcatgttatcacaccatatgataagagcaactggtattctaattttcatttcctacaataagccttgaacccaagtaatctcaattgtcagttgaacaagtgcacggtactctgatttggtactggactaagaaacaacaatttgtttctttgatgaccaagatattagtgtctccccatgaaataggcaatagccagctacagatcgtcaatcatctagacatgatgccaaattcgcatcacaaaaaccaattagaacaaggcgatcactaggagctacatgaattccatgatgcattatatatttgagatatctcaaaatcgtcttagctgcactccaatgtactgtggtaggacctttaagaaactgactgattttggtcacgacagaagaaatatcatgcagtgtatgactcatatattggagtgcacctatcagacttctgtattcagtagcattgtacagtggttgaccatcatttaaggatagtgtcttccctgctgtcatcggggtaggacctggtttaacactttccatgttaaacctttttagcaactcctgaatgtatttgccttgtgataagtatatccatattgtgtctctgaaaacttctattcccaagaaatagtgtagggatcctagatccgttagggaaaagacgttgttgagtcttgcaataaaaatctccaactcctttgaattgttacccatgaccacaatatcatccacatatattaggaccattataacataactagtgtgtttcagcgtgaaaaaacaagtgtctgcattggagttttaaaaattccagcttataagagtgtttctcaaccgatcataccatgctcgaggtgcttgcttcaggtcatagatcaatttgagaagtttgcagacatgttggggcttgtcatggtcttcaaaaccttgaggtcttaccttgtatacatcttcctcaagggtgccatttagaaagaaattattgatatccaactgtctaacatcccaatcatttgctacagccattgtgagaacaatccaaaccgttgaagctttaataacgggactaaaagtttcaccaaagtctacccctggcctttggtgaaacccctttgccacgagtcgagctttaagtcattgaaagctacaatctctattgaattcactttaaacacccatttacagcctacaacattcatatcaggagtaaaacgcactagaatccaggtaccattcttttgtaaagctgcaaactcagcagacatcgcattattccacccctcatgctgaagcgcactagcagcagagtctcgttcacagtatatagggacaccaaaagctgtaccaaggaaaagttgaagtttaaaaatcctagtcttagcacgagtagtcataggatgaataggctgagaagttgtctttggagtgatgccagtagtagtagagttagccacggatgtgagatcatgtggcacaatagatgtatttgacaaaatttagttagggcagctgaggctgaactagtactcgaatttgaagttgtgttggaggcaggttggagaggagatgctacagtaagaggacatccatgatctgaattagtaggtagttcagccgtaaaatgtgaggaatcagatggtggaacatcactgtgagtatgctcagtagaagtagaagatgggacacttagtggaagattaagcaaggtgtgaggtgctgtcatggtgagattctgaggtgactggtaattattcaaaaaaccagtagcaaagggaaatttcttttcattgaaaacaacatgcctagaaaagtatatacgaccaatggagctaaggcacttgtaccctttgtgtacaatgctacaacaaaggttgacacatttaacagtatggaactgaagcttatgtgtttgatacgttctaagacacgaaaaacaagccaccacaaataatttcaaaaaattttaatctggaactttgtgaaacaaagcttaaaaaggtgattttccatggagaattggggtaggtaaccgattaattagatatacaactgactgtaaagcttcagccagtactttagaggcatgtgcgcttgtgcaagcaaagttagccccatctcaacaatgtgcctatgcttgtgctcagctctgccattttgtttagaagtaagaacaagaatggtaaaaaataattccactggtcacgactaattgagaaaagcattggtactcaccaccccagtctattctcaactgttttatttttgtgttaaacttgttttccaccattagtttaaactgtgtgaaagcttcaagagatttagattcgtttttcaaatgatatagccatgtatatcttgtgtactcatcagcaaaatggttatagtatttatagtttttttgacagactatggatgctggtccccatagatcagtatgtattaagttaaggacaacaaaagcatgactagtagatattttgaaaggtaaggcacgtgactttaattggcatgcatcgcaaaatgattgtatttcatttgattttatgcttacattagacaacttaagaactctatctaaagcataggtggagggatgtcctagcctcctatgtcagacatcttttagggaaacattaacaacattactaggaactgtagactgactcaaaataggaggaaaagcagccttagaggataaactatgagaaaattatggtgtaggcttgaactgatacagatcatctctatgttggaatttattttaccaggacctagatttactaaca

SEQ ID NO: 78280 - DNA, 514 bp, Cannabis sativa
tttctaagaaagaatgttctcgaagatagcttctcaacacgatcagttaggctgtccaattgatataaatgatcatgacactcgatgatccttcctcgattaacatcctctgagttggaaaaagagtgctctataaacagcgtaatttatttcgcaaatcgttaaggtacaaaagagcgttaggagggagttcttttagttcgctaataggactcatgttgtgtgaaaagtgaggagataaactgtgacttccaaaagatatgtccaatgattgatattcaaagaaaaaaaagagatagcatggaaagaaaaaagaagatgcatgaaagtaaaagaatagtgtgataatttataagcatggaagcttcctctccaaacttccacttagtaaaaagatgaaaagataagtaattatctttgaacagtaaaattgatatgatgcatgaaagtaaaagaagagtataatgatttatagacatgaaggataaataccaaccctcgacgtagtaaaaaa

SEQ ID NO: 78281 - DNA, 608 bp, Cannabis sativa
aggattttggttagactgaaggttttgagaaatatgaaaggtaaaaacatcaaagaagaaaaacgaggggtttttatacaccaactaaggcgacatggatcgtcggtcatccaactgtcctaatttaagagattaaacgcctcacgatccaacggttggggtgataggtggcatatggacaagcatgaaaaggatggttacactaatcgagtgtgacatcctacaattaatgacatcagaatcgattaaaaaccgaatcattttatcaaaaacgagataaattaatgagcagtatttccccactatcatgagcctataaatatgccaatgataaatagaaatggagatcaatcgcaaaattctttgtaataaacactctcattaatagagcaactcgtagactaaggcccattaatgtctcaatcacgtaaaaattatctcttttaacattcattaattacttcatacccctctaattactggttatcgaaaatcttggtcaatagttcatgttcatataaattttgtacataaatttttgagtattttatatttaaaccccataaaaataatttttttttatctatgtccttacatatttttatatt

SEQ ID NO: 78282 - DNA, 3783 bp, Cannabis sativa
aatcctgaacttttttggccgttaaaagtctcccctaaactattgagattgttaaatttaagcatttttgtccaatttcatttaattttactaattcggtacttgtccatgtactaaattatatgctcccagacttttatatctcccaaatcatgcccatcaaattttaatatataccaaatcatgccccatgttagactttccttattaaaattgaacaaaagtctttaaatctaacaatattaataatttaggggaattttttaacaattttaaaagtttatggagcataatttaatacatgtcaaagttcggaggataaaaattctaattagcctaaaaaaatgataaaaattactttcataatctattttgtaccattaaaacaaaaaaaaaaattgtttaagttgtcgtttaacaaatcacacataaatcctaattgttaacttttaaaaagtaaaagaggattgttaattacaacctcgtattataatcttttagtcaacttcaagctcaaaattatatgcgggaatattttttcaaattttttttcatagttgtattcgttataattacaatagcatccctgtaaattaaatttttgaaacattctgaatagtttacactttactgattgaaaacagagttcttgatattttaatttaccaagagtgttcaaaaaacttcaaacgtattttctgtgttgtaaactatttaaagttttttaaaaatttacaaggatgatattataagcatgacgaacatcgccattaaaaaattttaaaaaaattccgacatatatttttaatcataaaaattaattaaaagatagtaatagtaagttcacggttaaactcatcaaattaaaatataacatttaaccttacaaatctcaatctcacttgcaagtttcaaccacaataatgggagagagaaatgctttgaagcttatggtatctaaaaatatttgtgtactccttttaatgactttgctcttcagtgaagatagagatgatgactaaaagtgatcactttttcttttaaagacttttcttttcttcttcccattttctctcttacattcctcattaaccccaaactatcattactatacaaaacccccctcaaacataaactctgttatttttcaaagtctccaccaaaaaaaatcatgggatctgagtcagagcaagagttaaactcaataccaaagctaccccttttttcagttcctccagcgccgtcaccggagcacccgggaatgctaacaccgccacaccagacaccactttctgttcctttcaggtgggaagaagagcccggtaagccaaggccttgcatggccttagctacgctctcaaatctgagtgagttagcgccaaagtgcttagaactcccaccaaggctgttgttggagaccaaactggcttcacccactacagtcctggatggtccttatggtcggccaaggtttcagtcgtcgtcgtttaggttgagcggtgagagtagttatggaggttcgtttggtacagagaaagggtcacttggggcaatgatccttagtagtaggagagggtttaaggtcagaggttggcttggttcatggcgaaagagagtttttttgaagagtagagaggtttccaattccaagggcagttatgtctttccatcttcttctgtggatagggagagtgagtatgttggagagagaacagaggtgaagatgactagggttagaaggggtggaagcttttcaagccttgtgtatcccaggtctcgcttctgggtgagttttcatctcttctcattttttttttattttttattatttttgactgaccaaaagaatgtttgttcattttttaataataataaaaaaaagggattttgtaagtgactatgtttgatattatttgcaggcatctgtatatgaagggtttaagcaagcggttccatggaagaccaagaaaaaatgaagataacttttctgactgtgagttagtctgaatatgaagtttggaaccaaaatggtcctatattttaatcatgcgatgcgaagatgacaaatattagtactacattatacgtaacataaaaagctgtaatgcttgtcctcttccctgttcttatggtgtaccaacattgtgaagtttttatcagtgggtctatgccttgtaggcttggctatttatttgataatgtaaattattggactaagtccactatattttgtgtatttgctaattcaattgtctatgtctagatatagcaaaatgaatgagtgacttattttgtgagtttctcctaaatggtccaaatttatagtgctctaaacccaatacttttttaccacgacttttagtttttctgttctttttatttgttccttggcgttgattttggttttggccgatgtacagagtttgatttattattgatgatttgaaaagcagaggagagaaggcgagggacatgggacacggcccctaacccgcgggggaaaaaaggcgcaaaaggcctccctacctagtccctcccataggtcccatctcatacccaccccattttggtgtaatataaaataaaagaaacaataattactcttaataaattttatgattatgtttatgtattatatatggttaaaataaggatctttgatttaatcattatatgatatatttcatggaagtaatattgtatgttgctttctcattgaatattcaattgtgagggtaggtaagttagcctggagttttatattgttgcactgtggatgtggccctggccctttcgtttgagtataccaaaatgccgaagtggtacaaaaatcatacttgatttttaagttgattatgctatttcataattttgtgttataaagaattattattatgatatagcctctccctctttagtcttccaaggatggttcactaaataattttgaagacgggtcttttagtcaaaggaataccaatcttaatctcaaacttcattttacaatttaataaggtggttgagccttatatacacaagtaaatatggtgcagttgaatttggttggacacctcacagtcattattattacctccattctttattagaaggctttgttatatactgtatcgacctgtgttgtgtatgtgatgaattcagtgatggcttcgagtccaaatcttaaattccattcaatattgggttattcaaattgattgacaaacagataggcaagaacaatatacctcttgtttggagttcactaatcttcaaaactgaccaataacaatttataatgtaaaaaactactattcaaaacaaatttctcttctaactcaagaaaacctaaatggattaatttggatgataggccttatattatttagtattcaaaatttactttaagatatgaaaaataaaaaaaaaagaaataggcctaacaaaagcgaaataacagcaaaatatagaggatcatatggtgcaatcacaattcattggagtgtggaatccgaaagacaaatcagttaagctcataaaaaaggataagcaataacacgagcgaagcgaacaccgtgcgtgtgcttatacaaaacaggaagaaattcaaagtactactaaatctccaagaattcattggtagagttaggattatttcaatgatgagaatcataatgggttgaaaaatggactattctttcctcaatacaccatttcagccatctgcatcaccctctatttctttcctgtcatacctgcaataacctgcaaatttgacaaattata

SEQ ID NO: 78283 - DNA, 3430 bp, Cannabis sativa
ctaataagaatagaagataacaaataacaccaattgaacgattgtaagtgtatacatcaattagatgtttaaaaacacaaaacaagatgggaaaagatgaaaaagtcttgacaagaaaagggaatataaaagcttgaaaatgagtgttgcaaagtgtttccaaaagcaaaggccacaagtactagttagttgctaactaacaatattagaaaattgatgatggctggctagtatgtatgtctaccatatatgatgatgatgaagcttgttcacaacagttttggtgtcattctgaacattattaagatttattcttaccaccccaattttaatttctcagggaattctccatgcccccaattgccctttaaggagacttgtcgccttttcagcctcatcttcaatcatgaaagtaaacctatagtatgacaagaatttgtatgcatcacttccttttttatatttaataataattatatgcaatctctcattcggtttaacaacaaaatgtaactctattactaataaagaaatagtaagtgtcataaatttatgctttatgcaaccaaagaatctatatctatatacttatataatggtgttgttagggtatgtgaggtggcggattatatgactattctttctatttttcaaatttctcaatttttcttttttgttttgttttgtttttaactattttattatttaatctaataatattattacagttaatgatgaaaatcaatagacagaaacgtttttttttctatacatttatatacataaataataaatacataaaatgtaactgaattcattaccactatttatttagcctattcatactaataatttgttttttatagggattatcaatttatttttattccttatatatattcttacgatttttttccatgtatattatccactcattatcttatcacacacacatatagtgctaataggtataattttttttttttttgaataaagataggattcattaaaattaataggcctcagccttaacaatgtcacacaagaaagacggagcattaagctcattatacgtacaacctgataataaataagactccctagcaacacaatgggcaaccctatttgcagatcgattaacaaaggacacaaggacattattcaaactagataaataaaacgacagtcctcaaccaataaaccaaattgggatggcatttggattgaactattaattgcttgaaccacaaccaaagcatctgactcgacaaccactttctcccaacctttacgctttatccaactcaaagcctccttgatgccaatgacttctgcaatttcaggagttacacaaccccacctactcgcagaaaaaacttcaaggagcttaccatgactgttacgagcaacacaaccaaatccaaattttaatgagcttcaaaactagctccatcgacattcaccttgaccgtaaaagcatctggtttacaccaacaactactgcttgaaatgtcacatgtaacaaatagagcattaggtgactcaaacttagtaattttccattggccaaggacatgttttgccgacttcaccacctccaaagcaggccgagacttattcagccattgcacttcatttcgggttttccaaatgctccaacacaccatggcaacttcacttaccacttcctcacggcagccatcgaatagagcacaaacccagctgccaaaatcaatctccacaccagcagccggtggtagtttgacagagcagtccaaaagtacatgaaatattgtctcaacatgcatattgcaaaaagggcacaagagatcaacattaacatgcttggattgaagttgtaccttcgttggaagacatcctgaacaagctttccacaagaaatgatgaactttgggtggaataggtaacttcgataaattcttccagcaagtatcatcttgcaaaaatagccaatttccttttgaagcttgaagaactttataggcgcttttgaccgaatagaaccccgaaggctccatgttccaacaccaaccatcaatatcccgagtttgactaagttgaatgcttctaattaaattaatgtccctctcttcaaacatatcatttagaagttcaacatcccaagacctctccccaatcaccatcaagtttgaaacatattgatcaacaaggccaggattatcagttaaaacaaacggattagtatcatggggcaaccaaggatcatgtaaaatactaaccgaagagccattagcaatagactttctagcaccacttcaaacaagagattgagcctcccaaatactcctccaaataaagcttggattttgtcccaactcggcattaagaaatgaaccttgtggataatatcttgctttataaattttcgccacaagcgtatcctccatagtaagtaacctccaaccttgttttcccagaaaagagagattgtagtcacgaagatcccgaaagccaagccctccaaaattcttatgttgacaaagccgcttccaactaacccaacttactcccttactagttgaactcgattgagatttccaccagaactttgccatcataccttcaaggctcgagcgaatttctttggtcaagagaaacaccctcattgcataattaggcaaggcttgagctactgatttaatcaagacttcttttccagctttagacaaaaacttagtctcccaactaaagattttctttctcattttctccttcaagaaaccaagaatgtcatttttatttctccccattatgcaagggggacccaaataaaaactatcatccgaagcctcattcagcctcataagaccacacacacggtcactcacatccatattaacgttcttgctgaaaaaacagatgactttgcaaaattaacttgttggcccgaagcaatttcatagctatgcaaaagccgaagtacatgctgagcttcattctcattagctttacaaaagacataactatcatccgtaaaaagcatatgagacaccataggagcaccacgagcaacacgacaaccagtcaaccaatgttgatgttcataatgctttaataataatgagagaccctcagcacaaactaagaacaaataaggagatagtggatctccttgtctcaaccctctaacaggagtaataggccccattgcatgaccaccatgagtaacattataagtaactgtagtcacacaaaacattatcaattgcacccagtgttgagtgaaccccattcggaccaacatattttcaataaagatccattcaacctgatcatacgttttactcatgtcaagtttgatagccatatatccctcctttcccactctcttcctcttcagataatgcataatctcaaaggcaaccataatattgttggaaattatttt

SEQ ID NO: 78284 - DNA, 2363 bp, Cannabis sativa
ttaagtttgaccaatttataagattattttttgtttttaagtatttgatggtatttgatatgtcatatatataaattaggttttcaaagcctatatgtaatgtttttatttgtttttaggaagttttatcaacggtgccgaaaaagtcgccaaaatttgctgcttgcgctggaaaagtcgttgaagtagcttccagtgtcagaaaagtcgccggaatagttgctggccccgaaaaagtcgtcagaattggcattgtcgctggaaaaattactaaaaaaattaccacgaaactaatttcttgatgaaaaaaccgatttcttgatgaaaaaatcggtttcttaatgaaagtaacaagaaaataacaaaataaccacatgaaagtaacaagaaaatagtatcaaaacaacaacaaaataacataaaaaaataatatacaattaacaaaaaaataataacaaattaacaagagtacaacattaaaatttaaaatacactaaaaagaccgtatttatataaataaaatttaataaaccgtaaaaatattgaaaattccgtacagaccgtaattttgtaattttttttttgaaattatcccttttaaaattaaagtatattttataccattttaaaaaatatagagtctaaattattattttacaaaacaaagggagcgaactctaacaaatatgaagcgcatggatacaagttatgtcttgaaatgaaagacaattctgaatctactttgtctacgaacaaggaagctatacttaatataactatatctggcttagcttccataaacttctttttaacttttagaattaaaaagaaatttctataggtatttggataaaaattacctattaatttttgagaaactattttaaaaattaaaataatttatataatttttaattaactcacatttttttttttaataatatccaaacactttaaaaaacagtacctttttttttttaaaaaaatcttcatataatagttatccaaacgttaaaaataagataaaacttattcttatcttatacttctaactataagcaaaagtaaaaacttagacaaacagggcatatgaatcttatagagtgttcgatcttggctcaggatgaacgttggtgtcatgcttaacacatgcaagtcggatgggtgagtatgcgtaagaaccttttcttatgagggtttaatctgtaattttcactcaagtaatttgcggtataaatacctaagttcaactcggtaataatacttaagttatatttttggaactctaagttatattaagtcatttttcacgtgtcatttttttattggtatatttaaattaattttctttttaaaaataaatttaatgacttgaaccaatcaaaaattgttacgtaacaatttacttaacatttaataatcacgttaaatatttatttacaactaataattaaacttaagtatttatatgttaaattactctttttacccttaaaaaaataatagaaaataaaaaaaaacataaaaaaagaagactattctctgtattttttttccttcttttgattttcctaaaaagtgtttggaaagaaagaaagaaagaaagaaaatcaaacgctaaacactttttcattttcttctttcaaagatcgaatcaatctgacctaatctaaccttcaatctcaaatctcaattggaatcggaagctccactgatagtcgatgagctctacttgaaaaaaagaaaacacataagtttttcaacaacagcgaaacctcgattactatgggtcaagcttttcgcaagcttttcgatgctttctttggtaataccgagatgcgagtatgtatatttattctctttctcttgttcttcctttgtttttttttttttgaatttgttataacttgtaattgaattgatgaggggaattcgatgtatttgctatggatttttttgtagaaatattatgagtgatgatttatgttcagacttcttatagctgttgttttcgttctgtataaatatatggacatgtcagtcacatgggtatattgattgtttgattgaatttgaattgaattaattgttgtagatttcaaatgacattgaatgattttgacttttgagtacgttgctcatttcaaacctcacacttaatgatgatttttttggctttaagctttagatattattgtaattgtaatatcaaaactttaaattttcaaatagtttatttcaaacttgttttcaacactgtaaactatttgaattttttttaaaatttacaaaaataatattgtaattatgatgaatcgctatgcattaccttcgaatgagctagtattgttcttactcttagt

SEQ ID NO: 78285 - DNA, 1081 bp, Cannabis sativa
  modified_base (31)..(54): a, c, t, g, unknown or other
  modified_base (1051)..(1054): a, c, t, g, unknown or other
aaagtaaaaaataccgcctggcagtattttnnnnnnnnnnnnnnnnnnnnnnnnataccatgtaaatttccctaaaggtaagggctaatcttgaaataaggcaactaatcaagcctgcttctagagcccacatagcttaaaagtagggagaagttaaggaacactctttttttcttatatattaactaaatttaacttcaaataaaatttaatttaaatatacaatttttatgaatattgtacctaaattatcctcacacactcacataactaagacataattttaaatgtaatatattttattctttgtaaatagatgtgtaggcttgtgggaaagttggggcaaaattttgataagagaaaaataaaaattattataaagtgatagatgtaaaattgatagaataattgaaaaaaaaggtaaatataataaattttgaaaaaaagggtaaaaatttaaagacaacaagttaaaagaagtatatgtagtgtaattttctctaaaagccctcaaaaattttcttttagaaatctatacatactttttgaaattaccacacatttctttacaagtccaaaattattgtttttattagggcccaaacaatattagggcctacccacttagcactataacactttctattgatgcttccccaataatatacttttttaaaattttagattagaatggagaatgtggaccaacaaattaggattatttatgtaagacatttgtctctatccatccccataaaataagttggtccaactttaatggcacgaggttggaaaattgggacaactaataaattacatatcaaatacaaaatctatcatattccctaatatttccacattcacacatacatgtatgtacatcacatctttttccaaccaaaaagaaatcttcaagaaaacattggtgatcagtttaacttttataaaattatagcctataaatatcaacaaccactacaaaatcaagtgaggaaaaaaaaatactactttttagagaaatgctaaagggcaccactggtgcctagcaccnnnntacgtgtcaatatcgctattggtgcaa

SEQ ID NO: 78286 - DNA, 960 bp, Cannabis sativa
tatcaatcctctataatttcctacagttttggctactgttttattattttcttcagcttggattactcgggtcttatcattcgactgttctagtattggctagcttacacttggtccatggaacccgtattttcatcgtatttgttaagtaaacaaatcaatgaatagggactcagaaaatataacatatctcttatttcgattaccagcacaactgactacaattggtaaaaatagcttaaatggctaccagtaacattgacaaaattattactaagtgttcttacctacattgtggaacttcaggtccaataaactctatgtgtacatccaaaccaggaaaaagtggatgcaactctgcaaagacatcaagttgtagaagttctttctctggacctgcagtgttcaatcataagatttcagtaaattcatgagattatcaccatgtcaagaagtatatttactagaatttagtaaatttgacaggcaagtaagagatcaaaccataccaagatagtgtatctgtaacttttgattggtgtctgaaatttggtttcccataacggtttggattgcctggtagattgtaagaggctgaaatttatacaataaggaaaagaaaagattatattagaattacaactggttttacagtgtctgagatgattgtttaagattgtaaattctaagatggagtcttatgaggaatatggaattttgtgtgaattatttagagtaaaacattgctttagggagatatcgaactgtctcgaaaagtttcgaaatttgtagttcttactttgatatcaataaatgcctattctctaatttttttcaagaactaaaattggatcatagtgtagtatagtgcactgatttaagaaactaatatggaacaaaacaacatgtgcaataaaaagtcaatgtcttcaaaaaaccaagaagcttagaagcagggcc

SEQ ID NO: 78287 - DNA, 661 bp, Cannabis sativa
cttgcttttccactcccagtgctcaaaaaacttatcccgccagccgtcacgtctccatttgcagaagtctctagtatccagcttttcaacttcatatagtaactatctcattgtccctttgcttttatttgagttatgacttgtcttacatttcattgcttcatttggtttaacaattagggtttgtatctcctcggtaatttttagggtttagtttaggttttccatattccttaagcctctggtttgataaatttcatccagaaattgggattgtctttcttttgtagagatgtcccaatttggttcaaaaatttattctccagaatctacagcaccagaatatcccaaacatatagcctacccatataaacccagaaatttcaaacctcagtccaaattggaaataaatgatgccaggattagagaccatttgattaagttgaaccaagaagagatttccagtcattataggcgattcttgcaagaaatttatgagggcaagtgtcgctttttgcgagacgtggccaggcctgaacccatgattttatcttctattcaactcgcaagaccaatgtttttacccacgtcattgttgcttttgaactaggtgaccttgagtttgaaatcatgtctcctaagccccgaaaatcaaagaccc

SEQ ID NO: 78288 - DNA, 964 bp, Cannabis sativa
aaaataaaactaattatatatatatacgtgcattaatctaatatatatatatgacaagattatggtaggacttagcataaattctctactattagggaagcttttttgactattgattttagatcatgcggtcattagatataaggtgtatactcttatgaagactgtttatatacaattaaaattttatacatattataataatatttaattatatatatttaaaaaaaaataacataatattaattaaaaaaattattaatttttaatttaaattattattatttttttaaagttaatttgtattatttttatataggtatttatttttaaaatataattttacttacgaattttacaattaaattttttatactagtagctagctataacaaaattgagtacttaagtctttttgccacgaatttgtttaaacacataattctactataattagtttttaaattaattttctttataatttttttttttcaagaaagataataatttctattaatcaaatcgagtcaattacatctaaaaggagattctctttcaaaatagaaactcgcaactcttttacatttttaagaacaattaattttatctatgctagacaactttcttttttgtacaaatttgtctactctattatctatacaactcggattcatacacaaatttcagttaaaagccaaataccataaattgccctgctaacacattcttatgaacataatataatttttatgacacattctaatatatatataaatatatatatcatttttatgtgtttttttaacatatttatttccttttcaaataaaaaaaaaatttaaataacaaagctcattaaaaaaacaaaaaaacatatccattatacacatacacactatatataaaaagcaatcctctttctagctttttttttttgattacaaatttttttttaaaaaaaaaa

SEQ ID NO: 78289 - DNA, 586 bp, Cannabis sativa
  modified_base (108)..(111): a, c, t, g, unknown or other
tatatatatatatatgcatatggttttaattagcacttatatattaatcaaaaatcatttagaaatttaaaagttaatacaataatatataggtggcgtttggtaacnnnnttgttttctaattttttaatcacataattaaagtaaaatttttgtttttgaaaaataaaaatgtgttctgtaatcacttttatttttcaatttctaagtcgtgggagggggatttgtgtccggatctactcggagtccaaaatattgattaagaaaaaaatctatttaaaaaaaatattgaaagtatttttttccttttgtttttaaaattttgattctcaattaaaaaattgaaataaaacaattttatagaacatgtttttttaaattattttcacctttctaattttaaaaatagaaaactaattaaaaaaaattgttaccaaacgccgccataatatataactttttttattttaatcagcatataaatttccaagtcaattaatattattttagttttttctttttaaggattagtatgtcttattattagtcatatctctgttctatataaaattatagggagatttta

SEQ ID NO: 78290 - DNA, 2376 bp, Cannabis sativa
tgacgtgcttcccaatccaaatacaggttctgtatcatcgaggggcctgagacagtggaagactttgccaatatggaattacaagaaattcaggacaatatacgaagtcgcaggaacaaaatttttttgcatatggaagaggtgggcgagtttaactgatttctctattggcacatgcattttcttagttggtaataatagactactagtgttggtgtactagttttggttgtgaatagtattagcctatgtttaatgagtaggaatcaatagtagctgatgaagagagtccatcagtatgttaaatgaatcaattattggatggctctattgtcaccattgaagatgcaaattttcgtcaaagggtgtatgaaactagatttgtcttttggttttactttgtatcgacttagttttccagcttggcttttcaacatgtattgtctgtgaatttgttctaattgcagatggactcttctcctagtagtagcagtatcttcatgttttcttttattgcttagtctatgggccatatctttatttagaaggtgttaataaagagcttagaccagttctaacttctaagagtaccatataagaaacgttttttatccacaaattgattttactttactttcgtatcaagttgatgaagtgtcatcttctgatttgaattggggttgtttgaatgaatgtaggttcgcaggctgagaatacaacagagaattaaaagtgctgagcttggagtttcaaagaatgagcgagaagttgaacttcctgatttcccatcattcattcccttcttgcctcctttggtaagttctcttccataatctggtaaacttatagaccttctttcactgatttgtccatttcattgcaccattttgttttacctgtgtcttcatttccgttttctttttaagataaagggataacgaagttcactgtgtttctcatgtacattgattcagacttcagcaaaccttaagcagtactatgcttcctgcttttctctgattgctgggattatgctttttgggggccttcttgcacccagtgtaagttatttttaagctataatgtagtttttattgggcaaaattaataggacacatctcaaggcctaaaatcagctttatttctaaattctcccttatcttttttcatttgcatctcagttggagctaaagctgggaataggaggcacatcatatgaagattttataagaagcatgcatctgcctatgcagttgaggtaaatttttggtatgaagctactaaatgattttcacacaatctcatgttggtgtcatctattgaaatccttcattgtcaaaatgcagtcaggttgatcccattgtagcatcattctcaggaggagcagttggagtgatctcagcattaatgattgttgaaataaacaacgtgaaattacaggaacataaaagatgcaaatattgtcttggaactggtatgcctattctgacacatgactaggggctttattgaaaatttagttaccattccaagataagaatgtgttttaatcaataaggctggctacatggatttagtatttcaaaagtaatctgcatcatgttgaaaagctttaaaacttagcattagttatctgggtggagataagtcttctatgcattatgtttgtcactttgtgtctaagagaccaagaccttagtattttttttttcttttgaaagaaactagactaagacagtagaaagtttgcattatttttctatgcggttcttattcttttaatccgtgcaggatatcttgcttgtgctcggtgttcaaccacaggaacccttgttcttattgaaccagtgtcctcgactagtggtgaaaatcaacctctatcaccacctagaactgaaagatgttcaaattgttcaggatctggaaaggttgaacacttacctaagcatggattaacttcatgcaattgatcaatatcatttttgtgcttaggagaagaaagaaaattaaagcctcctaagtgcgactagcatatatggaagctatgctcctacaactactacagaagagttttaatcacaacttcattcctattttgcaggttatgtgtacaacatgcctctgtacgggaatggcaatggcaagtgaacacgaccctcgcattgacccctttgattaaaactgcaccattatgcattgaacctccattctcttggaacattccaatttttgctgcttactcgtctccaatccacatggcactacgaaggacattctgttctgtatataatgtataccaaatgtttcttaccgcatgacccaaattctaaaatgccacccaattttagaactgttgcagcccctatcaaatggtat

SEQ ID NO: 78291 - DNA, 891 bp, Cannabis sativa
attttacaagttaatctgattcttggattcccttattgttgatgcctttgatcttatccccctaattttctaggtattgatagtgtggtttgtcaactcagtttgaattcaagtgagtgggatgttgttcttattcactgtctatttttgcctcatgaagtggaggccatttatctctttcttgccatatttggttgctcatgataagttgatttggggtcataaaacttttagtcagtggatagagtttcttcttctattgcctatttcggttgtgaaaaaaattatggggtcttaatattaatcttaaggtgaaactatttgcaggaaaaatttcaaaaaagtggctaagagtaactctttttggcatggcctcttgataggattttccctttgtgtgattgctaaggggaaactactcatcatgcattgtggagatgttcttcccttcttttatgctgaaaattgtgtgattttcagctgagtgatcccttggcctttttcttggactttttttttaaaaaaattttattcaccttttcttaggatactttaacacttcaacaagtggaattgggtttagttgttatgtggagaattctgtatagaagaaacaaattgatgcataaaattgaagcttgagtttgttctagattaggcccaagatttcttgtgtgattatcataactcctctgaccagaacaaggtggtgattggttcgaggacgatggggcaacattttcttccttcttttttgacgtatgaccttcgctgggttttgccacaagcgagttttgtaaaagattaatgtagacattgtcttagatgctgttgatggattttgtggcatcggaatgacgattcactactacaaaaatcagaattcgcgac

SEQ ID NO: 78292 - DNA, 1521 bp, Cannabis sativa
ttgggatccaacacacattttgaagtacacttggacaaaaaccctttttggtaaacgaagaaagctaatacaaatggttcataccaaataccaattccaatttgttcaacaatataagcttaattaagtactagcaatagtatagtatatcccatctaaatatccattaatgaaactaattaaagttaaaggtgtagtacagatatatctgaataaagattactattagagaccaattagacagtataaatctaatataatacctataaatatactctgcctaatataatacaaatcaggcctagattaggagacctcaaagaactaccaaataaagattaaccaagctattgaaagtcaaatcactacccttatagagataagtaatttcatctttcaacgactaaatagtttgagaggggtaaatttatttattatttttttggtaactcgtaaaggttaaaataacaaaggtaacaaaagttacacagttgagaagatttcttccatttaagaaagtttattgtttatcctaagcgcatgcttagccaatttatgagagaaatgccttaaaaaaactagacaataagattttaatatcagataataagatagggttaaatttatgaacaatgataaagaatgcaaaaaatgttatctattactttagaagcactcttgcaaaagaaaaattgactaattatgcatttattgggtcaaaattattctcctaaatctaagctatttaatatttgtagagtatgtcatttttttaaaaaaatcccattataccctcctatttgaagagctctctctctttccccttcactctctcgctctctgtaaacacgcacacagaggagcacacaatcggaccacccacacgatccatgacttacgaaccacctcgacattgtgaccacaccacccacatgacctacgaacgatcgagaccacaccacccaacgccgacaatgtcttcgtcaaagtaaacccttatttttcatgaattttaactttaatcgttttattttttttatgatttaggttaaagcaattagattgagggttaggtatgtatttttagaggagaatatgcgatttttgagattttaggctcgaatctatgttttggaggaaatctgttattttcgccttgtgcgatgtaagtcggatgtaagcccaatataatgcccgatagtaaattaatgttaaaggggttgaaggttgaagaagatagctgatagattcgatatagagctcgatagtgggcatgattatcctcataatttaaaattttattgtgacacgatgggtctgatataaggcgagataaatccgatatcaataagacaatatcgtgtttggcaacttggtgcctcgtaaattagttatatggtgtttggcaacttggtgtgtcataaaaatgctcaaaaaagttagtattaagtgtgttgctatgtctattttctaaacaatcctttctcgttcttgtaaattaatggatcttctatgcaacgc

SEQ ID NO: 78293 - DNA, 750 bp, Cannabis sativa
ctgcaagttcttcaactccttcttgtaccctttaattctatggttaagagaccctgtaatctctttgccccaaacttgaagcttttcggcacaaagtcttaatttgccacttagactgaaagagtgcccaagagcccagcaatctctaataatctcagaacaaatcggctctttcaaccaagtgttttcaaatcgaaaacgattatgaggagcaaaaaccgtggggagaaacggttcgaggaaaattgccgcatgatccgaactagaaaaatctaaattagagagagtagcatttggaaatacctgaacccaagtcgatgatgctagcgctctgtccaggcgtatctcaatccagttattagaccctctccccttttcccaagtgaacgggtgaccttgaagctcgatatcaactaaattacattgctgtaaagtggcattgaaacctgagattaggctttgaggatatggccgaccccctcttttctcctcttgactaacaatgttgttcatgtcaccaacgagacaccacggtaagtccgaacgagtagccaaagtacaaatcaaattccaagtctcttggcgcctactcctgtttggttctccatagagcccagttagtctccagtttccaaattgtgtcgaatgaacagtaatgtcaatatggttattagaataacccaacaaactcccatcttctttgtttttccacaagagtgcaagcccaccagctaacccaatggcatcaac

SEQ ID NO: 78294 - DNA, 1147 bp, Cannabis sativa
  modified_base (394)..(396): a, c, t, g, unknown or other
ttgttgttgagtcggattgtttaagggtcattaatgatttgcaaaagttcaaaaatatggcttatgatcatattttttatgattgtatgactctggttgctgattttaatgttgtttcttttatttttgctaaacagtctggtaataaggttgcgcatgccttggcgcgatcttctctttctgagattgatcatacttttagtagggattccctaccttttgttattgcatccttgatcttggatgatttaatttaatgaaatttaattattatatatgggaattagcttatatatcatttttaatttattcttaaaaaaattattatttaggttgctccattaaatttatgttgatttttatataaatttctatgaaaatatatatatatatnnnaaaaaaaaaaatcaattcaaagtataaaataaaagaccccttatgtatattatttacaaaagttttgatattaattcattccttttattattttgtagatgttccttagaatgaaaaatttagattaatttttctaatattaaaattttattatcaattttttttatagtaattatttatttagtcataattttaatgttgcggtttataaattattatattttatgtggtaaccttttttaattatctcttaatatatatataatcttatatacttttcttcttggtaaaaaattgatgtgaaaatattactacaatcaaatagcctctgtaataaatagatccttcaaatgcaaattctattgatttggttggtatttgtaagaggtagctattagctactgcctactgccccaataaacaatgatgatggagtttgctactaagatttttccttttttccttttttcttttttagaatgcttttatatcaacaaattatgtgtatacatttcaaatgtattattctcagatctttcaaagtcaattaataaataaaatccgttattgacttctaccaaacttcctctcaaataatttttgataacacttgaacattaagttatgtttctttctctttagtcttcaatggtaactttcattttgtttttctttctataagtattttatgattgtaaatattatggtgggtatataaaagctttaaatgggtatattattgaggtatcca

SEQ ID NO: 78295 - DNA, 594 bp, Cannabis sativa
ggtaaaataaattccaacaggtctaactttgcttttttcagaccctcttaaagagctaagtttcatttctttaggagattaagatctttgaaactcgccacaaaagcccgaaaaaaaactatcatgaattgtgatgaaagttcagctcaataggataagaggtcctcggtaggaattccctcgactctagtgacagactcatcgctcataaacttttcctataagaccgtgaagtcgtgagccttgacatcagggtcgatcacaaccttcttccctttgtcttgagcaaccttctgctgcttctttcaaaagtcaaccaatggggtagaggcaacttcacttttcctcttttaaggcatcgcagatgacggagtcgcagtactagcctttggcttacggttgaagactagagcctgcttcaagaaagtcatatctgtgagaagaaaaacgagtgtaagaattcaaaaaattaagacaatattatcagtagtctatcaaattgtattacttcatgtgggtcttgaggtctgcttggaaagacgcttgtctattttttccttttgcttcttagaaggctctttgtacactggttct

SEQ ID NO: 78296 - DNA, 1169 bp, Cannabis sativa
taataaaattcaaatcaatatttggattttatattgtaaaattgaagatgataaattcacatattcacccttaaaaataaaatcattatcttctctcctcttttagatggtagcacaccatcttcctttctgatagcacgtaaccatagtgtctctctcgcatctagcttgaatgtgaacacctcgtattttttaggtaattctccttattaatttatactcttagatttgtgatattctctaattttggtatgaattgatcttcttctttgtgttcataatgatcatttcatacatgcgttaatatttgaaagctgaagaaggtcatcaatttttctctcttcaataaagattatttttttatcaatattttaatgtaagtacttaagagaaaatttagtaaacttatttcagaaacaaatcaaaaccaacaagaagtttatctttaggatctcatggatgcctatgggtcaaattaagatagttatgtgagctttaggcatacatatatgaatatattttgtgtcttatgtctttattcatatacttaataggatttagaatttatgtggttttgtttaaataaaaaaaagaaaaacttgtttttgagtttgattattggcgcctggtcgaaatttattgttattgttattgtccaaatcttgattggttaaatttattttgttattaattattcaatcgtcgatccgtgtaaacgctaatagccttgaactatatttttatatgcatataatatatattcatgttgtacattttcccagagactctttacctaagttttgtaatcctcgaacaattcctgcatcagacaatctctttagatttttaaaatgaatatgaccaagtttctcatgacatagatcagtaaattatcaatagcatgcatagtgagagtataacaattatcactagatctgagcccttataagacaatttcatcaagaatattatacacgtagcaatgattactatcaaagctcacagtataaccctgatcacaaatctgactaatgctaagaagattagattttagtctatcaaccaacatgacattctttagtctaggaagcccttcaaacttaagagttcctatccctatgacttttccaacaagaccgttaccaaatgtaacttctccacactgcatt

SEQ ID NO: 78297 - DNA, 598 bp, Cannabis sativa
aaattgtgaatgatgattaagattttaccgcggcggtagagagtagactagagaccaattaattaggataaaatagttatttaattattaggagaaatgttaaaaaaaaaaaaaaaaagtgaagatttattatattagaatatatgaaggggaagaaattatcatcttccatagccagcactaaattgttactcaattttccaactgagaccactgtcatacatgtgcatgcccctcaatcatgatatatggaagaagataaacaatttttaatgttaccattgtgaacgaaagccatgtgtacttctttgccacccttaatttgaacgccatgtgtttctcatgtctgaccatttgtcctatttttatttttttattttttatttatctatgtatatatatatacacagtagaaattctatttaaaaatactctattctatttaaaaataatttaatttattataaaataaaaaataaataaatctcaatttacgccaattataaataaaaataacttctaaattgtaattagttatacattttttaagtctcgtattaattaagtatacttttatataagaataattatattttaa

SEQ ID NO: 78298 - DNA, 683 bp, Cannabis sativa
gctcgacctccacctatttagtaaagtagtcaatagtgactattacgtaactagatcaattctccacgccacgaatggctagaaacttgttatgagagtaaattttattagggaagcttgggaattgtggcaaacctttgaaaatttatttttatgagattgaaaagttattgttaaaaaattatataaatatatctatatatattttttataattgaatcactaaaaagtacgtttagtttattggttatctattgtaaaaaaaaataaatacacatttttttacatatatgtataaaaaaaaatagcttccgtttaagcttatctatctatatatatgagtgcactcttaatgagtattaccgatgaatgagatgtaatattagaaaaatttgagtttttatggttaattttctatttaattaagaaaatttctcatttttatattatatggactggggttgttccatcagctgaaaaaaaaaacaataaaaaaaaaaaatttcgacaaaaaaatgataaaaaaaaatgttgagtttcacttgaatatttttttatataaatatctctttgatatagtgtaaaaagaggtatttttttatatttttttaaaattaagtagctaaattaagcataaaaaatcaaaattttcttttattttcggtatcgaaccaaaatctaat

SEQ ID NO: 78299 - DNA, 6452 bp, Cannabis sativa
tagggctgggcccagcgcccaggtggacacaggttgacatattatcaacctaggctgtttccgatcaagttcaacaaaaagtgttccaagaatttttctcctcataaaaaataaaaaaaattcaagtaaactcagggagaacactaaaatattgagtccctagaaacggggcctaccacctaagttgacttggtgctgggcctagcacctaggtcgataatcaacttgggaagttgcctttaattgctcaaatgccaaatttgatacaacaatttgatctagaatggctaagactggggtaggagaagttttccttaatttcataagccttgtaagtatcaaaaaggaaatcccaggagttcaggagtaattacccaacgccgaggttgataagtagcctagtgcgctaggttctacttatttgaatctgatgtcgttttgaccatccgtcttgttttttacaatgaaaaagatctatgaagtcagagaagtcaaattcacaactttttatttctcatttccagctcacccaaaaatgaagagtttcgagtctctcatttctacaaaatagcaacatctccgaaaaccggtgaccagctttaccaaaacacataaatagattaagtgatgtcaaaatatcacttaaacacaataaggtacatcccttggacgtttttacacttacctagcgtccaggttgacgtcatatgtcaacctgggcactggatgtcaatcttgacgctgggtcatgaactaccttcagtaaaatagatataactcactcaattttgatttgatttatgcgattcaacttacatttggaagctaattcaatgctctatttagcaatgtctcacactccaaacgtaattttgaagctatcgtcgtcgaaattcacccccaagagacttacaaaaataagctctgagttacccacagtgggacccactaggctctgaaaaatagccaccaccaccaggagctaattttcaccattagatatcatcaatggtcaaaaacatattattgtattttctccctattttgtgggcctccttcacctataaaaggagagctcccttaacttttttttcacattcaaaaaactacccacaaggtcagagcttttctctctctagaatttggaacttttgacacttagtctattgttgtaaccatcatcgcgtgagaaaaaaaactcgatgtaagtgtcgttccattactatcgcgatatagggagtgaaatactataaattggttgtgtttctcttataattacttaaatacttattcattcttgccaatctagcgagcgggtgtggcttagaagtctagtccaaatttctgagtcaaaatttttggtgctttcattgagagccatagctcaagaaagttactaaacaagatggttgcaacacattctaaaagtgttgacagacaaagttcataaactggcctagcaattgggggtatgacaattggtgggttggaacggagactacttttgcacctcaggcgccaggagcagacctcagaattggctacttaacttttcctccaaggccaccaccaactgctctcgggactggaaccaacgacaagatcccacctaggcagccttgcgtggagatagatgaccctgaggaggccaatcctcaggtcgctcagctcagccaactatggctgaccttcaacaatagttacgagactccctcgataagcaacatggatagtttcaacactggtttatggaaaactagaagaacattgaaagccaatacattgagcaggaacaatagagagctgacatgcctcaacggattagagaagcttataattctaatcccagaactacctcccgtagaggtatttctgagctggtgagagagactccatatcgaccaactaatcacatgggaactagtgcccaaggtgctaaacctttaatgctcacaacaccagtgctacacccaataattgaacagacattaggtaaacactaggcatggagacctctacgagggaaggtgccttcaggcaagagcccgagaggactcaagctcgagggcaccaaccaatgggccctccacctacctcaagagacctcgcaaaaatgagagaacaaataagactcctccaccaaatccatctcaacgttcacaggagactaggcctcgagaccctgaagggggagagggtcatgctacttaagctgaaggaagtagtaggaggcactactttgaaaccataggctacgagattcagtgggtaaggaccaatgagccgcttcatactcgaaagtatttttgggatgaaaggggtgaattgtcccatcacattgctcgtggccttgatggccaacagtacgagtatttccctcgagtaaatggagaggagttgaacatgagcaaaaaatttaattctcttcacacttgtgatcctattgaagactactttgaggggtgtagccattacaatcctctaaatgaaaactcccacatctggtcattgtgagacaatccaaagttcattttggaggcttcaccagagttgccttcacgaccccatggtcagaagacaactacaagacccaggtcgattggggtacaagaattacctagaagaccaagagatctggatgacctcttaaccaagaagagaatgatggatgtggtaaattctcaagaagatactatctgggtaacaaaagttccatatgggacgcagaccactactcacggggtcaacaggtagaatttgacaccttaactgcttcagtgaaggtgatcacgatacctaagttgttcaaatttaagctcgatagagaatggcgctcaccactctctgaatgaattaaagctcttcccattcgtccaaagttcaagagcctttcctagcatcaatacacctagaaggaatatgaagtgtctcacatccactacttcgaagtacaaaccaatttgcaaggtgtgagagacgaggtcaggtgtaggatcctccctgctacgctgatgggccttgctcaacgatggtaccttaagctctcccctatattaatcgacagatggaatgatctagtggatgcttttggcaactagttcgctccttctcgacaaggctagatcaagcccaatgatttggtggatgttaagaaataggaagacaagcccctcaaggactacatccaacggttcctagaggtagccactaagaccaaaagtcttagcgaggacgcaagggttatggcactcccagccgagctcaaggagataagtccgttgtggtgcaacctttgtcacaaagcagtatataccatgaataacttcttagatagagcatatctctttatcaaacttgaagaagccatcacccgagctaagggctcaaagggtggcaagaagaagtcaccagacactgaagcccctgccactgaggcacagggcagtaggaagaagggaggttcgaatggaggaaagagagccaacaatgatgataagaaaggaaactctctcggagcaaagaagcctaagactaggggcaagcccttgcaagattatgaaccttgcctcaccacctactccattctcttagctccaagtaaggagatttatacgaccacacagtcagtagtgccatattgcaaacctctttctctcaaggagtcagggaagagggacatgaaatttttttttcgctaccacaacaaatatggttatgatactaatgagtgtaattagttacgggacaagatagaatttctcattaggcagaaacatgctactctttagcggtatgtatgacttgatgctctaactggggacaatgtaccactctagcctatgctagttgcaagcaggctagagatcatgattggaggccctcacatagttgaaaactcaaggaaggtcgtagaaaggtatgcaagatcactttgacatgaaccaagagctaaagtcttagaggtagcagaatttcctacaaagtctcaatgctatggatgtgaacctatcaccttcaaagaattggactcataccatgtcacctaccctcacaacgatcctttacttattgatgtgcaaatagctaatatgatggtggctagggtaatgattgacaacaaagcattgtcaaatatcctgttcaagcaagccctgagcagaatgggtttgactttagaaccatgtgaacaactcatgtacagttttagcggagctgacattgctccatgtggaaagatcaagcttccacttactgttggcactgcccaaaatagaccaccaccatggccatgttcatagtggtggacgagaagtctccgtacaacatgatgcttagaaggcatgctctctacgacatttgagccatctcttcaatatactatttatctattatgttcccagctatggctgatattaattgtttccttggcaataataaatggcccactcgccaagaagacctgctctattattatggcttcaaaggggatgaataattcctccctgctgttatggcactagggggacgtgcaaggctgttatcaaacttggagagatgacaaagacctctgaagatcaaactatggagaaggtaaagataacacctaaagccacttgaaggtgcacccaagattgggacgacattgatcatgttttgtggaaatcgagtcgggagttggtctgaccaaggaactcagagaatttccccacaacacctcgaacttgaccaagtttgtcaagattggaacaaacttgacggaggtcttgggtgagatgctaatggcttgcctcaggagaaattaagacatttttgcttggtcgcatgaggacatgatcaggatcgactcgtaggtcatctatcatgccctccacatagataaagttaacttcaagcctgtacaatagaaacgtaggctccttgaaaaagaatgctccaaagctctcaaggaagaagttgaaggattataggagaacaacttcattagggaagatttctacttggtttgggtatctaaccctattctagtacttaagccaaatggaaagtggagaacttgcatcaaattcaccgagcttaacaaagcatgccctaaagattatttcccactatatcaattggtggacatgacagatgaactccccacattcatggatgcctattccggctacaacaagatcaacttgcacgcaccaaacaaagagcataatagtttttgaactgacattgagctttattgctacaaagtaattcccttcagagtcaaagaatgcaggtgcaacctataaaagactagtcaacagtatgttccacaataaaattggaaataatatggaagtcaacattgatgatatgctagttaagtcaaaaagatctgaagagcacatcaaagatctagaggaatgcttcaacatcctgcaggaatatcatatgaagcttaaccctctaaaatgtgccttcaacatctagtcaggaaatttctcaatttcattgtcaacttaagagatattatagtgaatttgaaaaagatcaaggccttgcaagacatgaagtcaccatcgtggataaaagacatgcagagcctaataggacaagttgctgcacttagtaggtttgtctctaagtcgtcagacaagtgtgtttccttatttaattaacttaaagaaagcaacaatgggtttgaatggactaatgaatgcaagcaagccttccaagctctcaaacatcatctagccatgctatccatcctattcaagccaatagatggcaaggaactataaatctacttggaaatcactaagcatgcgaccagtgcggctctggtgcatgaggaggaagggatacaacaccatctctaccacattagtaagcatctcattgggatcgagttaaggtatccccctattgagaagctagcccactgcttggtcctgtcctcaaaaagctaaggccatacttccaagctttcacagtcatggaatgatggtgttaactggccaactacatagcaagttttgatgaaaccagaagcatcagggtgccaactcaagtaggcagttaaactaggtcagtttgagaccacctatcagcctcaaacgaaaattaaaggacaaggattagcaaacttcattgctaaatgcactggcctcaaaaaatacgatcccatgatttgtgaagactaggtccacacacttgaaactgcagcttaagaggacattggaccttcctaaaaactgcatctagatggctcctacaacgagcacaattttggtggtagactaatcttagttactctagaggaatttcaaactcacagtgctttgcggtttgagttcaccgcaactaacaacaaagcagagtatgcatgaggcactcctagcaggactacgattagcactagaaatcaaagccaaatcacttgagttctataatgattcatgttgggttttatgccc

SEQ ID NO: 78300 - DNA, 2933 bp, Cannabis sativa
  modified_base (780)..(780): a, c, t, g, unknown or other
  modified_base (2327)..(2331): a, c, t, g, unknown or other
tattttataatgattatcatggcactacaccaaggatttttatatgtatatatattaaataaaaaaatgaaaaatagtgaacaaaaaatttaccttttggtgaactatcaagattgctctctatatttttggtaagttgtatcttagaacaaacatgaattaattataaccaataaaataagggttttttttttttttagttttaaccaaaaaaaagatagcaatatttcaaataaataaatatacagtccaaataaaaaaattacacaaatacctcttacacacaccttcaattacgatccacgctttatgggattgaaacattcgtgtgatgcaacattcgatcaaccacccaccaacctaacacaaccgaaacgaaatccaaccaaaagagaacaactattaattctgacgacttcacttgagaagacgaccaaaatcaatcaaaatagggagctatttcgaattcattaaaaaatacaaaaaaactactacgaaactaaaattcaaccagaaatctagtttaattcgcattaaactaatgtcctgactttaatttttatatctatgaaatgcatatctcaaaaagttgaactggagttcccaaacaatccaactcaagtataacaaaaaaaaaattacatcaatactatagtaaaatatttatcctggtgcatttttgtttttttccgaattttcaatggtgaatttgttcatattaaatcacgaagagacatgtagatagagttacgtacgtggaaacactgttctgatttttantgtttcataacagttgcataaacattttgctaacggttatttctccacatattactattaaggtacaagtaattatcgattagtgacaaaaaaaaaagtactgacaaatagtttcttatagatacatattcacatttaatatttttagtttgcacattagttgaataatagttttgatactacaatattatagtattataaaaacagagctcggaattgtcaaatacgcgatctgaacagataaaatacgattgttgtaatatattttgtattaaatataagaaattattagttattttgtagtttcatgttagttggcttgcaacagatataattgttgcattactgtttcatcacagttaccttgaatttcactttttctttctcttctggccgtcgaagttgaaattttttttaggcaaagacacctttgacttcttcttcactggacaacgaccacctttagccacggggagagcgaaatcggagtcatcatcgtcgatgactaggcgtttccctttagccttgttaacaactaatttatgacctatttttgaagcttttttttgacaataaagatagagaagcataagatgatatatgaaaaatgggagttttcatatatatatgaaatacttcttaatgggtattacctattaatgggtactaaacaaatttaactataaatattatgaatacataattatttataaaaataacataagtaattttaattttagttaaaacagtgtcaactctactgaaatataaataatattttgaaagtaactgtgtaattactaggtagagtaattacgaaggtggtaatttgttacgaaatttatgaacagtacgcaagtatacgtaattaagtagtaaaactcacgcaagtgaggtcgaaccacagggaattggattaaatatttttttactagctaatgaaattatatggtatattttattttgtttaaacttaaattttgattgttttttttttttgttaatttaactaaaagaaattaataagttataatttcaattattttttctagtaacaggtaacgaaacatatgtttctaacatattaaaataattacattaaagagtaggtcgtaatggtacaactcttgagaccaaacggttaccagtgtcgttagaaaagattttttttaaaaaaaattaagacagaaaatatttgataagtatcctatcttttttttaaaaaaaattagattgttattagggtgaatactattttagatcctgtgttttgcaaaagttaccgattggaccatctgttttgttaaatgataaaatagattctgtatttttcaaaatagtaaaaataagacactgaacttaatttttgacaactttttgttttaatataaccaatttaaagacaattcctaatacaaatatatacaaaaaatgtaaacagttttgtcatagtacttttagattggattataattaaattttattttgataaaaaattaattcagggtcctagttgtaccattttaaaaaatacatggtctattttnnnnnttaacaaaatagatggtccaattagtaacttttgcaaaatacagggtctaaaatagtatttacccttgttattataaaatgaaaaaaaaaaatatagcttgaaaatgtatgagtttatataaaaaaaaaaaaatagagaggagatatatgtttagaaaaaaaaaactagcaatatacaaaaagaaaaaaaaaacaaaacaaaacaattagcactatgtatatacctatcaaaaaagaaattataaaactaacggtaaattccacaattaaaaacatgagtgttagttgtaatattttttttcaatattttgtttgctagtgtaatttttttttaaaaaaaattgataaacgaggtagttggaagaagaagatgacgaaagttggtttttggagttttgaaggtgtatttcgaaagaataaatgctgaaaggtgatttaagctaataggtgtaaatggtattttagtaaataaaaactcattaaataaaatatcaatttatattttattccattaatagctttatatatatatactagcaaaaagttacgtgcgagacacgtatattaaattttatgctagtttttttttatgttatttgaaa

SEQ ID NO: 78301 - DNA, 2712 bp, Cannabis sativa
tagattgatagagctagctattaagaatagtttattaataacattggtctcgcattctttgtttactacgaatataaaatctataatataatattaatagtagtaattagtgctaagcaccacactgatccagcatattttctttcataattatatatataaaatgtcattttagaggtcataatccaaatgaagcaatcagaatttgtgacagtggctggaatttattataattaaggtgttgataatttttgaaagaaatgtatgataaaagtcatttaatttgtcaaaattattaaatcaaaatcattttgcaagtgaagtgactatatgtacatgtgttttcttttagtaataaactcttttgtacataaatttagtaatattaatatgatattatgtaaaatattattgtatgtgtgaaaggtttaccgggtcaaacgcaaacccaaactcagtgtaagaacaaatattgtaattataacttcatagttaagataatgtcaatataaaagctggaaatatataccaattggcaatggtggagccggatccaaatttagcaggggtcaatacttgtaaaataatataaaattatttgattaattacttttttttttaattatttcttacttaattaattttaaaaaatttaataatatttgggagggcgatggcattctgcccctagctccattagagtcaacttatttcagagctcaaatgaaaaagaaattcaggtaaggtttgataataattctgatttttaatttttaatcacaaacattaaaatatttatttttttttaaaaaaaatttgtttttaaaaaataaaatgcgtattatttttttttttacttttaaaaacagaaaataaaagtatgttctgtaaactttattttcatatttattttttgattttatttaagtcgggtttaagtctgggttaagtccaggttcgggtcaagggtaggttcagtgtcagggcggggctgggtttgggtccggtttaggtctagttagttagagtctaaaatattgattaaaaaaagtagctcaaaaaaaatattgcaagtgactttttgtttgtttttaaaaattttattctcaattaaaaaattaaaaaataaaaacaattttataaaacatagttttggaaatatttttactttttaattttaaaaataaaaattaattaaaaaattattactaaacgctaccaaaatttttaattaatttacatattttttaaaaatattatttcttttaaaatattatttattcttataaaaattgtctaaaaaaaattattttttcaagaattgaaattaaatcatggcaggcagccctaaactccgtcactaccaattggcagtactaatatataactaattcacgttaaaagtaagaaaacaaaaatgtggattatttatttattaattttcaaataaatttacgtgtatctatctctttgacttttgttttgtttttttttttttaaaaaaaaaaagtttgatgaaaattagtagaagttcaataaaaaatgaaaaatataaaagaaagattattaatatctaaattgaccgtggttttaatattactattaattcttgataggtaattattagaatattgattggagaaaataaaatcagctggatcatgtagataatagattgtaacttagtggcctggtttggtttcctctaataattaataataatgttatttaaataaaatcatgttattcacgtcaaatagtatttttttttaaaaaaaaacatttatggaattaattaattaatttgtttatttatgaaatgaatggaaaaatctttcatttgatgaatagatatgagatgaattatatattgtatttatttgagaagccgccgagaaaatctattttttttatttaattattagtcaaagtactgatcgaaaccttcaaaatcaaaggagagcaacaatgtttgattgttttaattgaatggagaaatgatttattattattattttttaaaaaaataacgagtaaaaaaaactctggtctgtgttttttttttcatataaaaaactagtataggtatttctacaatccataccttagaaaatagtatattaatttaattttatttgtttcggtatttgaaaaaaattttaatttaattttttttcataatcattataattatttaagattttttgtaaaattttaataaatgattcaaaataatttacaattaatgtataaaataatgttctagcagtactctatttcacacgcatataaaataaaagagtcacgcgtgcgataaattgtttaactttatttttaacatgttaaatttctctaaaaatctcaaaattttacaagatattttaaataactatagcgcttacacgactaaaaaaaaattaaatttaacgatgggagcattttttcttaatattttaattatcagagggtatttttttattattatgtgtttttttgaggatctaaaattaaatttaacaataatagatgacttcttttttatatatttggaggaaccagataggctacagcttctttctttataatatttatcagtaattcaatgcaatattattttttatttgagcaatctggactcaattattatacattaatagttactactactactactacttaatatatatattataatacaaatatagaaatata

SEQ ID NO: 78302 - DNA, 942 bp, Cannabis sativa
tttattaattcattgtcgggttattattaaattcacataaatatttataacaaaattcttaagtagcaggggtggttttttaattttggcaagaaattataacttaaaccatttctaatgtatggtatatatttttttttttttttgaaaacattcatcatctttattgaaaggcaatccatattaattatatggctaaaatttggagtacatcactactcctaatcacacgatcagttagcaactaagtgtgatgctctagctaaaaaatgagcaatactattcgcaaaccgtctaataaagtgaacagaaatatcacacaactcattcaacaacatcttacagttagaaataatactcctaaagtaagaaaccattgggattgaactatgtaaagctcgtaccactgtaaggctatcgatttcaatcacaacttctttccatgatttcttcttaacccaactcaaagcttccttcacacccaacgcttcaaccatttctggttgcaaaacacccgaacgacagcagctaaaagcttccaccttatcacatgtagcatctctagctatcccaacaaaactgtaatttccagcttcagggaagatggcggcatcaacattaattttcaaactgttaacttcgggtttcacccatttatccaacccatctgcactagtaaggaatgcagcagtaggtgtacgatcacggtcttaaacatgagtccaatccgtaagtagagcttgagccaagaaagaaacacttgttactgtagggctttgtcagaccaaactaattcatttatgtgttttcatattgcccaacatgtcattgcctccaagctcctttttttcccatctaactgaagcaagacattagcaaaccaatttgcaaaagaaccaacagatggcaaacttataccagtaacaacttggtgccagcaag

SEQ ID NO: 78303 - DNA, 1067 bp, Cannabis sativa
atgaagcccagaaactttcccgatttaaccctgaaagtgcacttcttcgggttaagtttcattccgtatctccggaccacttcgaagcattcctctaggtcatttgcatggctagcgtatgcctttgacttgactagcatgtcgtccacgtacacctccatatttcaccccagaaggcctttaaacatccggttcaccattctttggtaagttgcaccaacattctttagtccgaaaggcatgaccaggtagcagtatacccccttatcggtctgaaagctagtgcactcttgatccgcgatgtgcatcttgatctggttgtaaccggcatatgcgtccatgaaagacaatagcttaaattcggaggtggcatccaccatctggttgattcttggcaagggaaaacagtcttttgggcaggctttgtttagaatggtaaaatctatacaaacccgccgtgtcccattgggctttggtaccagcactagattagccagccattctgggtaatacacgtcccggatcatgccactggttagcaatttgtccacctctttctctagggcttcggcctttaccgagtcgggggggcttcttttctattgaaccggtgcatgtctaggttgacgttaaggaagtgggtgatgacgtgggggcttatgccggtcatgtcctcttgacaccatgcaaaaacatctgtggcagcccttagcgtctttattattttttctttttcccctggttctagactctttcctagccggaggaccttagtggggtcgagatcacacactgacatttcctcgacatcctccatgggttctacaatttttttggatcccacacggggatccaactcatcctcttctgccattcctggctcaataatttcacggaccattaggacgggtaggtgggcagcaacgttgtaacactgcctggcctctccctggttccctcttacggttcctattccaggcttctgagtagggaatttctgacacaagtgcctaatcgatgtgactgcaccaaaatccaccagagccggtcggccgaggattgcattg

SEQ ID NO: 78304 - DNA, 670 bp, Cannabis sativa
acaataggaaaaaagatagaatatgtttactacaaaatgtacaaatcgactgaaaaacttcttttaatggttcacaaaattgtcaactatgtgggtgccataaaatagagaaagaagctattaatgtcccttagtttccatcagaaataaacaatcaactttgtgttttttgacctaagccaccaaagcttggaaatttggtagccttttgacacccccaacaattctaggaaataacattcattgggacagagggggcttgataagggtcacctcctcgcccaattaaaaattttaatcaacatgaatttcaataaacatacctccctgatctcgagcattgtcctcgacatcccctcaagctaactcaaagggtatactcgacaggggaacactttttctggccaaacgtccctgactagatttggactttgttccactcttttaagagccttttcccctaaccttgttgcttctagcatttagaaataaggatcatggagattgtttccaaggaagcgaaagaaattggtttctcagtgactattactgtgcctgaaaagctctatattttcctcttgtaagggaaaaccctcaccatccaccaaaacttggacatgactaggctcttccattgagagaataaaaagaagaagaaaagaattaccaa

SEQ ID NO: 78305 - DNA, 1387 bp, Cannabis sativa
cggcgggtttaatgtggtcgggtttgggttttattaggctaaatccgaatgattcatttttgggcccaaataaaactacttgatttttaaaaatagtatcttttttttctatttttaacatttttttgcgctttattgaattaaagtatataagtttaaataaaaaattatattatatgtaatataaattataatttatattcatgtacacgtgagtcaagcgacgctctggtacaccgaaatgcacagtcttgcatacagtcggcatgtccgccaatattatgtatattcaaatgaatcaaatcatgtatattgaaatcgatggttatagccgctatgtatattcaaatcccattaatcccattatttctctttagcatgtttcaaacaaacacagagcaaatatataaatccaacatatataattaaagaaagaaagaaacaatgaaatatgaaggttgacttaaatgccaatttttcatttggaaaaactaaaaaagtaaggcatatcaaaattggatggcatatatatcacagtctacgaaagtaattttgtactgtttgggtatcgggttaaaacccgactaaataaatgcattattttaaaacccgaacctggcatctgtgttgagtattttcgagttagacccgacctgaccacacgggttttaaatttttcggcttttttggcagcggatcgggacgggtggttgggtttttgaatttgcgggtctagatgttcatccctagtatatatataagtatagttagaactagatgaagaatatataaatattttagcacaagattaaatatttttaaccagaaattttatattaaaccaatcatctaatgacaaagttaatggtagacacgtagagttagtgggtgagtgagtcagtggtagaaattaagaagttttttcacatttacaaatttttacggagttccacaaaaacactctattgcaactaaaggagcaaattaaattgcaatcaaacttcgtatagcaacccatataaaaaccaccagagaaataacttgaaaaactcaaatcgtaaatttaaaaaaaaaaaaatatattaaaaaattgtatgtggggtaattctcttaaaattaattatgtaggataataattaaaaatataaattttataaaaataaaaataaatttatataaaataaaaataaaattatgtgggataataataaaaaaaaatataaatttatgaagataaaaatataaatgaaaaactattaatttacagtcactactacaaaaattgcctttagaggcggtttttgtggcctttcagtgtcagttttggcaaaattcgctaccgacgctgataagagcgacactgtagggttataaacaactgacgcca

SEQ ID NO: 78306 - DNA, 919 bp, Cannabis sativa
tattccatcaacttcaggggaagagaatctcctcaaagattgacattcgctcggtttatcaccagttaagaatctgagaggaagattatcctattttttgtactatgacgtgacatctagctggatgacacgtgtcttgaattttccaccttaggcggatggttttattcctagcagtctacaaggattgatatgaaggtccaagttgtacatacatagtaggatgcccggatagagtcattaagggacatccgactagcttgatcgtgtgattaactcgcatgcaccagccaagaaatgtgagttggaaatttcagcaatgatcaaggatatctccaacctttcatgaaacaaactaatccctactttcgtgggattattcatatcttcagagaataaaggcaatcagcctcgacttgcctaattcccctattataatcatggaaacatattaatttcccattttctttcttatagattaagggaagccattcctatgtaatgagcccctataaaatgtggtctcacctcactattgggggatacgaattgaatcagagagaatactcaagacaaaaatagtgatctaatagagaattactcaaagatccattgtaagagctttagacagagaatacttttttctttgtctcataagtcaacctaaacgggagtaggctattaccactatcacggggccaaacttatagaaattctagtgttttctttatttacagttatttgctttatattatttattttatctaatcgctttaattaagactcactctcattggatagaagcaaagttaatattttggtgctttaatttggagcaagaaagaagtttttgttttaagtcttttacaggatacaagatggttgtgaaaattcgaaagggagttcaaattgatccagt

SEQ ID NO: 78307 - DNA, 3138 bp, Cannabis sativa
taccaaacaagagatttgtatttcaggttaacattactaggtaatatttagttttcaaaattcagttggaaactaataaaatgggcaatataaaaatagatcgatattttccatttccgcacaacgaatggttcattagatgggttactggccacaataaattttgccttaatattgcacagtttctatttaactctatctagataagtaaaaggatcaaagcttatagatacaaagaccaaaaattcacagttcactgtattttctttgttctatttttgttacaattccttccaaggaagaaagaaacaatttccaatcattcatgaactaagagatgacggttaaaccatcatatatacattgtttattgcaagaacctctgcaaattcaaatcactacaaaatatgaaagaaactttcctcaatgaacattttgagacaatgttcctccacctactagttctatcaagtctaacttttggtaaaggtacaaaattagtcccattttgatcaatcccaaacttctcaaaccctaaagctctgaggtccgtttagttgtctactgcagtgtcgttagaggagcctcttatgtattttgtttacaaccacaagtgcaattctcaagttcagtatggagcttctgtaatattatatatataaaaagaaaatagacatcaaggccacaaaatggcttaaacaagagatccaataaattaacgataatcaattatttaaaagatctaatatttcaatcctccaatgccacaagcaacattaataatacacaaatacaagctctccatagtttgatatccttaactaagtggaaaggtgagataaagcatttgctcattatttcaatcgtaagctatcataagatcatcttaaatatagaaactgcaagataatgcctatcattaactgtgattgcctgcaatgatactaattcaggtcatttcttgcattcttaatttcttattaataacaccaaagtcaagtgaagctatcaaaagttcatgatcattttatctagacgttctcaatggaatttatatttaataaataaaaacactcctctatgcatttatctttataaaattgtcacaaaccttgacttggttttgaagacccttgatatgttgaacggccaagtccaacatgtctgcatagcttgtttgctgtaacaacaatgcaaaagaaaaagagtcagattcattggtactagttacataatcagtttccatgatacaagctcacacttcaatctaggttaactaaaacattaatggttctgtttctgtttacaatgtatgcgtcaatggaaccttccaccagtgacatgatatttactttcatgtactctattggaggcaagactattctagcttcaatatataacgaggaggaaccagtctaagatatgtggcctctttctctttttcagaaagaaaaaaagactattctagcttcaaatgcagaaactaccctcttattatcaattatttgatgaaattacatatgtgtacgatgattgtttgaataattagtattttctttttgaaaaaaaaaaccacacaatttttttccctacaatgatgtccatacaagtgcgactaactaataatgtaattctttgaacaaaggtaataggcaattaacgttattttatacagaaattttcatgagggacagctatatcttcttttgatgaaatacaaccaagtgccttagagacaatgaagcatcatcatattgcaaactctcatgagaagcaaacaaaataaattctcagacaaggtatgctacagtgccccacttatctaaaaatacaaaaactagatgtccctctgatgaactaaacttctgacatagccttactaatctcagatgtttcagccttcagtagttgtttccgtgaaattgtgcacatgcagtgagtaataaatgtttttttttcttaaacacgaataatagatttcaatatgttttaaagataacattggatttcattactgatggggtgaaaacgtaactttgaaaaatcaaacagttttttaacagaaaaaaatcatgttacatgaagtaagagtttcagaagtacgaaacggataccttatccatgtttggaacaagatcctgaagtttcttcagtttcccacttattctagttctcctctcctgtatatgaggtatctggagtcagtacaatattataggatatatgtacctagattggaaaaggtcacattaatgaattcctactcttctaaaagagaaaaggacttagtatttgtgaccacaattatactatcaaacaattaacttggtcgttaaagatacaaaccaagaataaacacataaagggaagaatgaaaaactagtcctcatgagatgccacatactatgaagactattaaaatatgtggccttctatacagaatgaatttctctaaagtggaggattcagaagaaaaaaatgcctattgcgtgtgagaaagagatagaaagaaaacttgtaaactagaatagaaaagggcaatccaattattagttaaaaatatactaaccctttcggcaatgcttcgtggatgagttgcacagcctcgcttcgcacggattttgcaagggacagaatcttctgggatgtgaagtaatttctccacggctgccatttctagagtcgtctgtggaaggctaaactgaaacagacaacgaataaaaaatataactaaagtttatctacttatcttgagcttcaagtgaatattagaagtgatctaaagggaaatatatgtttacaaaatttccaaaagtcaacccctcaaaaaggtggaaatctgataacatcattatacgtataatgttgatatgtttcacttaacatctgtaaagagtggtaagtctcagaattctagtaaaacgcatatatacgatacaagccaactttgattagccacatctggtaagattaactgaactttcaatttattaatcaatttcataaacggaataagaactattctcttgtatcagtttttaaaatcactgtaaagttcagatacaagtgcttgcaagttatccacatagactgaaccagaagcccttataacatttcaaccttaagaattatgaactg

SEQ ID NO: 78308 - DNA, 572 bp, Cannabis sativa
gagttatttaagctattatatagtcttttgcttgggttttgtgggttgagagttaacttgagcttgtaagttcaagcttgaccccttttatggtttttttttttttttttttcattttacaaacttgatgatataatttatgaatgaaatatgtttgttagactcaaaataagtattctggaagttttgggttgaattggttttgatttgtgttagttttgaagtttgggcaaaaatttactatgaaaatggtacaccatttttaggaaacgatctaccattttttcaaacagaaaatttaaaaaaataacttgtcatttttacaaaatgacctgccattttttggggtactttttccaaaatctcatttttagtgttttatatatcgatagttatggtttagtcacgctatttatcgatagaaaaacttttagtttcaagtttaagtcctcgaagtgatttagcggatcacttaccagtattacataaattgtgacttattgcctgaaatcgtcgtgtagcaattttcactcatagttaccaatacacttgcatttagatttaaggtaaga

SEQ ID NO: 78309 - DNA, 1402 bp, Cannabis sativa
aaaaaaaaaaaaaccaaatataatttatggccctgaaaaaatgtactttactagtttatgaacactaatattttaagagtagtggcaactaattgtagtaggagtagcagtatgttagactgtatggggaacccgaaacaacttgatttggaaaggagaagctttcttgcttgaagacatttgttaccttgatcaatagaaaagttctcataaatatgtggtttcatcatagtgatgttaatgagcattggagtttacctcaagctaatagaattaagattaacgttgatgcaactctatttaatggtggtaggagttttgatttgggtgtgactactcgtaattctgctagttttttggtgaagggttagactaagcttttttcgggccatgtggagccatctcttgcagaagcaattagtatccgagaggttcttagttgtgtaaagagaagcggctgggcaaatgccttcatcgaaaccgactctctttgtgcagtgcaagctattcaaagctttatcaaaatgatttccttgtttggtttggtcattcaagattgtaaaatttgcttgcaagtttgaataatgttgttatttcttttgttaaacgatcaactaatgtagtggctcacacgtttgctagagctgttagattatatcatgattgtcatttcagtttggagtctgttccaactgtcttgctcccttgcttggtggcagatcttgaagtctaataaagcttaaaatttccagtccaaaaaaaaattatttaagacttgtaatttttttttttaataatttacaataaagaaaatagtattaaaataaaagtttttggtggctaaaccctcaaaactatcgtttcacttgcacttaacctcaaactaaaattttggcagtaaaatcatccaaactaccaaactgttaacaaatttaaagtgtcatccgattaacagtcactatagattgcttatgtatactcttgtacatatggcacatttatattagtatacctaatattattatttcaaaattcattttaaaattaaataaaataaaaaaaaaagaatattaaataaataaaaatattataaatttttaaatattattttataatttttaaataatattatttggtgttctaatataaatgtggcacgtgtacaaaagcgtccacataagccgtccacgttgatagttaactgtgaaaaatagatgttaccttaaatttactaacagttcagtaatttaaagggttttacctctaaaatttgagcttaaaaaattaagtgcaagtagaataatagttaagagagtttaaccacaaaaaactcgttaaaataatttgtcatacacttataaaataaaatgaatcggtgtacctcttttaaaaaggagcgtta

SEQ ID NO: 78310 - DNA, 862 bp, Cannabis sativa
attacagtgatgtcaatacagtggaatgtaattgtgattatatgcttcaaaagataatgtccatgattcaaaaaattatctgatcaaacaaaaaaagctcttttcctgaattttctctccgtacaacctgcgtgcagattggggctatggctaaaacaaggcaaaattttaggggaaggtgaacgttgatgcaaggaatctgaggaagacaaagaaggaaggtccttcatcttcgggtgatgtgaagaagactaagcggattgaggaggtacttgaagttgagcctatggcattctcagaggaggacgacgataactctgctccaagatctgtggaactggatcaggaggacttgttccgaccgccattaacgcctaggtcgtctctgcaacagatcaagctgcaggaggaaattcaagccgactttgagttctttttatcaacaaacgagaggtgtgcagatttgaacattcaaggtaacccgactattcctcttgtattatgttctggcactgtgattagaaatctggagaattcttttaagaatgaaaaggctgttaaggctaaggttaagatcaccacagaggatatagaagatgagattgaattttggagaccctctattgtgtgttatgtgttaggagcatatcctccattgtctgtaattgaaggatttatacgcatggtctggaaaggagaggtagacagagtgggaatgcttacatatggtgtcttcttggttcggtttgattctatacaaactagagatagaatttggaatgggggatatgtgtttttcaaagagaccattgataatgaaggcttgggaccctgacactaattcaactaagtgaaatgagta

SEQ ID NO: 78311 - DNA, 1422 bp, Cannabis sativa
aaataaaaaaaaaaattgtaaaaaaagtttaaaattccataaaaccatatttttgtaatttttttttgttatttttgtgtatttatgaaataattcctttatttttctaatttgtgatttctccacaaactctaaggcgactctagaaaataaaagggaaaggaaaaaaaatgtgagaaaaaatgatttatagtgtttggagttttgaaaatgtgtggggaaatattttaaatagaaaaaattaggggaaagcttttatttaaaattaagattttattttccacttttgtttgctaaggaaaatgagagagaaaactgagaaaatgtattgagcttctctccaccatgagtaccatcttctccgactctgtagcccttcctctggtttgttccagttgcaatttctccattgtttaactctctgagcgggaccttgtctatactgcctaaacttcaccacctcatttataaaattttagctcttacattctgttactgaaactattcttttgaatactgtgtgtttagctttgcctgggtgaattttattactgaaaaagattggtatgtttgaagtttgcttaaacctctttatgtacttcatgaaccaattttaaaaattaatatgagctattatgtagactccaataatctgataaattatttttaaattcctttctattagtgtccgtgttagtcaaggctagttataacataatttttgggttagttagtctaattatccagttgtatctagtttctatataaagactttcaatacattttgtaacatttattcaagacaatgttcagattaataagagaaactcttcctttctctctctctcgatatctcatacggtatcagacgctgtacacactcattttgcaacaatggctcacccaactactcgatctacatttagagatggatctcttcgtcggatccaattgaatctcaagatccagtcatcaatggtgatgcactagcttccacggctcttccgccgacagctcctcaaagacctttcagctccaagaatgatcgatacactcacgaagaagtctaccccgttcttcctcagtgccagagatcaccctggccttgtgcttgttttctctgttctcacatgccaatactatcaatcatggaagcatgccatttcaatggtgttggctgtgaaaaaacaagactggcttcatcaacgaatttctactaaattcaataaaatgattgatttttcattctctctgtctaatcaccactgctctatctgtcatcttgctagaagaaaagtacccttttatttcaaataataacttttaaggctggtttggaacatcctattaagttatattgtattgtattgtattatattgaattagattatatatcatatttttatataatactatgttaaa

SEQ ID NO: 78312 - DNA, 640 bp, Cannabis sativa
taagaaaataggctaatttgttcaaatttgaatacaccacaaaaatatcaagcctatggtcatgtcgagcctacttataaatttttttttttttttttttaatacttataaaattgtcggaacaacatgatatagaacatattttttttacccaatactacacaatttgtattttacgagttttccaaaatacaagtattaccagcacgatacacatatttatagttctatttctttactttgtgtaagtctttatagataactttattttaatttaattttacaactaaaaaatccacaacatatttatgttactattttttaaaggagaatttatgtcctccactcatgaaaaataaagaagtattaaactatgttcataattactttttgttcgtaaaattaaatattgaattaccttaagcgcggccctgagatttgatggactttaaaaaaataaaaatttaatgccttttatttgaaaaatatgtagtatttttgaaaattactgaaaaaaaaatatatatatatttttaaagggaaaatatttttttttgaggctcttgcttaggttaaccctaggcgcagaactagtctgttttagtccaggcccgaccctaattaccttaaaacaaagtta

SEQ ID NO: 78313 - DNA, 835 bp, Cannabis sativa
actatttcaacatttcagtacaatcgatacaaatgcgacatctggcaaactatggttagcgtgtgaaaaaatagctaattaaaatttctgtttcttaaatttttacatatgttaaattatatcttattagagagataaaagaagaaagtaaaaatgattttattattctgaatagttgtttaataatacaacaaagaagctttatatagttggaggatatccaacccaaggatagacaccaaacccaactaagaataacctatctctatacccaaacactaaataatatttaatatttgatatatctgtaattaaaaattcccttaagtatttaagttattagatttaaagtttcttatctaacacattcaattttattagtttagtttttatttatgctctgaatcatgtttcttaaattcttatatttatcaaattatatttctctcgaattttaacatgtacaaaatcatattctttaaattttcatgcatgttagattttttttttattaaaattagataaaaattcttaaatctaactatttttataattaggaaagatttttaacgaccttaaaaattcaaaaaacatgatttagtatatattaaagtttgaacacaaatctatttcttgatatatattaaagttcggaagcaaaaatcttaattagaaaaaaaaaaaagaaactattctgtttgtgttttgttttgcaaaagtattcatttgtattttttgattttttgattttttttcaaatggatcaaagtaatattcactaaaaaaattgagttgattaaaataattttatatataagattaattattacattct

SEQ ID NO: 78314 - DNA, 549 bp, Cannabis sativa
aacttagtaaatataattatgtaatattaattaagactatttttcatatttgcagtggaataatactagaatttttaataaataattttaattgtattgttgagatacaataaataatttgatttattgaaatttaatgttataggtgtatgatcctcagttgtttttatactatattattaagaatatgaatgtcacaagataaaagagggatgaaaatttatttttgcaatgataatatagtaattatatatttattttataataaataataataaatttgagagaaatacttttatctagacaaacaaaatcatgtattgttaagacagatgaagttacctatacacactggataataaacacctactataaataatagaaagaatagactttactgggtttaattttgaattatttaatttgttttagggtaataatattgttgactctacaaaatgagaaagaatgataaagtaaataacagtcagtttttataatggttttatccactatatatttttattatagttgcacttgaattgaaaa

SEQ ID NO: 78315 - DNA, 1092 bp, Cannabis sativa
atgctgtttagagttgccactaaacatgcttttcttttcgttaccttgcctgtttccattatttgacctctttccatcttgattcgaactatgattttgtgaattctggtctaggtgcacggatgtattggctgtagtggtgtgttgttgggttttcttttgtctaactatattcacaccctgaactgctgcttcgagctttataaatccatctgcacagtctaggaattttgccattgaccccactgtaagtgttttgatgtctttccacaattcccctaggggctcaatacctttgtagcttcaatcatgaacctagtgatgtaagctctcaaaggttctcctaatatacttcacttctaccaggtatttcaaattagataagagatgccaagaaaaagaaaaaatttcatggaactcggatgtgaaagaattccatgaattgaacttcctcagagctaatttaaagtaccactactgcttagcctctgccaaagtaattgggaagattctaccccattgataagtcaatattttgtcttataaatatagtcaatttatgtattaatatttttaaattcattctttaaattattgatttgtgtgattataatttgttaggctattttgaagactaatcatgcatttggagggattttggcacattttggtagaaaatagtagtagtcggggagctcggttcgacaagacagaatgtaattgcacatttcgacgactttaaaggcagaattagacttggagttgaacatgaaagttgaagatctcattctcagctttctagaacatcttgaatcgtccaattctgagctgtattgaaaaggttatggccaaaatactaatctaaacacgcgacagaatttttatggcagcaagctgtcaccgcagcaagggaactcatggtcgcggcgaggacatgatttctgccatttttcaaattttttcctctttttttttaactgagatattcttagaggtatttacaggatttttaggattcgttttgacggacttttgaactacaaaattgaaagagaaactcaaagagagagcaagaagaagacggagattgcg

SEQ ID NO: 78316 - DNA, 1232 bp, Cannabis sativa
gtacaatacatataaaaaaagaggtatgtttcaaataaacataaaattagaggtaaatttgattaattgataaataaaagaggcatttttcaactactaaatcctaagatttttgccccttatgctaacccgaacaagtttgatatctattttggcggggttgatgaagcacgtaaactggttattagggatctagccccttatgaagaggatcatttctctctgaagtatcttggtgtgacaatgagactaactaaatgaaaatagtagattgtaatcactttcttaagaagattcaattgaagcttcacaacttggcaactaagcatctcttttttgtaagaagagtacaattgatgcaatcagtgttgttgggcgtttgttgttattagatgagtatctttatgttgccgcataaagtagtcaataatgttgacaaactctgcaaagcctttttgtagggtgcgagaggtaatactagtaagatgcatctagcttcataggaccttgtctacaagcctaagaactatggagattgggttttcgagaagaaaccaattgaaacaaggcttcgattgctcgatacatttgggctattactacgaaacaagatgtcttgtgggttaaatggatcaatgtcatctacttgaaaaactatgatttttgagtggttgatatgaaaggtgatatgagttggtattgacgaaaacttcttaatcttaggaatcttttcactcgagagacaatattggatgctgaaaaagggaaaaaattttaggtcagtaaactttacattatttccttactccttatgctaaagttgataatcataaaataatttagtgtggattatccgtaccaaagcatagatttttttttttttggcaagcctctcttaatatcttattaacaagagatcacctgttgacaagaggtatcgctattaattctattggttgtccagtttatgagcttggcgatgactgtcatagtcatcttttctttgattgttctttttccaagcaactcatgcatgttattcattcttggcttggtaatgccatttggtcgttgtcctattcatattggcttctgtggttaaatgatcactgagatcgcagtcttctttatagggttgttgcagcagtttgtccaactacagtatattttatttggtggaattaaaatatttgtatttttgagcaaatatatttatgattttttatgtgaat

SEQ ID NO: 78317 - DNA, 614 bp, Cannabis sativa
accatccaagagtattatattattcttttgtgtaatttactatcctcttcattatatttttaatttaataactattataaaaaattactaattatttataataaggtgacactttatagtattttgtaaacattagtacctcatagcaatgtgtgtcttattaatgagaatttctaaagaaatatcaatagcgtccaagactatttgagatgtcatactactaatagtacaaattaatttggagtcccatatatttaattttaaaaaacacctaattattatgaaaatcattaactatttgtaaggtactacatgatagtattggacacctctaataaataattgatgtgaaatgctaaagaataccaaaggttttctcgtcaccatttcaagttgttatactgccattaatagagtaattaattactgtgtcgaatatattttaacttaataattattataaaaatctctgactatttgtaaagtgtcacgatggttaggccttagaaaaaaataattattcagcttttgttcttagtatatatgtggtgtttttgaaaattaccaattttttaggtatttttcaaaggacgatggggcttagataaaagctt

SEQ ID NO: 78318 - DNA, 623 bp, Cannabis sativa
tgaactcaatctactactactgctatgctaccatcgttttagttcaattacaataatgtcctctacttttgtgtttattattttttatttttccttaaaaataattttaaaattttatactgagcacacctctttctttttatgaaaaataataaaatgaaacgaataagtaataagaagagagagaagctatgaatttggtcgatcttttgattctataaaaaaagttttatttatatatcatgaaaaaaaaaatacaataatgtataatctgaattataattaatttagtttacggaatatcacaattcgattgaaaattataaattatagtgattttgctttctccataatcggcatctctttatcacttggcacttactaaattttgaatgggaaatttgactttttaaatataccacctaattaaaaataatgttatatttttagtatttttttctttctaaaaataccctcacatttttataaaaaagtctctttctaattctctcactctcttactctccggcgttgaaccttgacctagaatccccactgtcgaacccagacccaaaaccacagtcataagctcctaccaccgtcttctctcacggtctctctct

SEQ ID NO: 78319 - DNA, 556 bp, Cannabis sativa
ttaccctaagaaggtagtggattgctctaaggaggtaactggttaccctctaattaccctaaactatttttctcatatttttcatttttttttttaaaaaaattatcctgtaaactttgccccaaaaactatacaaatgaaagcccccttaataaatatcaaagaccatttacacaatttgggtagaattagttactagtggtgtctaacactctcttatatgttaatattgctattggtttaactaagtgacgagtttagaagtactgagtattattagtgctcaataacaatactcttattattaattgttattaagagtctaagaccctacttagttaatacgtggaatagttaacattcaattttatactcttttatgtgaaattaggttctgaattcgaaacccagtaaatataattaaaaaaaaaaactttcaatttcttaaaagaacaatctttaaaaggtaggcaagttcattgtttaattattccaaaataataaatgatttattcattataacacaaaatagataagcacgaattaaaaagaaaat

SEQ ID NO: 78320 - DNA, 1359 bp, Cannabis sativa
ttgttaattttgacaaatcttcggtgttctttagctctaatacaagtgtctctaatcgtgcattagtttgcaatctaatgaatatcaatgaagctgatgagaatagtctctatttgggtttaccttgtgtggtgggaaggaataaaaatgccattttgggttttctcaaggataaactaaagaagagaattcttaactgggaaggcaaatatctctctaaagctggtaaagagattatgctcaaaaccattgcccaagctctccctagctttgccatgtcagtgttccttctgccaattgggacttgtcatggacttgagagtatcatgagcaactattggtggcaaactaagaaaaaagaaacaagaagtatcagttggatgagttggaaaaagttatgtcgccataagaatcaaggtggaatcggtttcaaagacttacgaagctacaatattgctatgctagcaaaacaatcgtggagacttttggtaaatgatacttctcttgttggcagaatttataaagctcgttactactccaatggttcttttctaactgcttctcttggggccaatcctagcttcatttggaaaagcctctttgaaactcaagacctcatcaaaagctgtgctcgaaaatgtttcggcaatggatctagcattaatattatggttgatccgtggttacctgatgacactaacccatttgtgacatcttcacaccccggattaatcaatcaaatggctgctagtttgctggaaataaatgctagaagatgggataatgaagtggttagtgacttgttcaatggaagagatagctctcttatttatcagatttcacttagtccgattgaaagggaagactgctggagctggaagttagaggcatctgggatgttttcagtcaaaagttcatacaagtaccttactgctgctgtagaagctccagacagcagtgataacaccagatggaaatcttattggcagctcaaaattccccaaaaagtgcttcacttcggctggagagctttaacaggttgtctcccaacaaaaactcagttgcactcgaagcatgttgtggtaaatatgctctgccctttctgcaatattaatgcagaaactgtttatcacattctcgtgcaatgctctgttgcacactcttgctggaatcgttcaagtgtgcacttgaatgctgtctccgaagtggtttttgaggactggttttggcatctttttgaagtaaacttgacatctaatgtggaggaagctttaatgatttgttgggcgatttggaatgcccgaaatgatttgctatggaaccaaaaaagttcggctgctgctacaattgttctttcag

SEQ ID NO: 78321 - DNA, 698 bp, Cannabis sativa
tagaatgtggaaatcaattggggactggaaagtcaaaagtctcgatgaaaataaagaatctcaatattttgggttatcctttaatagtagagctgaagcaaagaggacattggagaagcagccctggctctttaatggaggaatgctggtattggaggaatggccgactagtggccaatggagagatgcgaggttggatacaatttcgtgttgggttcgaatgaaagggttgcctttgaaagctattactttgaataatattcaacggctaggcaatttggcggggaaggttgaagacattgtgtggaacaatccgcaacaaatattcttgaatggttatgtgcgtgtgaagatcggttttccgattcagcgagaggtgtttgttggcagatatattccagttgatggtgagaaaagatgggtccagtttaaatttgataaattacctttaatctgctttaaatgtgggttttggggccatgatcaattgaactgtactaaggaggtggtgatggaaatgaatttacaaggaactccggttcagaaatatgggcagtggttaaaggaggaagatccgattcccaattgttttttggcgtatgaccagttggtggctcgacaaggaggagggaaggttattggtaatggtggtagtgggctggtagaagagattaggcggtcggagattgatacaccgg

SEQ ID NO: 78322 - DNA, 871 bp, Cannabis sativa
actgtaaggtattgtttctgtattgagtcaaatcagccacagtattctatgctagtccatcactgcaagcagatagagaaaaaaattatatataataataataataatacagaaacaataccttacagttggtcctcaatatgataccatttcccacggtcataaatccaagaataacgaaaaagcagattccaattgcaaaacaatacaacttcttgaaataacatctccaatatcttctttttgtattagcctcatgcatttttttaatggacttaagcaaagtactgtctatgttcaccacctcatacttcaaatcgtctagaatcatattaatgtcatcgtgtatatcccaccaaatggttattgaatgatacaattcaataacaaccaatatgacactcatgagggtagtcagcacaaccatgacttggattattatggtaatgtaagaaaacttacattgtataataaactgcttgaaagaagagacagtcaataaaagtgtttgaaatgaaacaacatacttggcaatttcgccaagttggctttcaagcattttgactcgaacaatttcatcgttctctaggttcaggagtttattaacctaaacccaaaacaaacacagaaaacaaatcaaaaactaacaaataaaatgcataaagatgaagaaggctcctactgttttttcttttgctaattctagaataagtgatgaaaatctatggcattatagacttggccgcttcttgtgtaaagaaccacccattgaataaaagtttaaactttcaatactctcattgtcatgatttttgataactctatgaaaatagagttatttatatctttttgagcattaaattagctttgt

SEQ ID NO: 78323 - DNA, 1571 bp, Cannabis sativa
catataggtggcagaaaatacatgaaaagctttcaccatgatttctgtaatgatgacatttcgatcatttcaaattgaaacattttctaaagaaaacatgttaacacattccaggtctgatttaataaggcagaaaaagaaaatactgttgtactgttatgtgtggggaatttactacatcgaatgatgcaaaattgttatctacattttcattcaaggcaactaggattgagatcgagatcctattaagaatttcttaaatctatccaatacatgatactgatctattttaatatactagatcccatatttaacatatatgtgctgtacaagaagcttggtagaaaacgtaatgcttggatgagaagtttgagcatcaggactctccagaaaccaatcaatttcattcgtttcgtctgtaagcaaagtagtgttcttaaataatttaggaaaaatataaaggtatttagaatatgcacataccaattgaaacaatcagatggttatatggttgaggccttagttcctctcctattacacttatattgggggctaagtccctgaagacatcatcttgtgtaacagcaactgcaaagattaaacacaagggtttggtcacaaaaaaatactaaaatgagagaagcaaaaacttatccaaggaaaaataaatatagattttagtagtagttgaatcttactctagttatattgcaattgtggaagaaattggatacatcggatgcaatgtcaatacctagatggcaaatacacaatagacatcaaagctgacaaaaacaagttgagaaatgttgcaggattagtgaagctaatataaatgattgaagattagaaaatgttgacccaaagaaaaacccgaatgatagcatgcgtaccttcaattggagtccatccataggatattgcatgaaataataaagcctagtagcttttgttatcccctaggtaatgcttgatagccttcctcgacaagaacatccataccttcacttgtactccataggatattgcatgaaattcaagtcaaaactttaaaataaagattaggagctatcattatacactaggtagtacttgatataatcttattggtgaggataggcatctctgcttgataaacaataatatacaaaccaattttactaatgataggattatagtacattattaaaaaaaattcaaaattttgtaaaattataattattcaagtgcagaaaccaagcaggtacaacacaaaatgacttccctacactacttggaattctccttaaaatgttaattataatagtgtgagctacataaattaaaatattgcaaaacagtgaacatcaatgtttgacacatgaaaagaaagaaaacatcccggagttgattagtcccgagtcatagcagtcaatctgggaggagttcctagccctacactcaggttgactctcggaactccgaaatgggtgtttatgtcacatcaagttcttttcaactcaccgtctttcaatattttgaatcaagaagacatattgtggacattgtcccacatggaataaatggtagag

SEQ ID NO: 78324 - DNA, 535 bp, Cannabis sativa
  modified_base (26)..(42): a, c, t, g, unknown or other
actttatatgtgtttattttataatnnnnnnnnnnnnnnnnntttagggtgttaattaacatactgtgagtagatctaagatcctggtaaaataatatccaacactaagatacaccgagtactccagtatggtggatacttaagaaaaatgtatatataacaaactgcaacatggtccattatagaatgcccccacgaacaccttaaggggggaagttcaaaagagatccaagtaaaaggtgcaagtatcacagagaagtaggacactccactaatgaatgtaaccaccagaaagatgaaatcgagatgctggtcagagcgggacatttggggcaatgggtccggattcccatcatatatcacaaacaaggggtcgctcatggacaattagctattccaggatagcaaggtatcgtaaatcctccacaaggggtaggtcaccctcaagctcccaagatgtaacttccaacactctctgctccactagctccgactgcagtagccttattggctcttggactgggaaacccatatc

SEQ ID NO: 78325 - DNA, 665 bp, Cannabis sativa
aaaatcattaaagtggtcatatatgaccaattttaatgactatacatttaggggaaaaattatagggtattttaagcatggaatttcaaatttccctaaagattttctattaaaaaagtagtatgatacattgtaaatttgaggccacgtggcagcctattacgaccagaagaaaatctgtgtcctttctgtcttacactctttttttttaatcctctcattgtgtcctttccttctacataattattgataggttaattaaaaattttactctctgaattttgacatgtattaaattatacatttgaattcttaatgtcgttaaaaatactcttaaattattgagattgttgaatttaaaaacttttgtttaatttcattcaattttactatttcagtaattgtttatgtactaaaccatgctactcagactttgatatctactaaatcatgttcctcgaacattgatatgtactaaataatacccttgaactttcatccatgttaaacttttttactaaaattgaaaaaaaaatccttaaattcaacaattttaatagtttaaggaacatttttaacgaccttaaaaattcaagttacatgattcgatatatatctcaagggacaaaaaaacctaattaccttgttaataaatcaaaacccca

SEQ ID NO: 78326 - DNA, 1918 bp, Cannabis sativa
tatatatatattactacactaaccagcaagtttaggaactgaactccagcaaccaacaccaaaatgagtaatgtaattgaacagtttctcatcttcttcaggtgaccataaaccttttcttaacttctgcttcaaacagcatgaatgtcgtcccatttttttttttattgattgtgatcaagaaactgatgtgggtatttgtctatatttatatatttgtgaggaatttgatcactctgacatgagaaaaataaatatataagctttttttatatatatattgaggtgggaagagagagagagaaagggagaggaatatatatgtgtgtgtgtggtgtagctatcgttttgaatttgaaagaagtagaaaaatcaagaatattttcttatgatttaaagggaacaaagataatcatacttagaattcaagtcataatagagagaagaggaaaaacagagctaagagagagagagagaggaaggtaaagcaatcaagtgggttttacgcaaatctggtactactgcttttttatttttttaattattgattttaaaaaactggaatggattgatttttaagaaatctctctctatatataaatatgaattaatataaagggaagtaaaatgatatgttttacatataaacgtgtggtacgtacttatgtatataattaaacaatagttaacaaagaaaaaaaaaatgggaattgttgtaaaaaagtgagtattgttataattatggtagtagaagtagtattaaagaaaaaaaaaagtagtattatatatatatgcttctttattcttagtataattaaagctcttaaactcaaatgggggacctttctttcatttactatatataatgtatatattgcttgcataaatagaagaccttaggatgtttaatatatatatttaattgctcacatgtgctaattatatgctgtatgcctttagaaccactcaccaatttatctattaattaattaactaactgagccctactactaattatgttgagtatgattaattttttgaactcttttaatatactagttaaaaattcatgaaactctttatgttgaagcagacaataatatatgtatatatatagacaaatattcatcatattttgttttaagtttaaaatttaattatcagatgaagataagttataagttattttcaaatgaaaatgaaaaaaaataaataaataaagagagagaagaaggatgaagagtagaagaaattatgtttcattatttgttaactgataaaaaaaaaagatacacatagcatatatacatacgatttttatttttattttatttttcgcaaggtacatatgatttttctcttaatatttaaataattggctataaaacatatgcatacaatatgatacatatatatatatgtataattatatatataaaaaattggttagccatatagtattatgtttttataattgttttcaggcttgcttgacagctactgtatgcagtgcataatgcatttgaggcatggaaaataatatatattttttatatataatcatatatattatttatagattttccaattaatattttagaattataaaatcagccgacactattacatcaaaagctgtgggctccatatatatatttgactcttaagaattagataatgcgaaaagaaaaataaatcaacatagagaaaaagaaatattttgaaaagaaaacaagaagaaaatgaattaattaatcactcattttataaaaaaaaaaaaaagaaacaaaagaaaacaaagaaagaaaaggaccaatatggtatcaagagttttccttttcctttttatattacttttggtttaactatatatataaatatataggagaattactttatatattattttttaattatt

SEQ ID NO: 78327 - DNA, 533 bp, Cannabis sativa
gaagattctcatttaacacatccttatgttggtaactgcgctaacatccctcatttcaaggagctaaaactcatgttggtaatcgtgccaaaatccatcctttttaaggagccaatcctcatattggtaactaggccaacattcctcctattcaaggagccaatccacatggtggtaaccattccaataatcctcctctacctgtaagagttgattatgctatacaaataacttttgaataacaataaaatgaaggagtataaatctgctgaagaaatagagccaatcttgccttatatcttagcattaccttaccctccagagttttaaatgccaactacaatcaagtatgatgggaccactgaccctggggtccacataagtgatttcatactcttatgcaagcacatcaagtggttagagatttgaaatgtgttattccttgctaccttatatggagctacatcctcgtggttcaaaaagtttaaaaggtacttcatagtgtcatggatccaactctcaaatgctttcaa

SEQ ID NO: 78328 - DNA, 2002 bp, Cannabis sativa
ctctctctctctctctctcactagcagaatcaaaaccccacgaaacccacccacaatgtccctctctcgtctcactctggatctccctttgaagccttgaagatgaaagtcatatccaccaccgaaggtagccatctaccaccaagaaaccccattcggggcggcatccaccaccgatgaaggacaaccaccatgaaaccctcattcagagggtcgtccaccaccaagaaacccctattcgagctccattaccgatgatactttctctctcttctctcgatttgcttgggccaccaccggtgtaatgaccacattttagaatatggattagtaaaggcaattagcattaattattaatatttttataattgtttatgaatttatttaattatgagttccattcttttaagtgggcactaaagttataatttctcaattctagagattttattaaactctagaggtattatttgtactaaatatagaatatgcaatttttatgatttttgctcggtgacgacggaaaatgcgatggatggctgttagagtcacatgggtaagtctagaacctttgtatttatgggattaatatttgagatcaacagcataccagatttgagcggggttgtggtttttgagtattttacccctaggcttgaattagcttaagtttaagcatcaatagcattttagtcatttggctaggggattatgtggccttttctagagctagacagctggtttttggaaattaattcagcatatggtttatctatttagaagaaaataaaaaaattaaaagaaaaaccaaaaattaagagaaaactcatttccctttctctctctttgttcagctcccacaagaccagaaggaacccaaaaattttccttttctgttctgaggattcagcaggaattaagggtgattcaagttgagatataccctagaacctcttattttgtgaattccataagttttagttggttttggcatgtagttttgaattgttgtggctgttaggatttgaatgaattgtagttcgatttttatgttcactttgaattagatttgagttctagttactggtttgggcgattggtgtggtggatgaaaaagtttgagtttgaaaactcaagcttggttcatccatggcatgttttgattctgggtatttttctggattctattacttggattatattatttgaggtcaatataggtgttctagaagttttggtgaggtttagacatgttttggacaggatttcgactgcttgggaaaacctagtgcagaccgattaaccggttttccaggccctttaaaaccggttaaccggttctgggacaggtttcccaagcaatctattttgtcgatttgtgttgttttcagagccttggctgggtgattccttgttatttagggtattgtagtttcaattatcaatattaaaacctttagttggaggtttgagttcccgaattagggttttgggcgtgtcgtttacccgtttatgttatgtgattagggcatccatccaacacgagactttccgttcaggttggccaactcacttgaattcggaaacaagataagaatatcatagaacatattgtatatttgtgaatgtatatatgtgtgtgatacatatatatatatgcattcttgatgtgattcatacactaccaacacttgtatggtactagtacagagtgcattggtatagcgtataatgtttaaagagaatgttacggtgttaccaacacaagtatggaaaagtacagggtgtgtgtggtacaacacttagtggtactcagggtacgagataaaccctaccaacactcgtaccatattggtacgtaatgtatatggtatagtggttgtactctagtaaataacatttttactcatttgttaagccttgtaaataggtataagggcgcctagatacaaatcaacattatattatctgttatatgcttttcttactgagtctgtcgact

SEQ ID NO: 78329 - DNA, 794 bp, Cannabis sativa
tagttgtgccaactaccaatggtggttttctttttttccttttatagaaaaagaatgtgttattgttttacttttttttaattaattcaggaaaaaaaaatgtaccctttaattcaaaaaaaaaaaaaaaagaaacaagaattgtaccctttaatactagttttgttttgtttcataaaatggcctgattataggcagcacatgccttttggaaaaataccctgatttttagaaaatttttatttatatagaggaattttcattttaatagtttttaaagtataattttacaaaaatattgattttactaaaaaaattattttacgaaattttttagacaaaagttaaataaatagaaaaaatacaataaaatacttgaatactttcttatactaactgtatacccttctggttacttggttattctttcttgattttcccatatatattttttttaactttttctttaattttctcataaaataatctttttagagaaaaagaccatatatttgcacaaaaaagtataaaaacccatacaatttataatttcatcttttatatgtaacaatcttctcttatttttcttgggccacagccatcttcagtcccaacgctccatagcaagctaccttcctaagaatagacctagctcgtaaacatagattaatcaaaattgtgaaaattacaccctatatgggattctataaaaaagtttcataaatatggcttttttaactttaccatctttatatggcatttgtccaaatttaaagatttttatggtatttttt

SEQ ID NO: 78330 - DNA, 3406 bp, Cannabis sativa
  modified_base (46)..(48): a, c, t, g, unknown or other
aagttcatgtttaggatgttaaaagcatacttgttagtaaatctannncctggtaaaataattccaacatcagactacacagaaataatgaggtgattgaactccttttcaactttggttttgaaattaatgaatgtttgtaagacatcaaatttggcgcttttgaaagaaaatctaagtgtacctagaataggcatctataaaatgaatataatatttgtagccagatcatgaagtcatgggagagggacctaaagatgaatatggataagttacaaaggtttggtgaaaatagtgcctgatctagggaagggaactttatggatattcccttcacaacaagtatcataaaaaccagtaattgttttatatctttgaagaatattataaaggtgcatgataggttgtacaatcttaggagaaggatggacatgtttctgatgacacaaggaaaaattataacatgaaaacataaaagtcaaaatcacagttaaggaagtaacagtagagacaacattgagatatattgaaggtctaagcagacttggtgatgtgtaattgaaaaggctctacgatataaagtcctggcttaagttgtcctgttaggagtgtttccttctaatcctagtctttcacattgagattagatgttttgcgatatttggaacatgtaatatatgatttaaaacaagtggtttagaaaaagagatttaagtggaagagtgtgtgaccaatgttttgaattcacccatatgcacttgatctgaaccaacataaggttgcttgtgagtgatgtttgaagtgtttgtagtgcaatgattggtagtacctgagttagggtaacaagtatcattagcaacactatatgcagtagcaagttgagatgaatgtttaacaatattagctgcccaataccaaggaaatcaatgttgaatctttgatagaatcttgaagtaatgtgacacattggtcatggtcctggaatcatggaagaattatgaagtgaagtagttggtgtggatgagctacgaccaacattgtagtcatttggagttgaaccagatgtgttcgatcttagtcaaatagcatggagtccaaggtccacggcccgaattagttgatgacccattatcgatgatagatttgttctctacattattagaaaaggaagaaaagttttatagtttcggaatgaaaccaagattgtatcaaggttaacagagtccgaatctttattatgattctccattaaattttttgagccaacaataaagtttcaatttcaacaactgagtattgatcattttgtgacttaacagagatgacaaatgtgtcatagacagaaggtaggcctttacaaattgcagcaatatattctttcacagtgaccttgtgaccaacatatccaaatcgatcaacaagtattttaatttgaagcgagtattcatttacagagaaagacaaagagagtctttcttacaattttcaagttgattggtgcatagatctatcttagttgaggtttgagtaatgaaatatacctaaagtattttccaaatctgtgttgaagtttcaactccaacgattcttgtcaaaattccatctgacatcgaagagagcaaccatgagtacaatagttaatattaaacctcctataatttgggattgatctatccacaatcttcatcttttggagtgagagacttgcacggaagctgaatagaatcagatatgatattttaaaagtcaatgataccaatagctgagagaattttgggacgtcagagaagaaaattgttgtcttcaagtttcaatgatacttcatgagcaaaaataataggattgaaggttggggttgttggagcgaccattgaagctagcagaagtgaatagagaatggagataaagaataagacgatcgaagaggacaatgcacggaagcagagaaaacaaataaaaatactctgatatcatattgagaatgagcgtgaagagaagaaaactagttggaatgaatttcattgattatttattttgaccaaaagtgttctatatatacaacctgacaagttagttaacagaaagtatgtaactaactacagttgtacaaacagaacatgtaacaaactagaactaactatatataattaccaaataaccttatctaatagagatatgtgttttttgtcgtgtatcgaaagtcttcatgataatgttgaaggtcatgcgacaagttttattggtaataaaggcggtacaagatgattttactagaggggaaggtacgagtacgtagtcctttgtttgagaggagaattattgaggtatcaacccaaataccgcattagaagaataaacaaagtaatcttcaatataggtgttccacctactactattaatacgagatttttttaaaaaagtgtctaaaaataaaattatgagaacttaaaattaaagcgaataatatcaaatatcatacagtgaaagtgaaggtaaattgattgtccaacaaagtgtgtttatatatatatatataactatagagaaatgctaaagggcacccgtgatgcctagtattttcttatagtatcgggtcctaaatacaacatgtcaagtattttcttatagtatcgggtcctagtattttctttagtttttagggagtatcgctagctattataatacaacatgtcaagaatgtgctagacaccactgatacctaaaagaatgctcataactatataaacaaggtgtatatgtattaaaaatgcatgataagctgtttggcccacgaccattgcatgacgaaggtgcccccaacagaaaagaatattaagaaggtgaagagtcagcatccatccttcaacgtttctatgtgtgttgcgaatatatagtaacccttctaagttgagaatgacacgtcaacaaaggctaaggtgggccataacttcactcgacaattactaataataaaatcagaaattatattttatattcatatggccaggttcaaattccaaaactacatgtatatagtaaaacctactacactaacgtcctcattattatattgactaaccctcccaacttgcttgcttttcttttaattaccaaaccaataaaattgtatgaacgatcataacccctttttcagcttaattttttcatccaaaattgatgaatataataatagtaggaagtattactctcttccttgctttataatatatatgtatgtacttctaactctaatacaatagaatatatatttatagagtactttaagataagatatcctgtcttagccagaatctgagaataatgggcatataaataatgttattgtaagggactggaaaggaagcttttcaaatgaaatccagaaatggatacaagggagagattt

SEQ ID NO: 78331 - DNA, 919 bp, Cannabis sativa
ccaagcgtctaaaatcaatcttaaccaatcgtaaaatcagtttaaaaaaaatttaaatcatcatcaaattcgtacagaactaatttcacaaaaacacccacgtgaaccaagctttttccttcaaaaacaaagagaataaagacttaaggcttaccttggtcttaagattcaatttcacttcaaaatctatctgaaatccttattgaatcttaaagaaattagcctgaaatttgtttggtaaaaatctatctgaaatccttgttgaaaatttgtttgttgtttggttcttctagggtcgaaagagggagagaatatggagagagaatgtgactttggtttgaagtctatctattcatttttattaatctttacattaccgtaattttctaataattaatattcaagatacaactctttttattctataaaaattcatttaaaaaatagataaaaataacataactaaagtggcaaatgtctaaaatgtcctttatttcactactataattaacttccataactaggggtaaagtggccataactaagtaccccgcataatcctaatattctaactattcataaatctagctccactaattctaagatactaaattgtatttagtgacactattggctcaaacgtgagatttctattattatcgggcataaaacatgaaaataccaaaattatatataatatgtatgacacacatagaattcaataaaaattttgtaatcgagaaattatatatcactaatacatttttctgaaacagaacttgttttttactataaataataaataaatcattaataatttaataatttttatatctaattatgctgttattataataatattttatttggaatctaataatatttaccaaaaaaaaaatacatacacatattatgctaa

SEQ ID NO: 78332 - DNA, 732 bp, Cannabis sativa
aaatattatattttagggtgatgtaaggttttatgacaacttggagcatttgcattggagatgctctaagcagtagagcaccaaaattaaagagggaagtgtatatttttttgtcctgtctattgacatggtgtgagagttttgttttgttcttttttttttttgttttttttctgtgaaagattgttttagtctcgagtgattgaatatggccagttcgagtggggtaggaggaggaggcagtgaggatgtattcaattttcagattgaagaggaagatttatctgagttgacagtcagccatgagggagaagaagaggggattgatgacagatggtgcctagttggtagatttttgtctcatcgggtgatcgactttgataaaatacaaaacattttagcatcgttgtggcaaccaggaatgggaatgtttgtcaaaaagcttgaggagaaccgatttttgtttcaattctatcacgaagtggatatccaaagagtcattaacggtagtccatggacgtttgatcggatgcagctaatcattcaacgtttgccggtaggaggggatccgaatataattcagttaaatcatcttgatatttgggttcaaattcacgatgtcaaacctgattgtatgaaagaagctactgtaagaggagttggtaatactcttgggaaatttgttgagaatgatcctaacaatttcataggtgtttggagggattaccttcg

SEQ ID NO: 78333 - DNA, 974 bp, Cannabis sativa
gaactcgttcccttgaagcaatagtaataggtgctacttgctttttcatttaggtttttttctattctatgagagaaactatgaaaagcttgtagctaaatatggtatattgttggagaaagttatgtgagtcttgtgtgattaactgtgatgagtcttaacagacctgtaatgattttgcggaaatgatcgcagatcaattgaacatctaagggactgagtttatcatacaattctactcttccattagtaattgtaagtggtgtgttgaatttataagtagtatgtaattgtgtagttgttaatggatatgaaatggaaaaaaaaatagaactttggttgatttgggagatttgtgttatttcaattaatgactacacaattactttatttgtaggttttatgcacactctttacaattactaaaaaattctctattatttttgtagtgtaacatattgtttgattttattatcttttgttttccaagttttggcttcatgttttcattgagaagcatacattaatgagtcaaatcaaatttgtgtatgttgtttaatgaagccaaatataaaatgttcccctcgctatccggtgtctacttttaatgttgcatttggacgttgggaaactacaattttcaacatttttgtatagtcattaaatccttttcatagtggttttgaagtgtgccaagaatgaactctggcttggaatggcttgttttagttattgtttcataggttgaataaagattttgttagaaagtcaagagtccttattcttggcaggaaacatgagtttttaggaaagggtaaggagaggacagtaaatgattttagtatttttcattgtatggtattagtacaaaattgtctggctgatgacatgttatatactctaatttccctatcattttatgtacactaaagtctgtaaagtctctatggtgattattgtaggaaaaattgctt

SEQ ID NO: 78334 - DNA, 558 bp, Cannabis sativa
tagtacatacatgtgttttaacacgttgaacacctatgatgaagatatagtaattcttcattcattaaaaaaaaaaatgttttatctgattttttttaaaaaaaaaaaatagaaaattatttgctctattggaaactccaaccacccctaaagatataaaagacactaatttgtcatactaatgttacacctttttttaattccttaattatactaatttattatttattttatcttccatgaaatgaagatcacataccatcttctttttcggaaaggttacttagtggggttcttcacaatcacattaagaatttgataaatgacatttttcttcctttttaagaatttgatgaagaatgcactttatgaattgaaattagtttttataattttatagaaatattactagggccgcaacgctacctaaatgtatcaaccaattcttacatattttaaaggcttgttcggtaactattttgttttttgtttttctttattcaccttaacaaaattttataatttgttcttagtttctgattaattaaacagaaaact

SEQ ID NO: 78335 - DNA, 520 bp, Cannabis sativa
ccctatagcgtcacctggaacagcgtcggtagcgaatttcaccaaaaccgacgccaaaaccccttaaaaactgcctctaaagcccaattttgtagtagtgtattctgatatacaattcttttatagagtttattaatatctgaactcattagtctaccacaccatcgatctatttgaatgatttgtctcaattcaagaggaagaactcgtagtagacataaaaccacaattctaattttatatttcttcgaataaaatatttaattaattccatgtgtctagctaaccaaacattttttttctttcaacctttcgatcttcccattcactatccgtggtccttcttcccccaatttttttcattttgctcatgaataatctataataattctctccttcaaaaaaaatctataataattctcaaatctaaatccactagtaatttttgaatagcacatatgctcaagtagaattttttcgaaatggcattgaaaccataagtagtaatcaataataataa

SEQ ID NO: 78336 - DNA, 1269 bp, Cannabis sativa
gtctttacttactttggtaacttagttacataatttttgtgttaataatacttgaaattttcaatactcaatgttagtgatacttgtaattttcaatgcttaatggaaattactctaatttataatttattctattttttatgtctttcaaagactattgcagaagatgttacacctttaattgctcttcatatggaagattcaatattttctggactcataaacctattaaccaattttggtgtatcactccaacaacagatttctattctaaccaatctgtcatcacttcaaatactactcccaaaaatggtgagagccatttatgaaggcattagttctgatgacatgaataaacaaattattagagttctctcacattgacatcacttgcatttgttgtgagtctctcacattaagatatctcacaaccaaattttcaaaaaaaccaaattttcaaaaaaaaagaaaaagaaccctttttaaaaaatacaagtatctttaggaaactacatgaaatattcaataagtgcttcaataaaatttgatacaagaaatgaccagatttggttaggtctatttatgaattatatattttatatttttctttgagcaatctctagttaatttcgtattaaatttggtctcatgatgaatcttcaataaatttagtttatttatttatgataccttactttgaatagtctcgaaaattttgatctttttttcctgtaatagtatatagtgctactcggtttctcaatttagtgattacttttctcttttaagttaaaattggattcaaatgaaaatcaacaaatttaccctaattcttttaggcaaatttcaaaagctaatataataagtcatacaatcccacatagataaataaaattaaatttgtattcaaatattcttatattagtattgaaatttgtaaattttgcatggatttaaaattactactacaaataactaataaataaaatactgattcttataggataggagaccatgaccataagcttcaacatattttgatccttcaagattcttccgaatccgtgtaaaccccattcggtaccccaactgttctgcacaattcagtagtgaacttctcttcttttgattttgtcttgcgtttgcttttttgggtaatacgtcgttataatctccgtcccttctccaactatgacttcgattagtatacttgtgactttggttgtagttgtgaatgtgatgatctcttgtaatacaattccttcagtt

SEQ ID NO: 78337 - DNA, 571 bp, Cannabis sativa
gcttcattgttagaagttgggaatgcaaaatgcagggttgcctggagccagagtccatctggcgatatcattgctatcccagcaccagatccgtttttgtttgatgacccatcaacgaataccttccatgttggggttcgcactactgggatgcttgaattagcttctgcttcattacatttcgtaatgaagtctgctaaggcctgtctttttatggaaatgcgtggtacgtagtgtatgtcgaactggctcaactccatggcccatttgaggagtcttccagacgctttcgacttctgtaagacttgccaaagcgggtgatttgttagtcttttgatggggtgagcctggaagtagggtctcaacttccttgaagccatcaggaggcagaaaactaacttctcaatcaacggataccgtatctctccccctatcatgcacttgctaacgtagtacactggatgttggaccttgtcctcttctcggactaaggctgcgctgacagcattctcggagacagctaagtatagtaaaaatcttcttcgttaactggcttcgatagaatcagtgg

SEQ ID NO: 78338 - DNA, 572 bp, Cannabis sativa
gtagaatattatttattaagattttaaatgttaaagtgttttttttcaacagaaaaaaaaaaatgatgtggtgcagatctcttcctcactcttttgatagtttagataattttgaggaccacgtgtcagttataggggtcttagataattctggggatcacgtgtcaattataggggtcttatagctcatcttcctttaattgagttatgagtatacacctcgagagttttcatcccattaagaatgacactatcccaacaagctagcctcttacaaaaccaaacataatctctcttttgaagagttgtagtgagattcaaacccttacttgaataagaaacgatattaataaaagacattcttactactacaccatacaaaacctgccactacaccacacaaaacttggttaaagtttattttaatgaaaaagtgaccaatttattttaataaaactcctttttatttgattggttcaacttccttggtcttcaagcacaacatatttgtgtagtttgttgactcactcactcacctctcaagttgtcccaatcaaaagagccgttcttca

SEQ ID NO: 78339 - DNA, 1067 bp, Cannabis sativa
agaattgagccatatataagaacatggactactccactcattgccaattagttttgagttggaatcccatgattctcaacatggtatcagagtcatagagaattgtcaattggttttgagttacttaagagtagtcgatcaacaactgctctaaagtaaagaatctgtaaaaaaaaaaaaaaaattgaagaagtaactataaagattaaagatgtcttcatcagctactttagtttattcaactcctttattttaaagaattgagtttgtactctaaattggctccgcatgtagtgaaggaattaattaaacagattcttcaaaacctttttaattaatattttgttgtctacattgtattttttctctcttttcaaggaatttaatgattattcattgttgattttttataactatttaaatagataaatgataattaaaaatataatattttgatattataaaaaaaatatatatataaaaaactaatacataatgtaatgtaaaataaaaaacgtgaaattttaagttaaagtagaaattctattggaagtgctcacaacaacaaaaaaaaaaaaaatgaacggtaaaaaaatcatttttacattctaaattatttagaattttttgaaattttataaaaaactctttataagtacattataggtaactgtcatataaaaaaatagaattaaaatttatatactatggttgtaaaatatgttgaattgtgtgcaatattatatatatatatataaaatattaaaaatacatacaaataataattaaaaatgatcactaacaacaatttttctatatattttatgccatgagtacttaattattgggagccgttgactatttaatttttatgcattgaaagtcggtgttgattaactataataatgacatgtagtatttggaattggaaagtgcctctaatcaaatttcttgtttgtgtaaatatatgctaaaaagttatggatcacatgttgtctcttgataatgaattgaatttgatgtatgctgctcacgttagttgtttgtttatgaatattattttctat

SEQ ID NO: 78340 - DNA, 9903 bp, Cannabis sativa
agagagagagagagagagagagagagagagagagagagtggtgggattcatttagtttagtgatagactgactgatagtcatagaaaggagtgagcttaacagctcgaggatctgaaagaaagcttcactctttataatatttttctcacatataacataaataatttaaaaagggtacgctttttttttttttttttttcatttttggtgttcgttcattcttttgctatctcatcttttttcacattggttaactccaaccctcctttcctgaaaatggggtttttacctttttggggtgggaatatatatatatatatatataaatattttccatttctttcttaaatctcttttcagaataatactctctggattgaattagatagttaaagtctgagactaaagtttctatctttgtcaacttttttattttgtcctggtgaaaatccttgaccctttggattgaagacatttctgctttctccattcgtgtcttatttttaattaattttcttacccttatatgcaggtttggtgtttacttcatttgcctgattatagatagcactaagaacaagatttgggctagccagaactcaaatgataagaactgggttgtttgatttgaagcctacagatgagttctgttgataccatggttgagatttgaatcccagtaagtactcagatctaaactataattgaaatactattctattatgtttgtttctgtgatgtggagtggggcctctattcgatgcttatttatatattaaagagatgccttttagatctattatgttttaaagttcatgctttccatgtcttttcaatttccttttctccattcatgaagtttctttgtgttaggataacttgtatatttcattttagttaacatgaataatgcaagcttaaatatttgataactttcgaatgctgccatctccacccattttaggcagttagtttttttttttcgtatttggtgagtttttgaccatttctttaagaatcttcccgaagcatatgggaatatcatatgcagctaggttttggtacttggttgttttgcattccatttctaaaacatggtttgttcttttactgtagatgtatgtgaagtgtttgtgctatttatcaagtattgaccattgaaatcagctacatgaatataagcattaacttctttgtacagggtcttatagttatgttacttactcaagatttttttcccatttcagagtagttcttggtagttggagattgtgtgtatataatttggtaggtgaaaaaactagaaaattttgtatagatggatctgggagaagatagcggcaggattggctcagtaccagtcaccacttcaagaaatatgtcatcatcatcctcacaattcttttcagcaaaccagtcacccttcttttctccaagattatcttcatgtcagttatctgaatcaacaaggtctgatgctcaatgtgatggtattcttttaagtgctgatccccttagttcaagctctggaattccagaccccgaaactctagcaaatgttgggtatctgttgtcagacatgtcaccagctcctccagctgcttgtggttctagtagttttcaaaagtttgatcgaatatcttcgtcaactggtatctctaatacagcagcctctagttacagcaatgctcaggacaacagttattctgggcacagagaaagactgaaaaagtacgggaggcactatggagttacatctacgcctgggcctgtttcactctcctttaacagaatgagaagctatgatatcttcataggttttcatggacgcaagcaatctttgatgagatttgttaattggcttcaggcagagttggaggttcaagggatgagttgcttcctctcggatagagctcgccttaaaagctcccataaacatggagttgttgagagggctatggatgtttcttcttttggagtggttatcatcacgaacaagtcattcagaaatccatatacgattgaggagctgcagttcttttcagacaaaaagaacttggtcccaatattttttgatctaaatcctagtgattgtctggtcagggatataattgagaagagaggagagttatgggaaaagcatggaggagagttatgggttttgtatggaggattggagaaagagtggacagaagccgttcatggcctttctcgagttgatgaatggaagctcgaagctcaggatggtaattggagagattgcatactaaaggctgtcgcattgttagcaatgaaattagggagacgaagtgttgtagagcggttatcaaagtggcgagagaaagtggagaaagaggagttcccttttcctcgaaatgaaaatttcattggtaggaaaaaagaactatctgagttagaatttatactttttggtgatgtaactggagattcagaacgagattactttgagcttaaggctcggcctaggaggaaaaacttgacgattggatggggtaagagcagtacatttgacgaaaggcgaagggagcgacaacacgagagtagaaggaagggaaaagagcctgttgtgtggaaggaatcagaaaaggagattgagatgcaaagcactgatgctcctcataaaccgcaactgcccaggtcaaaaagtagtggaaagtacccaaggagaaaaagatcaacaaagattctttatgggaaagggattgcttgcgtgtctggagatgcaggcattggcaagacagagctacttcttgaatttgcttacagatatcaccagagatacaagatggtgttatgggtgggaggtgagagcaggtacattaggcaaaactatttgaatctctggtcatttttagaagttgatgtggggcttgaaaattgcacagagaaaagcagaattagaagttttgaagagcaggaagaggcggctgtttcaagaattcggaaagaacttatgaggaacattccatttttgattgtgattgataacttggaaagtgaaaaagattggtgggatcacaaactggtaatggatcttctccctcgctttggtggagagactcacatattaatatcgacacgcctttctcgtgcgataaatttggaacctttgaaactctcatacttgtctggagttgaggcaatggtgttgatgcaaggagctgtgaaagactattcaattagagaaattgatgttctgaggcttatagaggagaaattaggcaggtcaacattggggctggcgattgttggcgcaatattatcagagctcccaataactcctagtagattactggagaccactaacagaatgcccttgaaggacttttcttggagcggtagagaagctcatcctttgaggcgaaacactttccttttacaacttttcgaggtgtgcttttcaatattcgatcatgctgatggaccaaggagcttggctaccagaatgatccaggcaagtggttggtttgcaccttgtgcaattccagtatccctgttagcccaagctgcaaacaaaatccccgaaaagcataggagaacactgctatggagaaaactgctgcactctttaacatgtggccttgcttcatcatacactaaaagatcagaagcagaggcttcttccatgttgataaggttcaacattgcaagaagcagtaccaagcaaggttgtatacaagtcaacgagctaatcaaactatatgccagaaaaagagcagtaataggcgctccacaagctatggttcaagctgtaatcagccgtggatcgatatccaaacaccctgaacatatatgggcagcatgtttcctcttatttggattcggtcgcgaccctgtgattgttgatctcaaggtgtcagacttattgtacctcgtcaaagaagtggtattgcctctcgccattcgaactttcttcatgttttctcgttgcagcgctgcacttgagctcttgcgcttgtgcaccagcgccttggaagcagccgagcaagcttttgttgccccagttgagaaatggttggataaatcactttgttggagaccaatccaaactaatgctcagttaaatccatgcctttggcaggagctggcactgtcaagggccatagtgttagaaactagagccaaactaatgctaagaggaggacagtttgatattagcgatgatttgattagaaagacaatctttattagaaattcagtctgtggtgaagatcatccaaccaccatatctgctcgagaaactctcagcaaaatcacaaggctccttgctaatgttcaaaaccatacttcaatatagatttccaatattattttttattgatctttttttgtaaccaaagttttactcagaaatcatacaaatgtctcaaataaaactattgattataccatttccagaggggcctatttatttcaatgccacatacttcgaaataattttttttcattgtatgatttttcctttcttttctttaatctcattttaatccctcagaacaagtcgtaaacgtatagactatagagtactaaattttaaatgttgacttaactgtatgccttgttatcattcgaaaataaatttgtatgtttattttttttctttacacttcataagtattacaatttataagacaatttcttttttttttttttttttttaattaataataaatttatataaaaatgaaattaaatttatgactcctcgtaccaaacaggctgatatttatttcgagatatactgcacaaaaaattatgacatcttatcttactgctgataataatatgtaacagtaatcaagtattgacacgtgtaaagttgacagaagaaaagtcaagattctcggctaggcagtaagcagtgattgtttcaatgataactgctgttcttactttcttgtcccaataaggacaaaatataaaaatacaattgataacaaaatgatgtgccctcacgcaggatcgaactacggaccttcagtttacaagactgacgctctaccactgagctataagggcttcttgcttacattattctatatttattatatataattttgttgaactctatttagcaatgcacattggaaatttaacttgatttggttctagtttgactctccattctggtgtgtgaaaactgaaattggtgcaaagaaaaagaggaaaaaaacacaattaggtgaattatttcactcagaaatataactgtcactaatttacagaaaaggggcaaatcccccaagtggggcattcatatttttgcttaaattctctatttatgttttttttaatttttttttttgcattttccaggagtaggagaatattataataatgtacagatagacaccctgttaaaaaaaaattgtaaattgaacatttgtattgccactaaggatcagcttttccaaccactgcatcatcatcatcactagaagcatattcatcttcactcagatcatcttcctcatcactagatttctcctcaacagctcctatgtcttcagacttcgcatatttctcacaatattctgttttttttttcaagtattgacacagatgttattatacagcttcaaaaagagaagttctgatatttgaagccaaaccaaaatccagacaaaacttgaaccatttgagttttatctattctaaacatgaaaaattttactcagctagtgatagcccaatttagtgctaatgattgtaaattctaatgttcaaaaaacataaataattgtaataatatgattaaatgaataaagcaaaaaactttaaggtcttatttgaaaatttctaatggatgactgcccatgacattggtctttgtggaaaaggcaactctactgcaaaacaagttatttataaaaccaatctcctataaggcagaggagaatcaaactaaaaaatttgtgttttattgagttattatggtgaggttcaaaactatttgaaatttttacacagaaaagaagtccatacacttgagaacataaaacaaaacatcaaatgaatagggaagtcacataataccacattgcatagacttcaaataaaaaaagttgcttagacaacaaaagagttaagaaaacaatctaacaagacatgcaacaaaaaagttgtgaatgaaaaatgggaattgaagaaagttgcgtgtatgctaatcagaattaaaggtcacaaaagttttaaaaagattttacctttaactctttgatcataggcagcacgatcacgcatcataagggcagcagcgtctccattcaagggatctgatggatttggatacaaaaggagctgaggaagaaatacttcaaacacattgaccaggtctgaaacaaaattaagaatgtaaaacttaaaactgtcttgagttcataatgtaggaacagaatatcatagtagcatatcacagctttctaaaaaaccaaatagaaaattcacacagcagagaattcaaaataaaatagcctaccaaacatgggactccaagtctggttgatgacatctaaacaaactgagccagacctgaaattcgaatgataccaaagtagccaaacatgaaaatttggagtttatattagaaataaattcatacacaaaaaattactctattttctttttttttaaaaaaaaaagttataaaaagcaaaaatggtgaatgttcaacactcatgaacttattacatttcatcaacatttggatgatagattttgttgacaaagccaactgaaggagacttataaggatatgcatctggcagctccaccttaatcctccacacacctttctcataaggacctgaaacaggtttcatttaagaaagagaaggtaagtagagaaaaaaattaaggcattcaaagtctaaaatataacaagccaaacccagttatgaccacaattgctaaactgctagctaaaagaagttaagagtgtgagctacaacgtttttcacatagtactagcaaaagtaataagaacagaaatttcaaaaacaaaaacaaaacaaaacaaaacatacataagagtgatatacatatacgaatgaacaaaacccagaaaggaaatatcaggataagctgaaatatgaatacttggtttttaatcccaaattctaatacagaaagatagagaaaaatcgtaagaaagcgatgaaaattggagacgggtatggacgattactctctttaggaccatgaaaatccacaaagaactcttgtattccatcgttgatcatctcaaccttgtaatcactcatcatcctaattttgaaccaaccaaacataaataaaaataataataaaaaattacaaaaagaaaaagaaaataaataatttatttttttacagtttcatcaaatccatctctctgcgtttgcttggagaagacatctctagtctttattatgacgaaaggaagaagcttgaagctctgaagaaaaagaaaagaaagattaaactatatatagccggcttcccagttcccgcaacttcaactttttttttttggctaacttcccacaattttaatagaattatttgtatacttaaaatatactctagattaaaatttagacttccttctttcctacaaaattattattttgtttacatgttttctcctttttatccttatttaataaaaaaataaaacaaaacaaaaaaatcgaaatctctctctctcaatcactcaactccttatctctcgatctatctcgttggacaatcggacgacaacttaacgaatcacgaatcattcacactattaatgaataagtatttttttaaataatttcttaaatattggaaatagtatgtagttcttttttgtttgatttgtgtagttcttgtttgcattggtattattttgtttttttttttttttgtctaaaagagcgagatttagttttctcgcagttgttgggtgattttatagtttatcgatagtttttcaataatatatcgatgataagaaagttaaaatcagagaagaccattatcgatagtatgtcgataatttctagctaatttatcgataatttggtagaatcaggtttgctcattattttttaatagtatgtcgattgaatattgataattttgtcaaattttccattgcttaacttcacgattgtctgtcgatgggatgtagacaatagtcgaaaaattgtattctgactatatcacgatagtttattgatattttgtcgatatattttcgactagcacatattaaatattgaaaaaaaaaattattaaaacaagtaaaaactttaaaacataaataaagacaaaaagatcacgataacaatcatacaatttaaaagtcttcagagctagggtgatacatgcaatacatgcacaacgacccaggcaccaccggttcgtctctaaccattgtcattttgctacgatggcacccttcgagaaaccctgtaggagaaaagagaacaccattccttcgattgctttccaacctcttctcgttttccaccctttcatatttaaattgttccttatattttctttgctctcttccattaatgtgatgatattgtcgcttacgtttttctctcaattggatggtttggcattcaacattgataagaataggttaggggatgttatgtccttcgttagcatataagtcttgcagctagtcttcgttagatagtgagccacacactagcttagcccaataataatgcattattctacaaatctgctcgtcatggtttgatctgttacgcatagtgaaagtatgaggacagtttggagatcgagctcctacatcaaaatcaaattcattcccattagaggagaagaggagtggagaactagaattactagacatatataacttagtggagaagaataatctaaggctaaagaagaagaaatatatacaacttaggaaatagaagtttgtttttatagagtagaaaagttgttgaaatggtagagtaatatatgcctaacattaatgagcattaaatgcccaactaaaaatatgttcttggcatgtaaaatgtatttattgatggtatgtcgataatatgtcgacagtttgtcgatactttttcagtacgtattctgaggaatgttgtttgtcatcatgttgacatgttatcgatagtttggagatagtttcttgataatttgccatgagtggatttttcttgttatttttcatttttccatcttcttattgatagtatgttgattgtttgtcgacatggtaacgatgattttgtgaaaatgaaaagaaaagaaaagaaaaataagaaaagaaaggtataaatgaaatgggttaaaaaaagtatagggtgcaatttctacttttcttttttctagagattttaggcccaaaggcacaagggagaaccaattttccacatgatgcgtccaagtcaatacaccgaatttgaagctaaagaaaagtctttcatagagaaacaatcatttctccattattggggggcttttgagaaaccaatgatatcatatcaaatggaatgttctcatctccaatatctatcgttttagatacaaacaagtaatgttatacagcatttggctattttgatgtgaacttaaggagaagaaggtgttatcttttacaagaaagtttatagacagagtatgtggttgataaagaatcttactcatcagtcataacctaaaatgtaaaagctattatgcattagccaacattgaagccagctcacaaaagcccacttgtgtctcatgattttcacatctactacaattgatcacatcttatctacacaggtgtggatgataacctctgctgtaactctgtctacagagtttgacaattgatacctccatccacatatgagagagagagagagaga

SEQ ID NO: 78341 - DNA, 1506 bp, Cannabis sativa
accaaaacattcatttaaggagtaaactgtaaacttactttatatgattaatctctactaaaaaaatacataatacctttaaaaaagaaaagctaaaataccgccgaacaaaaattacaattcacttaaattttatactttaagtatttgctaaaaatgagtgacttagaagcatttttgctgatggcctcttgaatggattagcttgaatacatttcattatgaagtctttagcctcttcggaaatatggtggcttaaatcattgctccacttcacatttttggttaacatgaacaaaattgtgataccaattgcccatatgtccgaaaattgcccttgaattccatttttacccagacactctggagctaaatactctaaagtacctacaataggagtgagagtcttaaagtcatcaaccattttcgccaatccaaaatctgaaattttggctacaaaaaaagtatcttcttctctctctttgactagcaatatattttctggattcagatcagagtgaataaatcccttctcgtgaatatagttaacacctttcagaatctgtcgaatgtactctttgacttgtttagattcgtcgtaaggaggagaagttttaacgaactcaaataatgttccaccgtgagcgtattccaagaatacattgtataacactttcttattaccatcaataatattgatagtagtatcatcaccgtaacactcaataatataaggacaatcgacaaaattatcaagaatttttttttcgtcctctaattctttgctcttcgaaggaaatgcagttttaaccgccatcaacgggtggaagctacgaacatgggaaattccgtcaataggtgttggtagagtgatcattcttgcaaaatatacacacccaaatccaccttttcccaatatttgacccctagcccaaaatggaagagaatgtacactcttttctagctctactccattgtattttgccatttttaaaactctaattttctatatatatatataaaaaaaagggtgccaataaaattgtgagatatatttgtaaaatgactccaaaaataaataattttactccctttttaactcgaatgatataataatattaataataaataaaaaaaagttatgttcaaataaattctaatcctaatagaatttgaaatattttttttgaacgattatatttaagtaatatcggcctttattattattatttttaactttatattacatcttttatgatctttttttattcatatttatcttttaaagtccatatacatcacgtaattaattttagtcgaatttaaaatttactgagatattcttaataacctactataatattcttattaaatttttagattttaatttgtaatgcattttgtatttttaaattttatttatttattgtatgtttaatatttttcttaaaaaaatttactgcaaaaatttgtgtcattattagagatttctattcgtctaatttt

SEQ ID NO: 78342 - DNA, 573 bp, Cannabis sativa
tttttttttttttcagtacacaaataatgttgtatgtcattggcacaatcgccttggttcacccatctatgtacatttcatattcctttaataaaaagagagataactctattttttttactaatcagcattgtcacatttttcaattagctaaaaaaaagattgccatttatttctaatcacaattttgcaaaaaacatctttgacttagttcatatggacatttggagtccctttcatatcataagcatagaggatataagtactttttaaccatagtagacgacaaaagccatttcactaggatatacatgctgaaaaataaatctaatgttcaaaacattatccccaatttttttaatatggtttgcactcaattttctaccaatattaaagccattagacccgacaatgctaaataattaaatttacatgccttttatgcctctaaaggtattacgtattaccattcttgtgtggaaagaccacaacaaaattctgtcgttaaacgaaaacatcaacacattttaaatgtagctcgagcactaagatttcagtccaactcacctctgg

SEQ ID NO: 78343 - DNA, 2623 bp, Cannabis sativa
  modified_base (2185)..(2186): a, c, t, g, unknown or other
gtttcctttttctgatacaatatgttgatcttttggttttatttatttaaacctgtagcaagaacttgctgccatattcaagaaaattggagataagcagacttgtaccattggtctgtatgagctctaccgaatcactcaactatacccaaaagtaagatttgtaaacgggttttataaagtaaacaatacatattccttgacactactttttttgtttatctgtataaaatgttgtgaaatctatttcaggttgatatattctcacaactccaaaatgctagcgaggctttccggacgtatatcagagatggcttagcccaggtctagcatcacgactaatatttttctcttttaattaactttcatgtaaagcatacacactcgaaagttgaaaccattaattaactttgtgcactgaaattttcttatggattctattacagatggaaaagaatgctgcggctggaaggacaccttcgagtttaccgttgtcaactcctcctccgtcagctttaagtcttccttccccagaatttacacccctctctcctgtacatacaaattctctaaatgatgccaaatcattaaacgtgaaatccgatctcactaacttcaatcttccaccatcatatgtcgaagatggtagagcaaacaattccatttcttctagaggtcatgccatggaaaacacattcgctgaccaaagaaacgagagatacttggctggaggtaactactttcgcttgactattttatactttttttgcgtgaaagagacctaacaatggaaacttctcgtaaactatgcagttactagtgggacattggatgcaattagagaaaggatgaagagtatgcaattggccgcagctggtgtcaatcatgaaaccgaaagcaggcctaatgtttatatgaacgacgacatgaaccacggattctccgaacaggttcaccatcatcaacaacaacaacaacaacatcaacatcatcatgcatcatcagaacatgctaatatagacaatcccattcgcagcaacgtccttccgatggatgagaaggcattatctgggctccaagctcggatggagagactcaaaagcggaacacttgaaccgctgtagagacttgactgattattattgtcaagtattacctttacccatcctattatcaccaccattgattcccatttttcttcttctgtttacggaggaacgggagcagaaggtgtcctgtctatgcaattttattgtataaaaagaaagaaaagaagtgagtatggaattagtaaaattctttttgattattaatgttgtgcttatcagagttttaggagagttttaagtacacttagtagcaagcaaagtagcactatgatgtgctatattgcgtgttgagcaatttagcattatttgtatatttgtaacaccaaatttcattgctttaatttaaaaaagcaagtgtacgccacctttctcagggccatgccaaattttacatccttttgaatttttggttttgttttatcccaaacatataccatatatttctcgttttgtatgtatagtgaggtcttgtcttttactctccaaacctaattttattgcgaagttaaatgcaagtttatgatgatgtatatgagtagagttaggttagtctatatttttttttgattactcaagacatggagtatatgactccttggttttgatgattattattgtgtgtggattctttgatatcacttgctatgtattttgaagctttacatgaaatttcttgttaatattgttatggattttgttgctatttggttggtcttaattaaaccaaatgataagaagaaacacataataaaaatgaaagaaaaatttaaggtgaagaggaaaacataaatagctcaaccattctaaaatatatgcatgaattccagattgtatactgtataagaaaatttacacctccacacgatagattcatacttttattttactttactttattatatgaaattattgttatatttaatgtattttttgagcaattgatttaaattatttatgttattgtttactatattgaattttaataaataatttttgaaaatacaataataaaataatttcaattttttcaaaatagatattatagttattaaagatattttgtaaaattttgaganntttaaaataatttacaatttaaaagtaatttttaaatcgtttatttgatatgagtataaaataaataagtatcatttgaactttatttttgagattaaattttagagtaatttatcgatataaatatttaagtttaatttctaattgcaaataaatatcaaatgttaagttattatccatattttatttttgtattagtatatttgaactatttttttaaaaaaaataaaagtttaattaattatttggaccaattaagaattgctacgtgttaatttacttaacacttaattgttaggtatctacagaaatttcagaattattattaccgccaaaaattaaatttaaatttttatttgagttaaattaagttatttataccgcaaattactctaaattttatagggaaatttgattttctatacttagaaaatcaa

SEQ ID NO: 78344 - DNA, 2855 bp, Cannabis sativa
  modified_base (2720)..(2758): a, c, t, g, unknown or other
taaaaaagctgaaactaaatccatccaaactcagattttccaaagaataaatcccaaacgttgctttcttgacatctttcttattaaaaggtcttatgaggctaacctgttgctcaacattgagacacatcccctgttgtaatcaatgaacattaattctctgagtagttgtgcttctcttccccataaagcctctgaaatgattaaaaatgttctaccgctttcgggtagtcttctataacttcatcattccacataacagtagtgattctattttctagctttctttttttcatgaataaatgaaagtaactagtactatcctcaccacattgtaaccatgtcactttattgagaaagcaagagtaatctatgaaagcggaaacatgatcttgatttctgagattttcgtcctgttgcaaattgagattaaggggatcacatgccatgtcttcttgagctttaataaaagcttcctttctctgcttgaaaattgacacaacatcaccaatttcttccttattatatctcttcaaggcttgtttaactctcaacaattttttgacaatatcaattaacttagtagagtctaaagatccgttccagcaattcaacactagctctttgaagccactgtgaaaagaccaatggatacaatatctgaaaggtttaaaaccaacatcaccaatcttgttacttttgacaacacagtaattatggtaaaaaatgcaatcccatttgatgcaagcttcagtatttgggaaaaaatccagccatccctcattcaaaaaaactctatcaagctttgaatgaattctttctcccatttcgtgtttcttagaccaagtaaaatggcccctcaaacatttaagttcctccacatggcctaaagaaagccaattctgagcatattcaatgtccttggccaagacttgtttacctccaattctatcttggaaaccaaacatggcattaaagtctccaagaataatacaaggtttgttaatctgatccaaaccagcaaacttctcaaaaataactttcctttcagaagcagaattgctcccatagacagttgtaacaaagatttcttccacaatccccaccactttaactttgaaatgaataagctggctctcttcaaaaagctcttcaacttgaacaaatcttgactgccaaattagaataatacaattagaaataacactcctagaatagcattcccagttagggaaattattagaaatcacctcgctaactttctcatttttaatcttaatttcaaacaaagcactaagacctacattattctctttacacacctccaaaatcgttctctttttttattcatacccctaacattccaacccaaaatcttgcaaacttccattaacaatttttattggtagtgaccaattctccatcacaagattcttgaaggacctcatatccattgctcgtagaagcctttagatcagcaacaacaacctgttttgaccctctctttttaggagtaatccagtttgcaacatcatctttcaggctcgaaagttggtctttgttaataaccagcttgtcactttttttcctcatttgcatttcttgcttcttaaataacagagggcatagcctcagtttgctcctctaaatttgaatcttccttcattttaacatccttacttggattgtttttttggcacaaccaccttaattttctgctctggttctcccttcttcctccacacaaaatctttttccttattacaattagctactatatgtcccacaagtcacaagccccacacttggatgggagccattcatactcaacattttgttttgtcaattgcttcctttcattgatgtatgctattgttttaggtggattataagaaatctccatatccactaaaatcctagcgtatttaactattgatatattcaaagtaaccttgtcaaccataatagtcttgtcgattgtgctaattaaagcactaatattattcttatcccaatattgtaaccctggatcattcaatctcacccacacagggactgatttcaccattctagcagagtccataccatagtccaaggtctaagaatcacaagcttcttatcaaagtgtataactccactttcaagaattaaatccctagtttcttcatccctgaaacttaccaaagtaaaacccgagtgcattctagcaattttctcaactcccaaattaccccaaacccgtttaataaatccttcgaacactctaaacgaaggattagctcccaaaacaatacaaacaacagaatttttccagagtgaagcttcactttcaatttcatctaaatctagttttgtaactgtttgatcccctattttaattagttctataaattaaagacagattgagggagctttaaatttactccagacttccttacttgaggcttgaaaatctaaagtctccacttctttagcccaactcaccgttttgggagtttctttcatcacactccgagcttcgtcgtgatatcccccttcaagaattgcacacggatcatgaaaaaccttagcagcaggtggttcttccctttcgttttggatcaaagggaggtcactatcatcgcatccttcatcgacgatgatcttggctggcttttaaacatctgtttcttcttcgtcatgaaaggaaacagagagcttcattattattattattattnnnnnnnnnnnnnnnnnnnnnnnnnnnnnnnnnnnnnnnattgttattattattattattagggatgcacacagggcggggaattagcggggagtgctctccccgtccccatccccgttaagaattttaatcccca

SEQ ID NO: 78345 - DNA, 3254 bp, Cannabis sativa
taagtgtatgaggaactcattcatgttaatattcatttacaatgtcttactcatgaacagatttattatgaaccaccttactgactctaattttgtaaaaccatgttccatatgaagccccttttgatttggcatctcttgactgtgtcaataagctgaaccacatggtttatgcgccactatgtgaatttgattgcagctataaccacaaattatatgcccttttactgtttttttctcatgtagtatgagtcctacaagatatttaggagtaacttttagaaattagatttgggttctgtctacatagtggatacctaccatgtgcgcgtctgaattatgatttagacaatatctcaacttccatatgcattggccccatttgtggatatgtatataggccttaggttttgtatagtttgaatagactttgatttggtgcagctacatatttttataggtttctttcccatttctaatttggtgcacttgcttgttgttgagagaaatcatccgtattagctgtccacattgtggggcttactttggtccttctacatccttgcatagcagttttatctttgctgaactatagaggcattttgacatgctagaatgcctttgagacaaggcatgtgaaagcatgttccacctttattagacagcaatatatgctatggcctacaacacacttcaaaatgcaaaattagtggcctaatttgtgtttagtctctctttcattcttcaatgctttaacgacttgatgtccttttcccctccactccataaacactttttatgtctctactcattaagtaaaacaggtctacagatgttaaaatcttattcactagaccaatgacttgcagttgaaacttcttgttatatcacttcatcactatgcataagaatttgatcgtataactgactttgctttcacttactagtatgattgtatttgctttcattgttctcaacataacattgacttgttgaaatgtggaaaaccagctgttgcgggtaaaggtttcatagcaaaagacatgggcttcatcaacacagcagggccacaaaagcaccaggctgtggcatttcgatcacagtcagacttctctgtctactaccgatgctcgtttgatgcattccaagacactctctatccacactcaaaccgccaattctaccgggattgtgatgtcacaggcacaatagacttcatctttggcaatgctgctgttgtcttccaaaagtgcaacattcagccccgccagcctctccgcaaccaatttaacaccatcacagctcaaggaaagaaagaccctaatcagaacactggcatttcaatccaaaagtgcagtattacttcaaaggatagtaatctcactgctctaacataccttgggaggccatggaaggagttctcaacaacagttatcatgcagtcagatattgggtcgtttttgcaccaattgggctggaaagaatgggtcaacaacgttgaccccccaacaacaatattttatggtgagtaccaaaactctgggcctggtgcaaacgtggctggaagagtccagtgggctggttataagcccgctttgacagaagatgaggctgccagattctctgtgggatcatttatccaaggtcctgattggttaccggatgctgatgttgaatttgaatcaaccttatgatcttaaataggcttttactccaaaatacggaatatcaaatgtttgaaaaatctaagattagccttattttttcttttcccccttgtccactaaacaaatgctacgatttttctttagcatggatgaatatagtgctcatattccacatctgtttgctttcaccactttttcccttatctcttgtcttgcttaattatatagtgttttaacttgagaaaacattcttttcttgtacttcgtaaaaaaaaattatgtcaaaagtgctgattcggcacgcattagtcataaacaaccagttaaagtagtttggtcttttggacgatagagatggattgtcaattgtgcatttctttatttttctctcttttgaagaatagaaataaatgaagaataaaaccaatatctaaagagattactttgccgacaacaacattttctgtaaaaaaaatacactagaaaacaaatgatgactaatatatacagcaaggccagcaacatgaaatcaactcttctttgtcatcatttctttttccccaatatatctttaatattcataatactatcattcatggggggcttgaatgagaaggaccacaatttcttatttaaaatttgtgacttttttctttcaataacatataaagtaagagaataagttttcataagaacttaaatggtcttaaaacatatttaaactgaatcaattatttgaaggcaatgccagtactcgtatatttatgacatatggagtggattttgttttcagggataatgtgcagataaattataaatacaagaatattttagggaaaactgttagagaaattgaaagatatttattataatcaaagaaacgcaggatgtgatgtgcacatacaacaaaattctccatccttgtttagtttaggttcacaattttataaacaatatcatgttttcaggtgtaaaatattgcaaataaaatatcaagagacttggatagttgggtcctctttctcctagttttgtccttagtcatccgactcatcaaccacatgccatgaaagtgttgtattatccatcttattaaaataattatgtcatgttactgtgatattattattactatcacatggtgtagtctgtggtgttcatgttttatcaaaagatccaccaaacaagatcatgctacaggttaaaaaaggccaagtttttttagtatataaattctgacgatgtacataattataattatgctagttatttaagataatataacatttttcttctaattttatttttctattaaaagaaattgaatttagcttttggatttggtaaaagcttttaaactaggacatgggtaaagccaaagctatatgataagaattgacctttgactagcggtagcaattcgtgttcgtgtgtagtgctataaatactagttgattttttgacacagcacgaaattaacacgagtctgaaaggcaaaaaaaaaatatgagcttggacacgacgataagaaaaatatgtgtttaagtacaacatggtacgaaaaacacgaaaggcacaacacgtaag

SEQ ID NO: 78346 - DNA, 598 bp, Cannabis sativa
gactactccaatgaacaactcctatttgagatgttctaattgctaaaactctatcataagttaaggcttcttagctactaagtgtaatataaatacatgtgtactgaaatttgtgtctgagtaatttgtgatgtttatataaaatttaagtaataaatgttaagttttatgtgttatattataaataaaaattaataataaaaataaaattttattttgactttataattattttagtaaaattggacaaataaaaaaaatataaagtatatgtgtagatagtttaaattttgaattatataaaatttcctatttatttacgtactctcaaatgttaatatgtttttataaaatattattatgagcaccactaagttaatgggtccaactacaagacaaaaagtttgagtactccctaccactagcaagctagtagtagcttgaacttcacagctgttccacttggccagtttatatattgagaagaaaaatcctagcaaagtttctccagctatgtatttcatacttctcatatatttttttttttctcgaaaagacttggagacagaaatcgagtgcaaaatcctacattgtgcta

SEQ ID NO: 78347 - DNA, 1426 bp, Cannabis sativa
tacacctcatccaccacccgatccaatccaatttgatatttaaaaataacatccaatccgatccgatcacaattggatatccaatgtatggcggtcagttctcattggacttgatcgatttattcacacccctagttgtctattgacacctttctaaacattatgattttcacatgttaaatgtttatgaattatagattttcataatgtttagacattcccactgtcttaacaagaattccttctattgttaccaccacaactttgtatcactactgaaaaaaccacaatttatacaacctaattagaagtcaaagctgtaaattcctcttgagaatttaggcaaaatttgtaatgtatggtataaattagcaacttgtcaagttagatgaatttcaaaccataattgacatgttgtaacaattttgcccaaatccaaaatgtttttgaattttaggtttagaaccatactaaatcaatacgttctttattttgcctaaatgtttagtactctaattcgaagaacatgttaggaatcgaattgagaattcaccacaaaacacaacaagatcacaatgtgatcgaaaaattaagaaatcaaaagcaattcgaaacaacaaataagaactcgaatgaatcttacacacattttctttattgccactttttctttatttgttaagttcctctttgagtgttacaactctctctctctcagtttcaattacaaaagagctcactcaattattacagacaaaattgaacttgctgagtttctcaagcaaaaatcagtcattcttatgcaattcattaggataaagactactaataagtaactataacaatctcataatcagcagttacaatattgtaaagcaactaaaagattacattttcattaatacgtaatgtttctaaagaaggtgcaatccgcatcaaggcatccttcaagtttgaatctttctctttctcgggtttacaatcagtaataactttgagatgcttccaattaagcaaaagatgacgacaacgtaagttcttcaagttttctggccagatgagaaccttcatacattaacaacatgaacttgaaataacaccacatcattatacaaaacaaatatataatacaagtaatgaacataccttgaaagtagagcagattcgattgtaacggcttcaactcatgactaataggattgtaactattttttaaatggaaacatttcaagtgttggctcgagattttaatatgctccttctctaatgaattgcagttgctcaaagccaaattctcaattagaggaatatttgaaatgagagcttcaaggtgattgttctcaaggtaaattctacataatgataaatttctaattttcttgcaagaagagaattttatatggtccaagggaatacctttcactac

SEQ ID NO: 78348 - DNA, 1354 bp, Cannabis sativa
aaggaaacttaagctctattcgggtattaaaggaggttttggatgagtttagtgctatctttgggcttgcaattaacaccaataaatctcaactctattttggaggggtgaaagaagaggacaaacaggctatgttgacagaaatggttctccttgaaggaatatttcctctcaaaaacctgggggtccccctaagaccaacaaaatggaaagctaaagattgtggtgtgattatcaagaaaatcaaacaaagactccatacttgggctaccaggcatctctcgtttgctggaagggctcaactcatttactctgttttacttgggcttcgaaactattggatgagcatcttcatattgcctcacaacatcacaaaggaggttgagaagctttgtaaagggttcctttggggctgaaatgggagtagaagtaaacttcatatggcttcttgggaaaaagtgtgcctcctaaagacttatggtggtttaagtttcaaagatggggttaaatagaatcaagccattcctgctaaatatatttgggctatttcttccaaaagtgacttactttgggtgttatgggtcaatgatatctatctcaagaataattcagtttggacctgtaacctaaagaatgatactagttggtattggagaaaactttgtcatttaagggacaagttcactcgggctgatattgttaaggtaggggctggtgagaaacacttcaaagctaatttgttatacaacaacagtcttccccaaactcaatttgaattcagcaagtgtgtttggagctccttaaacatgccgaagcataaattcattttctggcaagtaatcaattcccagcttttaactcgggacaagtttgctcagttttaggttacccttgataacatcttctgtacggtgtgtgatgtagcagtagagagtaactctcatttgtttttcgactgttgtctctctcagcaggtcattgagcaggtgtgtaaatggcttgggcttaggacttggccaactagttttcacagctggaaacactggctgttacaaaacaacaagaaaaagaagcacatgatacatgtttcgataatggcagccatgatatacaatgttatgaagcaataggaacaattgcatcttcaacaatttctcgagtacaacagctaaaattgtacaggaaccaaaaatatagtgtcttattgattacaaatagctaaaaaaagaaatttaaaagttaatgagaagagatacatattagaaatttattgaggtcacaattataaatataaaatgtgtgttgggtcatcaaataaataagtcaaatttatgtggtctattttggaataaag

SEQ ID NO: 78349 - DNA, 976 bp, Cannabis sativa
catatatcaaaatgtttaactctttattaataatcaaaatattttttataggcttttcagggcatatatcttaatgccaagaaggtaaaagggttttgctacgattcccattcacccccagattcacccttagagaaaatctctacaatatttgtcgatggcgacactcactttttgaggcaagataaacaagctctttcaaaaaattctaatcttcaaaagaactgagtgaataagttgagcacgacttccaaaatataaatttctgctcacccaattgtaaagctttaagtgcagcttggcttatttttattttgtttttttttaaaaaaaagctaaataaagacaaataaaattaaaaaattatttaataatacatatgctataacaaaaattaaattttaataataaaatttgaatcataaataaataataagtttttgtaaactttaatatattaaatatgaaaattaaattaatgctttaatacaataaaaaagaaaaataataaaatatcgagataaatatatttcaattataaaaagaaatatattatgtcaagtaatattttaaactaactgatcatttattttaacatatatattattttattaaaattttaatataaatatttttaataatttaaagagaatacaccatataccatatagtatcatattatttttattagaaacaaattattacatgttttcactaattttaataaataaatattttacaataaattttaaataaaattttaactcttccatttaaattattttgaatttaaaatatatttacaaaattaaaaattaaaaaagaaagataaaaaataatcttgcgtgcaaagattatgttttgatactgttggatatgataaataatcctacatatggattaactagattaattatccaataatttagcatagccaaacactaaattagtgacattgtccagtttagtctagttc

SEQ ID NO: 78350 - DNA, 920 bp, Cannabis sativa
tgatcaccggtgctgaggaagaaagggctggaatgatcgccagccacggatcgagaagtgagtgcctaattgtgttgtcatcaacaaatggtggaatgatcttggggaagaggatttgtgttctgagcttgaacccgaatttgtggattgcgaggaggaattgttgagggatttggagctggaacaggatcggaagtgacctctgcagcttggttgtcgatcgacgatggaggagcacaatcttgagatcgagtcgaaggccgtgccattgaagctgtgggttgtataacgtctgataccatatgagaaaagagagaaaacagagcgaaaatcagagcatatattttattatagctcaacttgattttacaaatgaagagataagcttatatagcccggttcaacaagaaagaagcaattggaaaataaccatctgtaacagaaaaagcagctacaaaatatccaagtctataacaaccaaaactaatcctaactaactaactcaatttgttctaaaatttttacaccccataaaatgataaatacaccctattactaaaaaaatataaacttaaataatttttaaaaattactcttaatacttttttaaaattttttattcactttattttatgttaatttcaatacttattttgatttcattttcatatatttttctaactcatgatatattttttttattttttttaggaaaatttcatataattttttattttaatttttttgttataatatttaaaatataatttatgtttatttgataagtatattttttaagaatatgaattggaagaaaaaatttaaaaaaacaacacgatttacatatttaatttttagtaaaatgaccaaaataattatctttacactactactaaaaaattgattgttataattttttt

SEQ ID NO: 78351 - DNA, 765 bp, Cannabis sativa
ttttgggtaagaagggaaaggtctgggtttggtttgctctcttcttccatatttagggttcagttcagtatcgaattagcgaagaagaagaattcggcggtttgcggcggacggcgttactctgagatttctcttagttaagctgggctactgtttatgggcctttacttgattcagcccatatggcatatgtctcttatcctcctttttctaaataaatagtaataataatataaaaatttaaacgacaaaagttacgaaaacttcaaatttaaaaaacgacgatatcttcaaaaaacgacgtttgatttaaaatacagaccaaattgtgaatacaatttagaaattagaatagaaacaacttaaattagttgctttaaataaattatgtgactaaatgatttaaatcaaatatagtgacgaagtcaggcaaaatgttgtctttggttttttgttctacatcttgtatttgtaatagtgtacacatgttttagctaagtgtgttattgtcatatctaagaattatatttggtggccagaattttctgttgtatccgaccttgattaaggttgaatccttctgtaaataaatggtaatataaatttaagtttaatttctggttacaaactactttatttttttaacagaatcatgacatcttttgttagttatttgttttgtaatattattagaacttgtaactttatggcttgtggtaaaatgaattttacttacaatctacttggtcgattatctatctcgtc

SEQ ID NO: 78352 - DNA, 592 bp, Cannabis sativa
gaattattaaatattaaatatatactttcgtgtttgggtataaagataaggttattcttaggtgtgtttagtgtgtatcttaagattggatatcctccccttgtgtatagtgttttctgtacacatttattatacaatcaataataataaaagcttcattttactaatatggtatcagatatttccctttaggagactaaatccccttttctcgggtctgctctcctatttccggatttggccggttcttcaaacggctcattggaacttcaactgctcaccgtcttccatggcacaatctcaccggttctctgctcctaactccaatcttccgtttgctgctgcttccattgtcagcaatgtcctcgccagttccaccactactcatatggtgtcctccgtcaaagcttcgatcgttcaagaaacaattcctccgtctatcgaagctccgatcgagccacctactgcgggtctcgatcttcaacacgtcatcccgtctccttttccagatgctcgtccctcctccgtcgttcctcttccggtcgaaaccgcttccatggatgctccggccataccttcaagatccaatcct

SEQ ID NO: 78353 - DNA, 899 bp, Cannabis sativa
tactcaaaaattgacagaatacttacattcaagcctggtttgatgagtttctagatgttgaagccttgttcttgaatgaaggaacttctgatcacttcctggtttgctaacggtctatcctcaactacctagtgggaaaaaaccatttaaatattttaggatgtgtaacatgcatcctgaatattctgatttggtttctaaatattggaagcagaattttaaaggaccgcttatgcatcaagttgtttctaagcttaaaggtctcaaaagagattaatcaaaaggtttctctaatattcatgcttcaaaggaggaagcaaagcaagccctcactgaaagccaaaacctactacgagatgacccttttattgtttctttatagctacaggaaaaagaacacagggagaagtatgttgatatacataaggcctattgctcttttttacagcagaaagccaaccttaatttggtaaaaaagggagattcaaatacctcattatttctcaaatacctcattatttcatacaacttttgtcaaagaagagtccataacagaatttattcaatcctcaatgcagatggagaaagagtatttggagatcaagttgcttctacttttctaaactattatcaaagtttacttggtagtgactagaaaacagaatgcatgtgaatattgatataatgctccaaggacctcttgtcaccaagcaacaagcagacgttcagactatactttagataaagttaaaaaagtctcttttgatatacctggtgatcagtgcacattttacactcagtcttagttaatttttagatagattagtatttatttttgtatagatttgatgtgttttctccaagtgtgtaggtttgtgctgaaaagacattttgtgatg

SEQ ID NO: 78354 - DNA, 786 bp, Cannabis sativa
atatatatataatttaatatgtattattataatattgtattgcattacaacattttaaagtaattagtataatagaacaacaaacaacagtactaggtctcatcaaatcaaatcaaatcaattcaacaaattttgttgaaattgttgaacaacaatttaactttgataagcaaattcaatacaaattactagacattaatatgaacagagtaaagccatatatatacatacatacacatatatatatataaaaagtcaaataatctctgaccttttgaccttcactcaatccaagctacaacaatgaaatcaaatcaactcaactcaacacacagaaattgagcaattttgttagtaattgtgttcttaattattggaattagcattaatataatgcttaacagcttctctaatatcatcaaattcatatgaactctccaaaaaccctaccaacttactcagttcacaatcgccgccgacatcgtcaacgaacgcctgaacaggaactccattctccggctgcaaagagtacgaattcggattatcatcgaagatcacagatcgcctcaaatccctacccaaatccgacaaatccttaacgagtctcccatcaacttctttgcacgaatcgcggtaaagccgatgagagatcactctgtttccgtcgagtttatcgagaacaagagaagcgtattctctcaatccagccgtgaaaacaacaacctcgaatttatcgtcgttttccctaaggtattcgagcagttcatcaactccaggtcgtttcaa

SEQ ID NO: 78355 - DNA, 1812 bp, Cannabis sativa
cagtagaattccccatcctatgataattaggatcacataagcctgttttatttaaaaaattttagatgtgtataagattaaaaattctctcgaactaatatagtaatgtataaaaatttcaattgatcttacgtttcttaaatgaggatgatgcttggcttgacctctccatgatctgagattcgttgtcacttctgtatcttcatttctttgatgatcattagaataagcaaataattttgtatccataatgatatttatggagtttgtagcattgatacgatgtaggtggattattaaccaaatgaagattatgaggcaatgtttaaaacatgttgtcatgtcctctgtaataatcttctttgtggagaaaagtaagaaataataaaaaaaaaaataaaagtaatatgaaggtcatcaagagcttaagtttgaagataattaaatctcaattgtgagaaagaatttatatatatcatgaaaggaaattaaagagagaataataaatatgataattggtgttatgatgatggctttggaaatgttttaagtactatattgcggttgagaatatgtgctttccttagtagattggagaatcctttatgtcttgttttaagagatgttgaatcattagatttgattcccatcttttctttttcttatttttcacatttttatttcatgcacatctttcttttttctttgtttcaaactattctgaatgaacccatatgagagtgaatactatattaatttaaggtcatgggataaaggaatctaagacagagaccctcaaaaggaatgattagaaatgagaagtgaaaaggtcctcaccctagctagcctaattgatcacttgagaaagttactagcggttagactctgtttttgttataagggcaataaggttcagtaaacagagcattaatatcttaatttatattcattagcaccacactaatttcaatatctcaatttatatctaactaatatgtaaaattatatagtttttattttactccaatcctcacaaacttctattgtttaattttaataatacttttcacaatatgtccacttttgagaatagaatttaaattgaatataagaaatggcctagaacttacaaaatctatttttattctaacttaatagaaactaaaacttccatgtaaaaaaatatttatctatataaattaaaactttgacatattttttctttttaaagaagaacttcgacatgtttgattttaccaacatgaagttgaaaaaatatatacatataagttaatgaaatatttttcttgagagagaattttaaggaagtaagtttttttttcctattacataaatccagtttcaaaatttagtccttaaatatacatttgataattaattcattttttttttgttgtaaggataattaggacctgtagttgaagttctataataaataagagcaattaagtctaatttatccataacaaattagaatttgagagaaaaaaaaattggcttctgactcagagacttgattgataattattttaaatttttcagaaaattgactaaactgcaaaatactccaaatgtgtttatgttaacccatattatgtataatgttaactaatacaaaagtgaatcacatatatgcaaaacacatatttgactaatcgtataaaaacgaaataaacttaattgataacataataagtactgactactgaatcattaattatggtgccgtttggtaacatttttgttttttaattttttaatcacaagataaaataaaatttttatttttga

SEQ ID NO: 78356 - DNA, 587 bp, Cannabis sativa
  modified_base (263)..(263): a, c, t, g, unknown or other
caattgcttctgaacgatctgtttttctggtaaagtaaacttacttcatttttataacacaattaatcattttagtcttctcatataaagttatcagtttaagctaaatatatattatccggtgcttttaggatacaccgcttaaaaggaatgtactgatggactttttacttgtttcggtattcaaaataattttttaattcattttattttttctatgttcgtgtatgttatagttgtttaaaatattttataaaattttnaaaaatttagaataatttataataaaagtaaagttcaaacagtcttttttacacgcgcgtacaataaaatagtcacgtgtataacacactgtttaaacattgttttcggcgtgttaaattttttaaaatttcataaaattttgtaaaatgtctgaaataattgtaacgtatatatgtccataaaaaaatatactaaaatattattttagatatcaaaaacagatgggagtacatgatatgcatcccttttaagggtgtattgtagaatttttgtataaagtgtttatttattcatatatagtagtaagtttccaatgaaaaaaa

SEQ ID NO: 78357 - DNA, 2825 bp, Cannabis sativa
gagctagatagggctaagggatcatcattctcggcatacatcaataccttgcccttgcccaaattcaagatgccaacttggaagatgtacatgggaaaagaagaccctctagtactcctaaagtactttgagatccagaaagatctcctacaaatatttggagatgtgcgattcaaaatttttttgacaactctaatggaaatagcccaacaatggtatttcaagctagccccaagaagatttaattcttgggaagagctctcccgacggttctatctttagttctctggttcatgataaatacctgcccaacaagaggatcttatcgaaataaagcaaagaaaagatgaatccttgaaggactacatttaatggttcatggctgaggccaccaaggtcacatgcttgacagaagaaggataatatacagccatactcggaggcatcctgtcgttgagtgacttctagaaagatatcaggatgatctcaacgagcaatatggaggagttccttgagcgagctaatgtcttcataaagttagaagaagctgtccgaaaagcctaggcgagagagcaggacaatgacgaacaaacatagggcctcatcgcgccccgaacaatgtctagcatgccgaccaccgtagatgatctctatcaattctcaaacaacgagaatggtggaggcaagcgcaacaataatggcactaacaaagataatggcaatagagggaaattcaacaatccttttatgcaatgaactctaaggaagaaggaggagaagtgtgtatgcttaactcttctatcaaaaatcccaaaatgtggcatgaccagacgtcccaccaaaatgatagcctccatcacagaaggctggcctccacctctgaggtctggcctctgcctccaaaggctagcctccatcatagaaggctggcctccatcacagaaggttgacctccacctttaaagtctggcctctgcctccgaaggctgtaccgcatctccaaaggtgggccaccatctttggtcagtcgtatagtcaagtacaacaaactatgcccaaacctcagatggcaggacacttaggggtcgacattggcgcaccccatattacatctgagaccaacaaatccagagagtgctatgcttggacacttcatcatgagcccaaaagcaacttcctagtaggtgaagaacaaggctctaagcaaccaaagcttggaaagcccacaatatctttctcaaaagaggagatcatgctcaagatattttcccccacaatgacccctggtcgttaccatacaaattgggaatatgactgcagcaagatatatggtggagaatggagcctctttcaccattcttttcaaaatcagcacatgaaaagatgaggctccaactcgctgacttggtaccctacaatcaagtgatgtatggcctctctggccaaagcatcaaactcatcgggtatatcagattaccccataatgttggagaaaatccaacaaccagaactctgatggcgcagttcatcatgatcgacgttccctcgacttccaatgccatgatgggatgatcggccctatacaacgtgaaggcgacatcacccatctaccatcttttcctttatttcccaacgaggcatgaggtggatgtcaagaggagatcaaaaatcttcctatcataccttggctttgtcaaaagccaagaaaaagaatgcacccaccaattcaggagcatacaagcttcgtgacaaacttaagcttgtgttgctacaaaatcatgcccctcaggcctgaagaatgcaggggccacacattagaagcttattaacaaaatgtttaatgatcctatcaaccacaacatgaatgtgtgcatggacaacatgcttgtcaagtccaaaaaggttaggggtatatggaggattggcaaacaatttcaaaaagcctccacaactacaacatgaagaaactcaaacctacacatagatccaagccctttggaatatgaagtctcccacaacaatgaagcaagtacaaagccaaataggacgcactactgcactaagcagatttatgtccaagtatacagatggatgtgtatccttcttcaacatgaagcagaagcaacaaaaacaaattcaagtggacaaaggaatgtgaaactgcattccaagagctaaagaattatattggctcgaccacccatgttgcccagatctctaaacgaagaagagctaggcgtgcacccagcagtcacaggacatgctatgagtgttgccctcataagagagaagacagtgtacaacaccctatatactacacaagaaagaaacgaattgacactaagtcagttcccactcatggagaagctgacccagagcttgctattagcttccaaaatactaaggccacacttctagatgaaccctataaacatgtacaccaatcagcagttgtcgtaggttctatagaaacttggagcatcaacccaactactcaagtgaacaattattactcgaccaacataaaagcacctcaaaacaaggcatggccaccaaaggccaagctctaacaagcttcatgggtaatcatagaagcatatctcctcaaatctcttaaagtttaggagaaaagtaggagctggagaagaagcgagaacaagagcccaagaggtgtgttgaccacctgctcgatgtaagcatggcccccaacgcacttgggggaaactaaggcctgaggaaataaggttagttacaaagcttctaacaacgaggctgaatatgaagctctgaatgctagccctcagctagcacacgaagcgcgggct

SEQ ID NO: 78358 - DNA, 2940 bp, Cannabis sativa
  modified_base (128)..(136): a, c, t, g, unknown or other
gaggccgaagttcccaaagtttagactgaattggagtccaaaatattaattaagaaaaaaaaccgtttaaaaaaaaattaaaagtaatttttttgtttaatttcaaaatttttaaaattttaattctnnnnnnnnnaattaaaaaataaaaataattttataaaaaatgtaaaaacatttttacttttctaattaaaaataaaaaactaattaaaaaaacactaataaaaaaaacttataaataaataaaagttaattttataatcagaattttttcagaatcacaaggcaattttttttcttcagattttccttgataaagtactagtgaatctaatataatttagaaaattcgaataatatcaagctatattattgataaagtgacggttttaagtttcaactatattgcaataaacaattctagtatatatatatatattcctatttttgtttttacataaaaaaaaaacataaaatttttaaagaaaaaaaaaaaaacaaaaacaaaagctagcctgcatagcctgccaaagccaacatatttataatatatatatatatataaatagtgctatatatagtaaacaatatataaaaagattatcagaacttaattttatatatatatatatatattaatatttacctaggagaagctccgatgagaagaagggcattaaaaaggtgaggtctcttaatggaagcaatacatccaatcataccagacatggagtgacccacaaacacaactgatttcaagttcagctcctccaccaacccgatcaagtcgttagcaaaaccctcgtacgacgagtgtttcaccggatcaaagaggctactgccgtcatctttaacggcggtgccggcgaaagaccagtcgaacaccacaaccttgaagtgattggctaactccggtacgatcttctcccacaaagattgatcgccgccgaaaccgtgagctagaacaacggtttcgtcgcctgaaccagtggttttggcgttcatcgccgatgaataataagcttcgactcgtgactcggtttctttttcaactatcattttgttaattatataattatattataatggaagaacacagaaaaataaaatagagaggaagtggttttttttttctcttttccttttaagtgtttgtgtaaagtgttttcttcaatgttcggccttggcatcctttttatagtgaatataattatttctttttgtatttttgggattttcagaattttattattataaaaaaaatgagcaatttgctatttagtatttaagatgctaacactatactatctatatctacgtgactttcaataattgattagtatttaaggtgtgcatttctcaaagaaaaaagaaaaatactaatatatatatatattcaaagagatgtatcagtcggactaggtgtataggttgatcattaattattaattttaatggattagataattaaaacatataaatatttatataaagtgcggtacatatttaattataacattgtgcccgtgtcatcgcgcattataatacactaatttatctttaggtgtattggacatatacttatatattaaaaataatatataacattaatatatttaaattaatttaaaattgatgtaagttaaattatatatataaaattaattttattaatactgttaaatcaacaaaaaaatcgttaaataactgtatcttatatataaaaatatatataataaataattaataattagaatatttgattgccggccatttttttcatctgatttatgcataaaatatgtatggatcttatcgagtatttaaatcgttgggcaaattatttatttatgtgaggcgtgggacatatggattaattaagatgggacatatatgtattgttgattgatagaagaaggaaaacacatatcggctaaaactaatttatgtaaagaaatcatatctaaattttggtactaggattaatttacttatatatatttataggtatagagaattgctaaatcacaccctcttatgttttaatattgttattgatccaactaaatatcgggtctcatataatttaatataatagcttttaagaaatatcgctagcgcgatatgtcgagaaggtgctagacagcacactgatgtctaatagcaatatatatgccttctaatacaggtaataatgtgaaccagtcggcgccacaaacacttttgagctcttctactccttaatttattaaaagctctattcaaccacaattttaaggaacaaaatataaaatagataaataaaattaatgaagaaagagagtgttctccctattcccggaattgtgaaaaggaccttgcgaggaagacgtcgtacaataattattttgtcttttttttaccatatttatattgacttaattatatttttattttactaattaaggtacatagctttttcttaattagaatttgttttaaataaacgggataattatactacttaattggtcaacttattgaatctagcaagtttagagatgtcaatcaggcggaaaatgctcgtttcgtctctgtccttatctctctttaattttattaatgtttgtgtctctcttcattctgggtttattagaattagagatggaaatttatactgcagggggaaatttataccgcgggggatggtaaccacaggaatccgtccttaatggggtggggatttcctgtcttggtggttaatgggccggtagtagaggacaatttcaatactcaaagcggaaatgaaacgggagcgggaataatactgtccgcatcatatccgacctcgatatagatatatataatttcctttttatttttaacatatatatataatatatatatatgattgataatcaatattattttgattatccatccataatcaaaattata

SEQ ID NO: 78359 - DNA, 669 bp, Cannabis sativa
caaagactcactacaagaaaaaggtgtgttaccgacgacgaagctcgtcggcaagagtaagaggaaatagccggcataatttttccggtgacattttgcgctgacaaaagatgccaacaatggttcatcggcatatcaccttttgctggcgacttcagtagatgcgccagtaaaagtgtttacaccagcgaattaaattttctgacataagttcatcgctgcaattttgtgcaggctgaggtgtccttgtcgacgttttgacagcaagttaatgtgccggcaaaacttttgatgcaaatttggctacaattcttcaatttactgcctaagttttctcggtgtattaactcgtcggcaaaactatttaatattaaataattaaaaagatttgccagcgagttaatgcaccagcaaaacaattaatattaaaaaaattaaatacttttgccagtgcacattaacactcaccggcaaaagtatgttattttttaaatttaaatatttataatatataattaaaataataataaataaatataatatcaaatatgttataaaatcgaaatttatattgtaatttcaaaactacataaaatgttgtaaactaaataaaagtatttttagttcataaactataatattatgtacaatgtaatttttttttttttt

SEQ ID NO: 78360 - DNA, 1041 bp, Cannabis sativa
cagccaggaaccctagtttcaggcataggcctgccagcttagggacacagtccctatggccagcctaaccccatgaaagccacctattgtcagccagacctcaaacaaggcctccttggccagccaggatctgcatggattaaaacatgtgtttttcaagaactcaaacatgttcttcatgttcttcgtgactcaaagagccaagaatcacaatgaaggtcatattgagatctttttcgtctagaagtcacacattatctatcctaaggtgatcgtgcagatcaaaataccaaaagtactacaatctaatgtaagaatcaaagcatgttcataaagtgataatgttcatgcatccatggaaaaatcaatcaaatcaagtgaaatagcgagaatagaaagcttaccactacaagatttcattggagaagaaggtgggaagcttggatcattgaaacgatgtaaaaatcccaataaaaatgatgcttgtgggttcggcaccctagagagaaggaggagcttttcctaaatcaagtttctagtgaaagaaaatgaaaagtgaaagaaggttttccccccagaagtcacttatgtaatacatgtgggccccttttcttcacttacctcacctacacatcataaacacaattaaagcagttatttttctactacaatgagatcagacattcaagacaaagtgttttaagaagctaaaagtgcatcaacttttattcagcaaaggcttcaacagtcccaaccacatcgatatagttgataaagtccatatccgtacaaacgtccacacagagacttggggggcaaattttatcccaattttggtccttatgatgtggcatgcttatgtggacaaaattagtaccatgaggcaatacagctcaccaattggaaggccaagttagcacctgaacaaacagagaccccagcactaaaatgggcatcaagtgaagactagctccctctcaggagctggccgaccacccctggctggctagccttgggagtgcaccatggccggccagcctt

SEQ ID NO: 78361 - DNA, 985 bp, Cannabis sativa
agttagcatagctgaaacattgcaaagagttccacaaagtcaagtgttggcgatgagagaggaagttataaagttgatgccaagaattatatatgcaaatcccaagtcaagcttagagagatttgaagatgcatttgatattgctgtgaagggtgttcttgaacgagtggagaaagtgaggaagaaattgaaggaaagtaaggattctagtattggtttgtcagagttaggtagttaatttgatttttactcggaagctagacagaagaaaagatacctccattcattgatttttatttggctgtaactattttttcttccttttttgcctgatattaaattgtgtacttttcttgttggaggctgttagtttttcgggataaaagttgctctatctgtgtttttttttttgtctaaatttccaaaaaaatctttgcattttctttgggctacacaatgagtttttggagtttatctctccttcatttgcttattcatttctagtaaattatttttaaccaaaaaaaaaataatttttcttttgtttttttttttagaaaatagaacttcattttaagaaaggggccaaagccctacacgcccagcggacgaaccgcataaactcataaggaaatggcacaaatatcgactcaccacaccaatttagagggataattcaaggctcacactggagcatttagagggataaaccacaaaatagcctaagactaacgctaccacgaataaaaagtgaacaacaccaaaaagactaattaaactaaaatacaaaaaacaaataaacaaataccaaagaacaactccaaagaacactcccaaaacgcataggaggctgcctgaaagcccataacaaacatgccaaaaataaaagactgccaacttcctacaaggaaagtccacactaagtctgccccccccaaaaaaaatacttttaaatgttgttaaaaaaattacttttttatgacaa

SEQ ID NO: 78362 - DNA, 681 bp, Cannabis sativa
aaaagaggtatgtttcaattaaatataaaattaaagataaatttaattaattgataataaaactggtatttttcaacacgaagtcaatatgtcaagttttgtctcttagtaaatatgtcaaatgcctcttatattgcattaaatgaagggaggcgtgatcttagactacagcaaaacaagccatattctccaatgtgtgtcccacgtctccatgttcccacttcaattagttttggggtaagttgaaaaatactatttttattaatcaattaattaaatttatttctaattttatatttaattgaaacatacatctttttatatgtattgtacccaaaataccctgatataagagagtcacatagagagtatcttaaagtgacaggggcaaaattagtacaatattaaaaaaaaaggtaaaaatgatagactttaaaaaagaggataaaaataaaaaaggacaatataaaaattgtatatagtgtaatttcctcatcagtttttgtaccatttagcccactaaatggtacacgaaaatatcattttagatagtcaattttcactataaatagcacccattggcattgtaaaaagcatcagatttttagagtagtaaaattatactcttttttattattttcttatttctctcttagttttacttattttatgtgacaaaaa

SEQ ID NO: 78363 - DNA, 1233 bp, Cannabis sativa
ggtcaatccctaacatattcccacaggggttttgaaattcagggtcaatccctgccatattcccacggctctagaactgatcctggtttcagttgtttgtcctaattgccactggttgacggttggtttttctgtgtcacagctctatacaacagccatcgcaagctcgtatctgattacttcgcactacttctacgtaattgcttgaccggactaattgcccctagtccaattaatgctgggcgaccttctttaatatcccccttttgggcgtcatcgttcttttcctgtaatatgttatcctttcgagataaccagggcatcctttccttcaacaggagaagattgtggtccctagtcgcttgcgttgttgggtagatcgggctggttatagatattgtcctgcccctttatatattgctgcaagtgtcctcgcgcaatgaagccttctatctcatttctcaacttacgacattcttttgttgtatgcccaatatctccatggtattcacggtatctggttgggtcccttttgcgtctcgcatgcctcatgtactttggtttgctgaaagtgaccttgtgttcatgcgcgaggtagattctctcctgagtttcattaagcttggtatagataacatacacgggtacatatttgtcgtgtttcttttgcttcttatctttgggcaaccccttagagtcgtctttcctctttgacgcagacgctcccgactcgaattcttcagtagaatcacatcccatttttttgccttgctctccgacttgatgcctcctgaacttatcatccaacttgtctatttgtaaatggatcgaatcctcttactttggacctagttgttggcgaagatcaggttttctctagttcaagtgttctcgtaggtctgagtggctatgacggctggcggatctcgttccacccatagaccgtattctgccttcttgatcattgttgcgacgagtattctctccttctcacattgattgactatgggttatcgtgtgcctcgtggtagcacttgcctcttcatgcctcgtcttctcccttgggtatggctagtctcgttccccctatcaagatttgtgcgagctccttccctttgaacttgggaagcacgttggcgatttcttaacggtgacccatgtgcctcatgttgtgtctcaagatttcccttatttctacgaggaatttctagttccctggttcctggttgatca

SEQ ID NO: 78364 - DNA, 1914 bp, Cannabis sativa
tttgacatgtgaattaacaatactttttactgtgtaaattgtaatctattcccattgaacctttcttattgtcatgtcaatttgcagaggaaagagaaaagccagaacttttggcagagtctcctgtgagaagaaaaagagttgctcaggattctggaaaatcagaacagcaggtacctctacagtagctccttgataactaatgaaatttattgaattaagttaattagatttcataaataaatcacatgatatatttgctaatgaatggtaggtgagccaacttgttgctcaactcttccaaatgcgtgttcgtatgaaaaatttgatgggtgtaatggaaggcggatcgatgcctacactcagcaatctcgaggaagcaatgaaatctgaacagaaggtgccttgttcatactctatttcattatatcatagtttttacaccagaaacaaatgcaagtaacactttttgagttggtgttttgtgacatgttgacattgttttggatttgttttgttttgtttttaggctcctcctggtactgctaggagaaagcgaagatcagagtcaaggagacagtttgcagactctggatcgtcaaggccaagtcctcgtggctttggtggtggaaactagctcaaaactgttgtattttaagatgaatctacttgcactgtcgtgaaaattctctggtgtcgtcggttgttcatgagtataatactcgtgaaactgtttttgcaaatgttatccatgtatttagaagttgtagttttatttgtatttaaaagggttacaaagttaaagtcaaataacccaaaattcagcacaatttttttaatatctatatatatatatatataaatatatattataatatgaagtgatatatgagcatgtttctattggagttcaactatgaatttgcaggctatatatagagttttgacacacaaatttgagaaatgtactcttgtaatatagtggcaatacagtgtgcaacataactatacacaatgtcacagtgcattatgcattgatcttgatgcttctcaaatctttctcttgttttgcctttgttttcgatttgttttttgataggcaagaatataatcatgataaatttaaggctgagtgagcatataatgtatttgcatacttagtacaaaacatatgcggtaaatcatttttgataggtgagatccaccttaaaaataaagataattagttgaaattagttgccacataaatgtgtgattcatgtgtgtacatattgttactcacatataaagttactgcaggagcctctctcttttccataggtctttcatttgagaccaacatatgatagaaagatttaagaaatagaaattttagaaagaagaataaaatgaaagaaatgctagagtaagcatcaatcatcatatgaaaaagaggttatcataaaaattgtaaagtctcccgttggcttaactcgctaaaaatggttttcattcaacccaacccaactattggatagacatgtatgagttcgttgcactttgatcatatttcaaaagaattgacttgtagtcatgaatcttatgtggaaacggctcagccgaaggtagggtccagcggctggaagagcaccgcacgtcgcgtgttgttcagtgcacccccggcagttcttaaaaattcataggaccgagtgcctctcatgtccagtcgtactcataactgcatcaggtctaagtataacatgtacgaatgtttatttaactaattaagctaatcaaaacaattgacacttaaaataccaacatcaattcttaaaataatttacttgtgtatttgttatggactcttaaattgtttttttttttaataattatagataaaaaaaaaaaatgaatcaagctcgtaaaagaaccaat

SEQ ID NO: 78365 - DNA, 507 bp, Cannabis sativa
ctacacatatacagagctaagtaaccatattcataaagctcgtcgcaagagttaagctagaaaagacacatagttggccggtgtaacctctaacctccccagtaattctactcctcacctcaatttacgcttcccttttcggagggcagcaactctttgtacatcatttccatccacaggtgaatcttccacaactgatggttcactatcaggggactcttctagaactgcctgatcatgcaaaaccaagccacgattcctactgaacttccgaattggtgttgttggtgctggtgatggtgctgttgattgtcgttcctcggtaggttgatttggttgggaaggttgttctggttgagaactatttgacctatgcggcatcaattcccctccaatatcaacataatttgacatcaactgcatgtaaaaatatcagcttcgtaatcacagaagaaaaaataatagttgaaagaatactcatctatagattcatcagggctaataaaa

SEQ ID NO: 78366 - DNA, 636 bp, Cannabis sativa
  modified_base (208)..(225): a, c, t, g, unknown or other
ccaatatattcattgggcgatttcaatttttcttaaagttattcgggttgtatttttttcggtttattcagtttggtttgggcggtttatttgggctgggcggcttactaatttttttgaacagccctaggagatatgtttcaatctccaatgtcataatatacaggaatcctctttcataacacatcttttagtgccagcgtgaacnnnnnnnnnnnnnnnnnnggtattattttgtaaattaacgcaataaagaccatcaaacaaaatactatttccaacataatttaagattttattatataaattaaaatatttgtctacaaatgtaaaggaaaaactaaagggtataagtcttgaaactaaaatcaactttctagagaaacttggtacataaaaagtcttttctagctttaaaataaaagcactacttaaaattaaattatatgttccaatatcttccactcatgagcccatcttatttccaaataagatattttgctcactagccactggttccttaggttttgaatactctgcaagaaatttgttatgtgaattgttgaacggaatcaatccaccatgtgttaagattaacattagccatattagattcataacatactaaggaaattg

SEQ ID NO: 78367 - DNA, 565 bp, Cannabis sativa
tgcattcgcaaatatctgaactaaaaaaattaaaattattattactattttcgattccttcataaatattttctaaaatccaaagagagcacaaaccaaatctttgagtaattcataaaagcataccctttttacctttcttctttagcattaccaaatctttctcaagaattagtttgaatattcttacgacttgtccaattttctcatcatcataaatcaataaatcgagaattaagtatttgcttcatgtttgattccatcgtgtacaacaaacaaatttcaataaatagaaaatatattattatatatactaaacattaatgatattacaaatttgacaatctcaataataaaaattctaattaaattctaatttttatcaagtgttttgctaaagatttagcaaaagcttcatacctaaatgctaatagtacctattctattctacaacaaacatagtttaagttgataaaattccatttctaataaaaatataaacaagatctacaaagaaccaaaacaagaagcatgctttctcgaataaggtcataaaatgatatga

SEQ ID NO: 78368 - DNA, 537 bp, Cannabis sativa
cttgtagagcttgaaaaatcacttggaataatgcagttttttttttcttttctctttctctcagatttttttttctctgtttcactcttacgtatcaattgccaaagatattttttccaaaacctttttcttaattgccctccaccctctctctctttatagctaatttttttattttatgttttttttgttgataaaatccacttagcataaaagtagtggaggtggagaaaatatctccttaattttctctcccttttttttattgacccattcctattataataataataataatactcgaagtattctgtgtctatatatttatataaaagaatgcacaaagagtgttaagcggcattaatattacataggtgacattagttgttttatttttaatgaatacaacacatattattgcatttttcatctttgtaaaactaaaattttttaattatttttaacaaataaaaatattttattaaattttgataattttagttattttaaatcatacttctacatttaaaaaatatt

SEQ ID NO: 78369 - DNA, 905 bp, Cannabis sativa
atttatcaagcctaaagtatttccagcaatgtgctttcttgatagaaacttgttgtcttacaaaatgaatccaagctgttttgaagatcacatatggaaatcaaaatcttttcaccacagggttattaccagcactttaagttgtgtttaataagataaaaacattggactagagagctagaaacatgttcaattaatatatgtacgtttatggacattttcaaaaaactgattctaagtgttcgaaaaacaactataaaataacataataataaccataaaattgctgtttccagaaaactcaatatttagtttttgtaactcttttctgagtcaaatctctctccaatgtcccgctacccatttaaatgatataattgagtattgtaacagtttctaacaattagaaacgtatctcattgattttataactgccacatgtaataactcacttaattatatattatcaattgtgatctttaagttataatatattttcggatttgtaactccttatatgttataatttttatgtgtattattatactatatatatataatataactaatttcgacactattaatcttatatatatatgtaatatttatattataataaataatataacataatgatcctcatttatttttaataatgatgtttcgattttatcaatgcctagttttattattggtaatgataattttacaatggatattataaatgattcaataatatctatattatttattaaattaaaatgtataagatttgagactggtacaaagatgtccataacaattgatcccggctcgtttggaacgttgtattaggtcgtattgtattgtattatattatattgaatttgattatatatcatatttttatataatactatgttaaa

SEQ ID NO: 78370 - DNA, 1249 bp, Cannabis sativa
ttttacaaaaaaaaaaaaaagttaaaaaaataggtactttttatggtagctggttactataaggttacttgattacctttacttgatttttttatatttttcatttttttcataaaataatctgacattttttcaaaaaagtatacaaatccataaattttgtaatctcccttttctataatgagaaatcttttttaaataaataaaatacaattgggtatttttgtaatctatgcgatcaaccttggtctttgatgatgtagaaagaaatttgtcataaagaacaatggtaagtaacattgcaaaagctcgattggtttagttactacttgcaactaattaattgttttgtgaatgaattgattaggtaataaatgatagttttgagtgtgttatatttatatatataatttattctttaaaataaaagaacaaacgaatatagtacaatttgggtgtaaataaataagggtaagggacatgtgtagtattaatcaattgttttaatgtgattgtgatataactaaataaatatagttgtcataaacttaatagtaatgttctttaaagtggtattatccaaagagattagaatagaatagaagaaacagtgtcctgatttatatgcggatttcagaaaatatgaagactaattataataataataataatatttgataattaaagaatatataaataaatgttgaagagattggatgaaatagaggtcattttcacatgtataaaaaatcatatgatgatgactatgaacattataatatatatatatattattatatagaaaaagagagaagaatatgcatgttttatgccacaattcccgcttgttttcttttttgctacatttgatttcaaagtgttattattttactatggaaagaaagaaagaagaagcctctctcttcttcccacgcaccttcattaaattaacaaccttttctttttgtttaacaaaattatatctcataatttagattaattaaaagaaatcccctaatttggccatatagtctcttattaattgaaggttaattatggtttttgcttttcgaactttagtacgtacatactctttaaatttttcaagctattaaaatttataattttgtaaatgttaaaattttggtgcatgatttagtaaatattaaaatttaaggacatgatttagcacatgaataactattgcataagtataattaaataatttttttttaatttaataatttta

SEQ ID NO: 78371 - DNA, 691 bp, Cannabis sativa
agacaaacaagatttatactagttaacttcctttgtcgcggcggtaatcgagctacgtctattttacatcgagtttttattgctcgcgagcactacaagaatattgactaaggctagagctcagatttcaagagagagatgctctcaccttatgaagactattctgaatgtgaaaattgagcttgtggagctctctttttatagacaaataggtccagtaatatagtaacaaaataatacaaaaaatatagaaaatgttagggactaatctatatcaaaacgacatttttagggacttctccacaaatttccataataattatatcaaatatataactatgatagttacatttacttttagtcattaaatcattattaaacggttgtgataatttaaaaatttattaaaaataattaataaattatttgtgactttactaacctaattttatttattttcaaaaataataaaacaaaaaaatatacagttatgaaaattatgaatagctgcaattgcacgtaatcaagtaatactcacataggtgagatcgatcccataagaaattgaacggaataccactagactagacatatgtttctatttggcaaaccaataattttgtgattgtgataaaaataaagattaacaagaaaataaaaagatctcatcaaagatggcaaattagggaaa

SEQ ID NO: 78372 - DNA, 630 bp, Cannabis sativa
  modified_base (36)..(44): a, c, t, g, unknown or other
atctttattaataagtaaacctgattatattgaaannnnnnnnntttagggcataaaacccagcagtatttctatcctaggtacgaaatagtaaacagacaaaaaagcgtgtgaatagttacttgatatatgagttgggaatgaaagattgtagtggcaatcttcccaagagtgttgaacccatcgatcacgtgatcatagccagcctgagtgtcaaaattctcatcagtctggcaatggatcaattcaaggtctagcgactttacatttggaaaatggggtgaacaaatatttaaaaaatactaaattaagcagtcgaagacctcttgcattcactagtgagaatgacggtgaggtttaaatatttctagaaaataaggctttggtttaaagtttggaggcaaaggatttttgaagtttgagatggtgaaaaaaggaaaaatgggtttgacaaatccatttatacttcgtcttaagatacttgcaatttgaaatggacgttcgagagctttctccaaagaagcacaatttaatccaatggataagaagttgaaaagatggcatctaaaacttgattatggcatttattttttatcattgcatgcctcgagtactgtacgcattaaaaga

SEQ ID NO: 78373 - DNA, 515 bp, Cannabis sativa
ggttcaggttttggacagcacccgggtctggtccagttcagggtccgagttcgggtccaagtcgatttccaagtctgagttcaggttctggtgtccgggcttgggtatgtgggagaaaatgtaaaatataatatattagacaaaaataaattatttttgaaaatagaaaataatattttaatgttttttgttttctagttttttaaaatttaatttttaaaaaatttagccaaataacccttattaatttttaaaacttatttttttgtttttaaaattaaaaataatttttaagttatgaaactaaacaattgccaagattttggaaacaagtttgctttgcttctttggcagctatgctatatcatgtttggagcaatataggaatgaaaaattttggaatttgaaaatttatacaattgattctattgtaaagaaaattaaagttgatgtaatgtttagaattagaggcataatctccaaaaaaaaaaaaagtcacaaaatgatagagttta

SEQ ID NO: 78374 - DNA, 536 bp, Cannabis sativa
taaaacataaaaaataataataattaagaaaactcgataaattttgccataaaatggtttaataactatttatcttcccatttggaaaaaaaaattgctttccctatattttatattaaataatctcaattttttaaatacaaaaaattaatatttaatttaatgcaacacaatatgtacactcaatagtcatataaatgaaaagttaaaaaaaagaatattcctatacaatatgaacaaaatcaatgtatctatcacagaattcttctacttatattggtataattttttagggtcaaaagttattggatagagtatctatttatattttgaatcttctacaaaattatataaaaactctctattatagccctaatgggcactgagttgagttgggcttaatcaagatgaacacaaacatttgcaaaaatgtttgaaaactaacataactaactttgagaaataccaatatttggaacctgcctataaaacaagagattgggtggtatttcaagaagattttgagactaagacaa

SEQ ID NO: 78375 - DNA, 902 bp, Cannabis sativa
tgccgcaagcttgatgtattccaccttccaatcgaatcttgctgaaacttcaagtgcttgaactcccttcgatctcattgaagagtgtttgcttcctcccgagacaagatttaaaaaacaatctctcgaaagcttgtaaaactttctcccgaaggtagcactgttattcttcttcttttacagagttgtaaatagaatcaagacaatacaaaatacatataaacagagtaagagacgaacactctctcttatctactaaataaagacactcttttctcaagatataatacaattcaaagtgtaagaaagagatacaagacctaactgttgtaaggtgtatttataatcaatagacaccttattgacagttcatacatggtctaaacaagaccacaactcactagacaatttctatttttgtacctacagaatggtgagcagttttctccataacaaatctgatcaaacatattaggaaactcacagaagatcagattaacacagccggatagacagagaaaggataactccttaaacttaccatttatatattattttcgataaatagaaaatatagacaactttcctttcaaatataaatttcaaaaatataaaagtcaaatacacaaaacatagaaaccaaataaatatcacagctaaaattaattaataaatgataaaatatttatgtcaaattaaaaatgctaaaaatagaattaattatcttcccatttggcactttgattgacaaaatattttataaggaggaaacatacatcaagtgttagagacaaaaacaatatagtataaaaagtactccccctacatgaaaacatactgacacataaaacaaaatagtttttcaatcagaaaagtgtacaaacaataagcaaaataactcc

SEQ ID NO: 78376 - DNA, 848 bp, Cannabis sativa
tattgaaatgagttttatttcgggcataaaacccaacaggatatcccatggaaaagagtatgttccaagaccagctaccaatcaccctaatgatgtgcgaaaggtttctgatttgttgttaggtgatggtgattgggacatgagtaaactttattccctttttcgacactgacacagttcataatattttgaaggggaaaatcaagtggtcaggggaaagatcgatggatttagatcaaatccaacaagttctcaagtaagtctgcgtacctggtccaagtcctagatcgtgcgcctccatcagtcttggcaccttccctttggaatagattgtggaatagtaaagtgctggagcgccataagtttttgtggtggcgtatcttctcggatgcgcttcctatctgcgctcttttagcaaagagaatgaccatcaatgacgcttcttgtccggtttgtgggatgggagaagaatccatggagtacctctttctccattgcaacttagcttttcatttgtggagatcttccccgtgggggatttggccgttacctggttttggtggccgtatgtgggattgggttaactttttgtgggactaaaatctaagggtgttaaggtagatgagctttttctgtatgccttgatagtggtggctacgatttggcgggcccgaaacgataaggtacataataataatctgaatagcatcacacaatatattaactttattactcactgttctgcagattatggctcttgtttattcccttccctgtctgctactattacactcgcttggtctccttcttctgaagactggataaagattatctgtaatgttaaagta

SEQ ID NO: 78377 - DNA, 927 bp, Cannabis sativa
aatatgaacagccaactcgcactataaaagtcgcatacattgctgtatttagtgaattaaactggaaactgttcttcatttattaggtttacgtttcttggtttaattattgtaattcaatgtatgaatggattgataatgaattcaatccttgtgtaaatgataggacactttctttgtatattaaggagtgatccgccgtgaaataaataagagagaaatccttgcaacagtgtattaagcagaccgtgatctgactgaaccactatactccgttgtgttcattttatttccagatttttctaaagtattttgtgtttatgatttaaatacttgccattctgggttgagtactcgtgtatattccttatttattattgttattatttatttttggtgttgtaaaaattccttcaacaacatttggcgccgtctgtgggaacgcaatactttactgatttagaaggaaaatcactacggctggaaattagacaaatggagatatcaacaatggatcaatcaatattgggacgatgattgtcacattcccaagaagcagggtacctcccatcgacaccatcaacggcggagtagggcggacaaacataaccccgctcaatttggacccagaaactgctgcttacgttggggaaacgtccacagcagtagctacggtgggacagtttccgcctatcatgcctaccgtggtttccaaaggtattgttcaactaaccactgatcaatacacggcgatacaggatcaaatgcgggcgttgtaggccaaaatcgatagacggatcaggactcgacgtcctcctcgagtacccactacccgctcggataatccacaggtaactatctctagacgatgaactaaccgcactcgcagggaacgaaggacaggtcaggaagggttcgatttgaatc

SEQ ID NO: 78378 - DNA, 569 bp, Cannabis sativa
ttggacaaatctttaaaatacactttgagaaagtgtttatctctcaattgaactaaatttctaaatttttatttcattaattgataatttacatatttatgctagttaaacaaaactaataatttactaattagttcctatatactgtttcatgtaacacaagtgaaagtggtgtttgaacatagagctataagtatgtttcaaaagtattatgtacaagaactttgttattgggctctactgcctaacactacctatagacagtgttttgcgattgttaatgatattttttaaaatatattagattaaattatatgagttgggcgatctggtatgctcgtaatgagttggttttgcgagacaaatcgatgtcagcagcggaggttattctattggcaagagtagtccttaatcaatggagaaatgcttaaaaaaggagaatgggttctctacttgtcccatcgaggtcaagtatggaattggagcattgggtgaaaccagttatggggaagattaaggtaaatgtcgatggtgcaatctttgctagagacggacaatttggagcggct

SEQ ID NO: 78379 - DNA, 501 bp, Cannabis sativa
atctataaaattaggtataaattaaaaaataataaaaaaacataaaaactaaaatagaaaataaaaagtaaatatacaatataattttttttaaaaaaagaaatttaggagacatattttctttcgctcgttatttacacgaataccatttgctattttctttacatatatgtataccgaattcgaaaacaataatttatttatatcaaaatgtttcatcagcatcatatattaaaatataaggcaacttttattaatgaggaaaaagatgaagaaaaagtgaggaattcaggaaaagataattattttggaagctgaagtctagaccaaactcaacaactaccaacgaaattgatttaaaatagttaaaacaacttagaaatgatttcagaaacaaactgtaaccctaataattaggcacgctacagtaatttttagttacaatgtccaccttcgctaattaaaaatattttttgaaaatcgtgataaatttaaactttt

SEQ ID NO: 78380 - DNA, 965 bp, Cannabis sativa
ttttattttcggcattataaattagtcacatttctttttaaatttaaaaataatactaaataactttaacgtaaacaattaaattataaagaaaaacttattaaaaaattcttctgtatttgaagacttgattataggaatcagtcatttaagggtgtactatagatttagactagaggtaggtaaaacttctaatatataaatagaagcatatacaaaatagttatcataattaataagttgcatagataggaaaagattaataatagccacatatatttatcatccaatatctaaccatgaagtactgcatgattgtagtacttttaattattctatcaccaaacccaaacgttaatggtagaaagagcaaaagtagtcatcattttgtgttggttcatggtgctggtcatggagggtggtgttggtacaaagtggctactctcttaaaatccacaggtcacaatgtcacagcaatagatctcacagcctcaggaatcaacccaatacaagtcaaccaaatcaacggttcagtggttgactacaataaaccattgatggatttcatgggtactcataatattaacaaagtgattttagtgggccatagtttaggtggtctcagcatatcccttgctatggagagttttcctcataaaatttcagctgcagtttttgtctctgcttctatgcctggtcttaacctcacttttctcaatatattccaagaggtactaatatctaataatataatcattatatatacattctaattaatataatattattatctctgtaattaattagtttaaattaacattttacagttttcaagaagatcgggttcttttttggattcaaaattcatatttgggaatggtcctaataacccagcaacagctttagtttttgggcctaattatttggcaacaaagatgtaccagctttctccaccagaggtaata

SEQ ID NO: 78381 - DNA, 974 bp, Cannabis sativa
  modified_base (717)..(720): a, c, t, g, unknown or other
taataataataataataaactttttatacttatcagttattatatataagtttcaagtttaaaacttaagaaacatacgaaaccttctcctgctctcttcggtgcgacaaaaccctcactcccactatttatttttttttaattttcaatctgaaacctagtcattcaagctctgataataactaaatagaaaatcagtgaagagggagagtttaaggtaagtattttttttagaacattttaatacattaataataaaattaacttttaagattttagttttttgtttgaatcaaattatgatatattaaaattgtcactaaaattctaaagtaatgctaaagacatatcacattttaaatggtacactattttaacatacaatgatatatattcaattttttttcatatataaattataattttaagtaagaaattatatcagtatcacgaaaagaaagtttgtggttcctaaataatattgttgaccttttaaaatatttttcttgtagtgagtatgtacataaatataaatcaattgaaactagctcaaatcgcaaattatatattctaatatataaacacttaaataaaaaaagtatatacataaatatgctatattgttggtgtctatgggtaaatttaacacacttttttttattagacttgccattaacattaatcatcatatttgttttataataataataataatannnntaataataataataatagaatcacctagatgtggactcatcagcagccaaagtggcagaagcattactccgatactgtgaattaaaattatctattattatgtggtcaatcgtctgattcaaatctgttgttggcttaacaaacctttcttcttcagcgtccttgtattgtatatcatcacccccaattaggggtgttcatccgatccaatccgcacttttttagtcaaacaacatccaatccgcactaagtgc

SEQ ID NO: 78382 - DNA, 1008 bp, Cannabis sativa
aatatggctcaaacagttggaagaaacattgcagcaccattgttgttccttaacttgattatgtatttcattgttcttggttttgctagttggtgtctcaatcgattcatcaatggccaaaccaaccacccaagtaattaaatccattaattctctagttaataatcaattaattaattaattgtataaataagtagtattattaatttgaattattatttcaggttttggtggaaatggggcaacaatgttcttcttaacgttttctataatggctggtgtggtgggaatagtgtcaaaatttgctggtggaaatcacataagggcatggagaaatgatagtctagctgctgctggagcttcttcactcattgcttgggccctcactgctcttgcctttgggtaaatttttaacaaccaacaattttactgtttttttttttttggtgatatttttagggattatgatttgctttttttaaacattttatttttagttactgtaaaaaaattatttttatttatggtttttaagatgtacatatggctttctactcaaaaataaatattttataggaaaataatatggtttttaaggtctacactccctaattagccataaaataatatggaaataatttaattttagagtaactggttactcatttggtttggttctggttaaatttttcaaatattttcttgaattttttttgttaaattatttatttagcacacatagtattagtataaaaactcttaaaatttatatttttttttctaaaaaaaattcttcaatggatcttgtagaagttttaaggaattctatgatatttcaccattatttttccatcttactaatgtgacactgcggttgcttgtcctttgataagggcctctagggcctgtgatagggcccaacttaataagtccagcccaatttttaaaaatactacttatttatacactttcgaaattatgaatttaacatattatttgaaaaaaata

SEQ ID NO: 78383 - DNA, 788 bp, Cannabis sativa
ttataattagtcacaattttttaacttttaattgtgactaaaagtaaaattttttctgtgtgcattatatgatgcaaaagttaataataattttataattcattcgaaattaatttgtagttatgcaaatttattgagataataatattaaacgtacatataattatttaataaaataatctaataattatataatttaattacataactgataaagtaaaaaaaagacaattctttttgtttattacatattaggttttcttttgggtaagttagtgagaaatttttattgcacatacgtagggccggttttaaaatatataagaaaaatatatttttgagctcttatttagaaaaaaaggtgatatttttcaaaattaaaaaaaatgtataattttaaaaggaaaagatattttggaaaatttgaatttatatgcatacatttggtgtatattaaatttttgaacacaagcttactaaaattaaaaaaatcggcacactttatattcataccgattatacccttctctctattcttctatactgatggtggtctgatggggtccgatagtggcccgttgctacccattttttttttatgtttttgtacataaaatagtatcatcaggtgaccatcggaccattatcagaccactattggaccatatctacatttatatatgttaagctccattcatttataatctcgttaggaaagctttggcccactatcggaccctatcggaccatatcatcgggctaccatcggaccaccatcggaccttcgt

SEQ ID NO: 78384 - DNA, 674 bp, Cannabis sativa
caaatttgaattattaagcccttgttaagtgttcccacctacatcatgatattgaaacattacatcaaaccctctcaagctacagatttggtgtatctacctaaaataacggataactatacccataatatacctttagaaattctactatggtattttagtgggtgtagttttagtttgtatggaaatgtgagcaagagaattacatgtgacgcatataaaattaagtgcagaaagtttttatattacctaagagtgtgtttgaaaataattttgtaattaccgagtctattaattacattataatttaaaatatacacggaaaaataatatattgtttagtagttaatgtttaaaataaaaaagtctttagtaattacatagtataattacactcaattcttatgagtagctatgaaaattagaaagtataattagaatccctcaattaactaattataatgtagttacatggtagacaaatatgtcaaatggtgtaattacctcaaattacagacaaatctaattacactgtgactttccaaatacgccttaaaaattgaagaactttcactacatacctcttttaacttgatatttttaatttttaccatctttttcaaaatctattgtgtttatctcttttttcaatcattctaccaattttaccccta

SEQ ID NO: 78385 - DNA, 2015 bp, Cannabis sativa
tatatattttaaagttacaaaatctcaaaatactcattctaatcaaattctaactttatcttcattataaatgatccaattctaactttaccttcaatatacataatgtactaattggcttcaacaataattttactattctttcaaaaaaaaaaaaaaaaaaacaataattttactatacatctaaagaaaaagcataattccaaagagcactattgagaaatatggcacaatatccatattattccctcttaaaatagtaattattttttgttcactaatcttgaatcgaattatgcacgtaaaaaatataactctaataccatgttgagaatcataagattacattttaaaaacaattaataatgagtagagtaagactcaatactctattatttatttcatgtggaactaaagacgttgctacttttggctccaaagaaggccatgcccctcctaaaattttggagaaaaaatattttataatgcaatttcatattaaaaattttatttttttaaaaaaattatatatttggcctcccttaattattttgtttattttttggctccccttattcgtaacttctgcttttgtccctgtgtgggacaatgtccacaataagtattgttattaaatagtttaatggtgtcgagtcttttttataggtcacgcttgattacatgacccgatacttaattacactaagaattttagttgggaggaatggaaatttaagaatagtaatgggaataggaatagaataaaatttaaaatgcatacaaaaaattaataaaaaaatcattaattttttttttttgttacattggaatgatcattccttttttaaaaaattgaatagtcattccaccaaaatagtggaaagaacattctattagaatatcattccaatacttttaaatgtaaccaaacaaaaaatggaataaaaattgtttcctttccattctatttcatcacctccaaccaaaccaaacgccacctaataacaatgacactgaaaagttttagaaattctcaattccaaaatgccccgatcatattattgaattacatatatatatattttctgataaaatattattatattttaattattattttggtaattataattctattaattttttaattgaaaaaaaatatgaaaaaaaaaaataaaacagaaaaaacattagctttatttttaaaattgaaatgtaattggagatggtctaagtaatatattgagcatattagcaaccattaccaacaaacacattaatgatttttcattagttacagattaattattaaattaaaatatgattcatatcgtttttttcattatttttttaaaataatacaatgctgaaaatattaaatttgccacaattatccttcattaaatgccaacattctttatatgaaatctcttttttttagaaaaatcaacaatttgattttcaggtttcaaatttcgattaatggcggtccaagaaaatatacaaatccaaaatcaaagaaattaacgataatagtagaaatgaaaattctcagaaaaagcacaccataatcaagaaaaatgtaagcaaaccaataccttaaaccaaaacaattggcgttaattttttttttctggttctttttcaatctttgatcattattacaagcattatatatatgataataagaaaaccgagaaggaaaaaacctcaatcgatgatcagatcatcagacagggaggttaacgacgtcgttttgaggtcggtgatcactgagattaacagatctggaagcggagagcatgagtggacgatcgtggctctcttcgctgccgtcgatcccatcgtgatcgtcggtggtggaaaggttgatgcaagaacaacgctccaatgaggcaaagaaggcggatgccacgtaggcaccgactatggtggccattccgttaagcttctcgcatgtgctctggctctgattctccattgattgaagaagatgaagaagaagagagagagag

SEQ ID NO: 78386 - DNA, 847 bp, Cannabis sativa
aaagaaagagaaagagcattgaaggttctgatgatcttggagaagtaattaacgaggttgcattagttattggtagagaaatgaaagagtcatttgctcaactaagtgatgtaattaataataaagaactgaacgaacgacaaatgggcctcgatgaagaattaataagaaaaacttttttggacatgtttgatcgacataaagctaccctcctcattactcgtgatattcacactcttaatgtgtttagcggtcttcctgatgacgagaagaaagtatgggtaaaagttttattggatggtcatattgtatctcaaatttgaaaaacataatgcatataaacttatgtagaacttgaattattacgtgtataagttataaatatattatatttggaagtaaagatgaaaccaattgctaatcatataatattgttattcataatattatctatttttaattagttatgatttacattaatatatgttcatatattaattttattttattataaattaaataattatttttattaataataaaattgttttcattttattttttataaatattaaaaaaatagggcttttttcattaatactgttatagttaataatttaatcaaaaatactgtcattaataaacctaatcatttctacggtatatgtatattttttgtgcaaaattacaaaaggtaccaacttacaacacaatttaaagaaattaaggaaaaaaatctggttccaaacttcttgatttttggctctgacaactagtatagagctatatcaatcttccacaaccacaaaatctatctctttttagttatgacttggattatggcttt

SEQ ID NO: 78387 - DNA, 508 bp, Cannabis sativa
tttcctgaaaaagtcaactgtttctattgcatggaattttgaggtgaaagcgaagctttaattgggccttgggccaacaagtaatccatctagggcctttcattttttgggtccgaaatcatgttccaaggatctaaagtcctcaatatccaatatgggattacaaaatgacaattctcccatatatttttccacagtgcccataccagtaagggttttatatcccctagcccataattcctgtaaaggagatggtattaccttgccaaggagactagagtaagaattttgattcaagtgatccatcccagaagggcccaagcccacagaagtgatgttagtcccgaaaggtgggaccaccgagcgattaaaaaggtgagtactagccccatcagaatgttggttagaggaactcgataccaaagaggaagaagcttaaccgttcttactcatggtggtctgtggcatctgcactatgtcctaatgaacatctgatgatcccggtact

SEQ ID NO: 78388 - DNA, 536 bp, Cannabis sativa
  modified_base (39)..(52): a, c, t, g, unknown or other
accgctcttccgatcttagatagacacttttaatatatnnnnnnnnnnnnnnatatatatatataaaaaaattacataatagatatcctaatttgaaaaggccccattttttttttatctctccattattttatccatgagaccaaaccgttaaagctctgttgaaaaaaaaaaaaaaacacacacatttcttttatgtatacaagaaatatcttaagctccactactactgcaaaatagtgaaaataacctaagtattaaactgaaataaattcatgaaatgatttttgatcctaaatgtcatatagaataactaatgatctaatttataatgagtcatgaaaagtgaatagctacaataaatttttttattcatgaataactaaaaggaaaggcctttcttcattctacaatttttttttttatttttattttaaattcttccattcacaattagaagtacagaaaggttggaaaaagaattaaaaggattcattatccatctataagctaaaattatataagatatttcagat

SEQ ID NO: 78389 - DNA, 588 bp, Cannabis sativa
ctctcccctggcggaatactggttatttccgtcgtcagagagccagaatattaaattaatttataattttatttggatgaatattcatatatatatatatatatatatataaataaatacaataattatggaaatatattttttaaatggataaccctcattaattaccattatagaaatatatttggtgaactttgtttactactgctatatacatatatatttattttatttatgtattttttttgaaaaaaaaagtctcttcacatcaaaagaaaaaaaaattccttttatcatatttaattgtatgactgacattaattatatatgtaatttaagcatgtaattttttttaagcatatttatcatatttatcatatattttttcttaagcatgtaaattaaaagagtctatatacatctattttctatcctatttggaaaaaaatcactaaacaaataaataaaatatttaggataatatttcaagtatttttggtaaaatagtcattttatttttgtaaatattaattaatttgtttaatgattttattttataatttcctgcaaattaatgacatccagtaa

SEQ ID NO: 78390 - DNA, 601 bp, Cannabis sativa
atctaaattatatgatatataaatatatatataataaaagcatattattatcccaatttttgcccacctgacgtggcatgcttacgtagacaaaattatcatgtggcaatatagctcaccaacaagaaggtaaagttagcaccttagccaacgagggttctggcgctcaaacgggacaataagtagcagaccaacttcctcaaaggagctggccgaccacccctggccggccagcctctggaaaacacaaggcgggccagcttgttccttgtaggtccctgatctaccaggactggacctgacatgattctgtgcacagttttacacgtggactgggagttggactacaaattgggcctttacagcccaataaagtagctaaaaaatatctatgtttaagggtattttagtcttttgtatttaattaatttaatatacaaatatctacttattttattgttaaattagggtttaggctctcctatataaagggccttaactcaaccttagaatacctaactcattaagtcactaagtcatgaagtgcctagcctcattctaagtgtaagtctctaagtctgatctctctctctctctctct

SEQ ID NO: 78391 - DNA, 1225 bp, Cannabis sativa
gtgaaggtagtgggggaaaatgtaagtttagagcctctaaactctataatagcttgttggtttgtaatcaagacaacttctttagagctatttcgtgtagatttaatctgcccaagcacaaatttatcctctggcaagcagttcataagcatcttctcactcgggatcaactttctcatgttggcaatacagttacttcgagtgattgcttggtttgtggattgagcattgagagtcataatcatttattttttcactgtcaatttttaatttgagttattcaaatgttgtttaattggcttggtttcaaggcttggcctttacagtttgaaggttggttgactgtgatctctaattaacacagcagggaagtctaagaatgacattacttttgctactcttgctctgcaacggtttactatctttggttgaataaaaataaatgtatccatgagaatacttcttacactgttttacatatagttaagaaaattcaaagagttattaaatgtcgtttgtatagtatattacacatgaaacataatacttgtaattatagaatgattagctgttagttggcttgagggccgggttgtgtggttgttggttgtcaagtgtggcgtttgcccttgattaataatttttttttttcgttgataaaaaaagaaagtaatataatttgtagggaattgtaaagaatttttttttttaattaaaatgtattaccttgtgattattttttttaatagtagtgataatattatcatagactaagaagaaaatatatcgacaatcaaaaaagtagtgtataatgcatatttacataaaaagaattgttcaataaatgagaaatttttattataccaaattttttttatcaacttgaaattaattagaatttggacgtattacaattacagtaaaatctctatttaagaatactctattcaagaataaattctaatttattataaaaaaattaagtcccaatttgagtcaattataaataagaataacctctaaattgtaattaattatacattttctaagtcctattaacaaaatatacttctatataagaataattacatcttaataaaatataaacatatatatgttgtaaatttatttaagtaaaattaataattttatgctaaattataatacatgtataaatattatatttactctaaaataattctattattacatagtattaataatt

SEQ ID NO: 78392 - DNA, 1249 bp, Cannabis sativa
ggggattgagacagcctgccatattcctctcattcaatcccatgattatagggattgccttcgtgcttgggcttcacgataccattctagagtagtgaagtcttggtacatagctcggagaacttttctcttttttttctcggataatctgccctttactctgctcagataagcagactttgtgcgtgcaaatatgttgcttgaagtctgttcgtaatatctctctgcccaagtacaaggaatgatggacacatgtcactcgtacatgcttccatatcatagtgcgaaaaatgggataacattttccccccaagtctgtgcgggacttctgaagtcgctcgtggacttccctcagtttggatatttatttgaatgggtggtacgtgttcgaagcgtctgttggtgatatggcatgattttgaccaagggtctcttcaatatttagctcattaatgctaactgacatgtacctcaaattactcccaaaaaatagcaagtcttgacggttgccattcaggtacttgagtgtttaacgtttacttttgggaggaaactgatgcatttaaattttgaaacgattgtccttcttcgctaatcggcttaaaaatagagcagaaatccctaataaaccactattagcatgtttcattcttgaagagttcagaataagaaagcttttcctctcaagttcttcgaagaatccccaggaagtgccgatcagtgtcatctaagtttgattttctgggtttccactgtagaaaattcgatagttcttaaacttgttctaggaaaaccgtagagaatctaggtttaggaatatgatattttgataatgttcaaccatgtggctttgcattctgatttcgattccatgatattcggtttcacttgcccattcggggtttagtgaaaattaacccttaattcgaagttttgaaattcttgattataaacctaatatcatgcaaaattcacttttttaatccttcgatcagacctggtaagtacatttttttttgttcgatatctcggctaaatactcatcttgtgtcctaccttttgtagatgaaccctggtgagttttagggaggcgaacatcatatccaccaggaccttcttcaacttttgtacaaggatcatccctctctttgtgctagggctgtacatcggtcggtttgggcggtttatcctatatattttctaacccaatctacagttcgggttgctaaaatttaagtgcaacccgccc

SEQ ID NO: 78393 - DNA, 881 bp, Cannabis sativa
ggacgatttagtttgttgagaaaagaatgatacattggaaagaaatttgtgcaacttatttttgttttcgggcccagctctcaatttccaacgtgatcaaattaaggactaaagaattaactgtttcaatacataaatgggatcaatcaaatgaaataaaatcgtcaaagcctgtctccttggactactagcacatgatcaattacttcaatttgacccttcaaaagaagaaacacaaatcccaaaaggtttctcgtaaatatgaatttctttcaacataccatgattatttctgcttttatttgtagtgttgaaagcatttaataattattgtttttaaaaaaaaaattgaaaattttcattaaaatagacaaagtatagagaaatgttaaaagatatcagtggtgcttagcattatactatgtgtcattatctttattaatctaattaagtatcgggtctcatatagtttaatgtaataaattttaggaactatcactagccaatcacaaacgacatgtctagaggtgttagacactactagtgcccaataacaatgctccaaaatatataataaaatcactctaaaaaaacaaaatcaataaaattagacaaacaatatcgtttacaatataagggaaaaaaattctaatagcacattaactaagagactaagaaaccgccaacgttagagcataaaagaagtacaaaaaatgctaaatttctcatccaaataaatatgttacgaatcacacccactaatgacaatcaatcattgatcttccaataaaaaaagaggaaaaaaaaccactatgcaaaatcgaagtaagaggcaatgacaaactaacaactatggggaggcaaacaaacacaagagattt

SEQ ID NO: 78394 - DNA, 680 bp, Cannabis sativa
aacaaaaaaatcaaacaagactataatcatttcacacaaattctcaatcatgcatttccaaggatataaacacaaaattcatgtttttcaatcctcataccagcaacaaatttaacaagtaaagagggtaagaactaccttaaatccaagccttcaaagtacaacaagaaccacttccaaaaccaccaccaaaaccaagtgatttcctcacaacaaaagcttcaaagtaaagagtaaagagagaaagagggaggtcagttcaaaggggctgagaaacactccaataaatttatctcattacttaccattttctttttgttgaaaaataactcaattaggcaaaattacaataatacccctagggccatataacacatatacttcatccatgggcgaaactgtcattatcataccacacatttacttaaataatttttagaatattcacacactaataaaatgccaatacaaaattccaaaattattattctaaaaaaatttcaacattttacctaatgtaaaaaatagaacccaacctaatttacactaaaggacaaaataaattaacattagaatagaccatattgcctttttctaataaaaatccattaaaaatcttaagggcatttaagtaattctagttaatccgccaaaccgacaacccaaatctctaaactagt

SEQ ID NO: 78395 - DNA, 726 bp, Cannabis sativa
tcgtcggtgataaaaacaattaccaacgactttgttgttttggcaagaagaagctattttctttttaaatccgtaaggctatcaatgacgactttttcgtcattgatacgaaaaagtcgccattgatttatttattttataaaacaaattataaataaaaaaataatttttattaaatattaattttttcaccaatcagtttttattatatatttttttaatcaaacaatatataaaacaattaaattaaaagtgaaacataacaccaaactaaatttttttatatcaaatatcaaatgtcaaatataacaatatccttcaataaagataatagtaaagataatagttgctaaaataaatattcataaaccataaataaatattaaagtaatagttcatataactaaaataaaaatactaaaagaaatttgttgttgcgtcgtcatcatcatcatcattagcatttctcagaatttacggttgaggagcatccagcattgtgggtagtatggaggcatctgtgaacttgtcatcatctgagcagtctgttgcccatgtggtgtcggcatatgtgatgtttgctgcccatattgtcgccctagtggtgtcgacatcatctaaaaagtctgcagcatctgtgacatttgttgcgtcggcatcacttgtggcatttgagactgtgagacttgagacgtctgaggcgactgcgtcatcatctgcatcatt

SEQ ID NO: 78396 - DNA, 962 bp, Cannabis sativa
ttttttttttttttttaataataacaatgatcagtatttatacaatggaatagtaaatgataaattaagtagtgttaggaataaaattattcatatgagttagtcatcaatatagcttagccaatgatccaatacacgttttctagagcaatttataaaaaataataacaaaaaaaatacactatttctacatcaagcctgatattataacaaatcataattagaggatatacagtctgtaatcattgaaagttgaccaattaaggcttttctagaacaagctcgactacaaaaatattgttccagctatattctaccaaaaaaaaaaaaaagtcaacgaaagtctttttcacataattttattaaacacgatcctcttaactaggttccattaacttcgtttacacctaaggtggcaatctcgcaactatagtatatataggcttgtcttttacttctaatttgttggtttattaatggctatattagtttattactcatggtctggtgaagtgaggtgatcgtgatataataatatacattacaatttataatcacataacgttacatttgccaaaatgtacatataaactaaattataatgtagggggtattacacactatatcataaatatatatataacattaattattaggggccaaaataagaagccatgtagcctataagcaaagaaagatatctttttatctagttggcttaccatgaaaggaggaaaggttctggcaagttgttcttaacatttataatcagattatcgttggtaacagcataaatgttaggccccggaaataaaccattgataagaattccctgcattaataatatttaatgtcacaaataagttaacacaaactaacattataatgcaaaaactaactattagtatatatatatgtatgtgttgacttgtacatgtatatataagataattatgtatacg

SEQ ID NO: 78397 - DNA, 1465 bp, Cannabis sativa
ctgggttctgagttttaagagacaccgatctttctggctttcttttttttaactttgatgaatagaaattagaagttatgctattctgttattatttcatttctttacattaataacattttgttctatcattatcagagagcaataaacataaatcactttggttgaggtagcggatttggtattcattatgctaaaactatattatagcctaatagcagctctttagagaaagtctcttggggctaggtgaatttcagttatatttattattagtctattgtgaagaaactgaaaataatagtactattttttctaggtacgggtaaaatactataaatatatataatttttctttttccatttttgtataaaaaatgaaactttatattaaaatttcacttatcacgattgtagttacatactatgaataaggtacttgatgacgagtcacccaccatgcaaaaagcaagcccatatagatcaactacgaaatttaattcccattgaaagttgatcttcaattaagatatataagcaagatcttctctccatgatgttttagtactccatattcaaacactaaatcaattatctttgccggccaaaaaagtgaaattttatacgtacatatttatatattatcctcggacaaccacttgtttttcccacttttttgatataaatgtatgagcgtttgttgctccttggtctggtccgatatagaatgatatgaaactgtggggtcaatagtttgacctttaaatataataagaccttgatatgaaaatgttacacattgtgcctttcacacatccacaatctttgtatttcttattcattttcaattaatatgggtggacaattgccttaattaacacaagtaattatggttcccatttcataccaaagtgtaaaagacctatgttaaggttagttttgaacaaagggtatctcttagtcttagctatagctagcaaagaaagagagtggaaacaaatacaagaattacatatatatattgatacatacgataggatataaaattcgagatgcatcattataataattctattaatttgacttgtataaaaatatttataattttcatactttttttttcagtgcgcattgttactcgagtatacactaaccccacaataatttaattgacttaattggtcattggagttccacatcaaactcgactgtgcggcccaattatacatcaactttctatcacactctgttatactttttctttttcctttttcaaacccatcaccaaaaacaagtttaacacatcaataacgaaatattaaaaattattcatttaagtctgttcattatatctgagtgcaaatgtagatgaagatcatgtataagagactaatccagcactaccaataaattaaactactacttcctgaataactgtgaaatttcttacattaatatcaataaa

SEQ ID NO: 78398 - DNA, 1118 bp, Cannabis sativa
cgggcaacctcaagagggaaagttgcagtacttgaaatagcaccagctgctgatccactgagaagagtttcaatgttgccaatcttattatcttggttgagaaaatttctatatgctttgcgtaaagaatcatatgcaaagtaattagtggctgcatatgggattactccaataagactaggggcaagacctctatagagttctgcaggtccctcttctcttaaaattttcaagaacgcatcgaaaagaccgtcatagacacctctctgtattgttagacgagtcttgagcaactctaaagggtatgtgcacaatgttgagctaactccagcacatgccccagcaattaatgagggagggattgggtgtttggcttgttcgcctagttttggtgtcaaatgcttattaactgtgtcgtaagcaaacagctctatggccttgcttggtgcaacacgaatcacattgacaaaattacctctaaataatcccttccactcatcagtcttcataatatcattgaagacttcagttgtggaatgcccactagtcccaaccatcaaatgagtccttatagtctctaatggcgcaacggccgttcgagaaactgccccggctatggcaccgcttattaacctctgcagagaaggattagaaaccttaatcttcaacttattcttctttttcttcttcgttagtccatcctcctcttgacccccgaatcttctaataccctgcatgaacttcatgtaaaagtcggtgtacgaaagcttcatgccgccaccgccgcccccaccgtcggcatgggggttcggcgaaacaccaagaccttgaccaacactggcgaataagccaccggggtgatgaaagccatcttggaaattccattgagaagaccctaaatcgcaaaaggagcaaaaaccatctttcgtctcgtcaaatagttgaactcctctcctacccattaatccaagaaagaaaaagaaaaggaaaaaacttgcagacacactcacttttcttttcctcttcttctagggttctaatggaaaagtcaaagcattccttctattgttattgttatttacaagagtttgagtcaacaatcaattttgagcaaatgg

SEQ ID NO: 78399 - DNA, 909 bp, Cannabis sativa
acaaatattttatcactattgtagatgatcattctaggtatccttggatacattttattaaaaacaaaggtgaagcacaaattgctatccctaattttatccaacttatcaaaactcagtaccgaaagaccatcaaagccattagatcagataatgccaaggaattacagtttgtggatttgttagtaagcttggtattgttcattttcactcttgcatttatagacctcaatagaactctgttgtcgtgaggaagcatcaacatttactaaatcttgctcgagctttcttgtttcagtcatatgtaccctaagtttattggaatgaatgtgtgtcaactgctacctacttgataaataggactccaacaccaaaattacaacatgtctctcccttccaagttcttaaatctaaaccaccaaattatactcatttgagagcatttggttgtctggcctatgcttccacattatctgttaatagattaaaattttccccaagagtagtcccatgtatttttctaggctaccctactggtacgaaagcctacaagttgttggatcttaattccaacagaatcttttgctctagagatgtccaatttcatgaaactatcttcctttttcattcagatgattcttttcttgatgaatatcagaattttttctctaagtcagccactgatctctcaagtgatgagagtcaacatcctaaaaatctcatgtctacactttccccacagaatagtgacatgtctaattctgattctccttcacaaaataatgatctttccaaaaatagacctgttaagtctctcacaagctatcgtatttacaggattatcattgttttctaactcagactaacttttttaatgtgtttcaaaaaccttctcatgttactccttac

SEQ ID NO: 78400 - DNA, 3050 bp, Cannabis sativa
  modified_base (967)..(999): a, c, t, g, unknown or other
tttcctcgttctctctctttctaccagccatcaccaccgccatttgccaacattgctgccaccgccaccatccaccaccgtcgagagcagccaccatttgcccaaaaatatgggcaagttattttactaaaaaatgttgttggagctggctatttatatatatgtttgttttaacagattcacatttgtattttgttaattttttcctatttattggatttcgaattttaagcgttttttgtctggttttccagtttttcataatattttgcgacaataaaccaaataaacatttgcatattttgcgatgaatgactaaaaaaatacaaatcacttcgtgaaacattgcaaaatcatcgtgaaagcttgagtattttttgcgatgtttcacgatgcgatttacattgtttagtcacacattacaaatacatcaaaaagtcattgtaaaatacatgtttaattttttagtcaaaaatatcgcaaaacatcatctttaacttcaaatttggtttatcatctcaaatgcatcatagaatatcgcaaaaaattggaaaggagaaggaaagagagtggaagtttggttaggaagataatgagatgagtatttttagtagaagaggaaaaaatatcattctaaagtgtaggagggattgttttgttatgtgaggcacatttaacttaaatgattcaagcatgcataaaactcaaattttcattttataaaatgaaatggtttcacaacaaatttgattttagatgaaacgatgttattaacgatgctaggaaaataattttacaaaaatttgattttagaaaccaaaatgacgttattgatgatagtttcattaaaacctgattttagaggccagtatttttatgggactatgacaaaattgttaagcatcgtctttcctcaaaaatctatagatttcagatttatagatttgaaataataataataataatnnnnnnnnnnnnnnnnnnnnnnnnnnnnnnnnnaataataataataataatcacgatcaaaactaaaaaaatcaaaagtacaaatgtgttggaaactttttcaacaaaaaaaaaaaatgaaatgatcaatgatgagccccactggtgctagtgttgttgaagagtctttcgtttgtttgtactttgtataactaataagatttttcttccaaaaaaaataaaactaataagattttatttcgtatggttgtttaaagattttttttttttgaatgaaaattataatttattagagagataattcctctaaaataatagactgaagaacagaaggaatattattcttagtaaaaagacggtcagaccaataacaagcactacgtgccgtacagtgcgcgactttattaacagaccgtttaacatgacaaaaaaaaaacataatctaaagaaaaaagcataaactgacattcttgaacaattaaaccaaatataaattttatttcgtatagttatttaaagattcttaatatgtactagaaactatttatatatatgataaaaataaatttaatgcatatatatattttcaattcattacatcattaagttacaattgaataatataagactaatttacaatgtaattattttatgttttaatttttatacacttaaatacttaatttttttttttatagtaaaattcccttaattttttttttcaaattttaggcgtcattaaaaaccaacgggatgatcactgtgtacacatgtgtacgtatacgtgaaaataaaattttgaaacgaatacagtaataatccagtcggtatttaatgacaatatcaagccgacacctcaaatttataaaaaaaaaaataatcataaataagttttgccaaaaaaaaaaagtaaatagattaagtataaaataaaaaaaataacaggtttcaccgcaaataactcataagatattatattgtactgtacaatatattattaatgggtagactataaaataattcttaatccaatacagttctcccctaaatatccatgaagggaagaagagtataagaaacaatttcgctactaccgtcataatcactactcactacgggagacaaatacatgtgtatacaaatgttaatcttgacttgaacttacccaaacctgcatagagccaccactaacagcctagaccactcccaccagtgtctttaatttaaactaactaaatcttcaaaataatagctaaaggattgtatttccatcagctttataaaccatattcaaaattaaaaaaaatgaacagtattcttcattgcatctccacatctagagatgcaacagtagtttcttcaaaatttttgattaatattgttgacgcagtttttctttagtaatgattgtcacaaaataatgtatcattaccagtataattaattaatatgtcttacgttaaaaatttaataaaagtttgcaattcaatcaacaaacttcgaagttgatgtaaaatatgttttgctcccattgatcactatattgaagtataactgtaattttatttattccttttatttataaaaatatatttttagtaaaaataataaattgttttttttttattaatttataatttatttataattgtattataattgtcacgagactatttttctgattgtttctagttgttttataatttattaataattgatttatagttgtcaaattaatttctcactgttttttagttttactaaacaaagtatatttttataattttaaaattttataaatatatttttgtaattaattttagactgtaaaattgtaaataaaacataaacgaaagatatttttaaagggttaaactaattcaattttgcagctccaaaacaaatttaattatgatttaactaagattaatggttgagttctatatataaaagttgagaatagatgggtaatttttattgtcaagtttactacaacctaataaaatttttatggataacttaaaaattatctaaaaattaaagatctcacaaattcacaatcaagtaatcaactcttaaatctt

SEQ ID NO: 78401 - DNA, 860 bp, Cannabis sativa
cttggccggccggaccccttgatagcctcccttggtcggctaggtcttgcacaagaccttcttggctggctaggacctgcaccgatcaaaacttgtgtgtttttttttcatgaaactcaaacatgctcttcgcgttctccgtgttctttttgactcaaagagccaagactcacaacgaatgtcaaattcaaatcttttttgtatagaaatcacacattatgtatcctaaggctatcatgcgaatcaaaataccgaaaggacaacaatctaacataggaatcaaaggatgttcaaagcaataaatagagttcatgcattcatggtaaaaccaaccaaatcacaggaaataacgagaatagaaagcgtaccaactacaagacaccgttgaggaacaatgtgggaagcttagatcgttgaaatggcacaaaaatcctaagagaatgtttcttgatgggttcgacgctcttgagagaaggagaagcttcttcaaatgcaaatttcaagtgagagaaagtaaaatgtaaaaactgaaaaactaaaaactgaaaaggcttttcctctaaaagcacttatatagtacaagtgggacccctttcttcacatacttcacctacacatcaaagagccaattaaagtagttacttttctacagcaaatgagatcagacagtcaaggcaaagtatttcaaaaggctaaaaatgtaggaacttttattcagaaaaggctagaacaatctcgactgaaccaacatagtgttgggttttgtgcctaaaataaaacccatttcaatataatcggatttactaattaataaagaccagaaatcacattttatattccatggttcacatgatttattt

SEQ ID NO: 78402 - DNA, 763 bp, Cannabis sativa
ttaagggattagggtttcataagtatcttgggtagcgtgcctaattatttaaggcgttacaacaatagtgttttcgtgaacagagaagtaaagttatattgtaacagtgccaagactcgaaatcaattggaaattctaccaccaccgtgattgtttaaactgaatattaaactagctatcagagaaataaggttgggattggggcagtggttaagaattgtaaatggcaggtaatttgtggtttatcttctccagttgatagtaagatgacccctgttcttgtagaagttgtggctttacgacaagctcttctttggtgtgatctagtagattttctaattgtgtttgttcaatctgactctcaaattcttgtgaataaatttaggcataaatggaaaaataaatcatctttatcagatgttgtacaagatgttgtgttctatttgtctaaaatttctaatgcttctcttaattatgtactcagggcagaggcgaacccacatataggcgaggtggacaatcgccccctaaaaaaattaagaaatatatatatatgtattttagcaagttacaacatattattttttaattaaattaaagtgatatctatgaacataaaacaagttatggtataaaggtaaatctatatcatgcacataatagaggtcacgagttcttaattattgaacccaatatttttattcttactttattttttactttacactacatttgataataaaatataaatttgcattaattt

SEQ ID NO: 78403 - DNA, 736 bp, Cannabis sativa
aaataatttccaacacatacctaccatgcactcctttcatattttgaccgactagccctatgttaggcagggtttgcctgttctcccctggttggctggtgcagcctgtgtgtcaactggaggtagattacaccaattgctggagttaggtgtatctatgtgtctgaagtgattctattcacttctcaagctgttattgtcttaggtgtttttacctgttcccaggcctagccggttaaagattggtctttgggtgacttgctctcggatgctccaaggaggaagttcaccttgttggtcggccagaggtgcaccattaaggggctggccggccaaaggttggctaagtgagtgtgttgttgtgccaaaaatcccgggtcgaccccccaagccgctagttgtgagagtttgcctgctcccgccattagatctgtgtggcaggatttgtccacctctacgcaggggaaggtccgtcctagttcctaaagaacttggttggactgtttgtctgtagaccctgcccaatctgttgactagtctcccttagagaggatacctaattagttcatgacctttctcgatagttctttcattgaactgccttatcaggtcattagcttccttgttacgacggtctagctccgtctgatgagatcgaaggatgtactcctggtcattcatctatctcagaaatttatgtctctgttttgcgaatgcatcgcatccaacaatgcgt

SEQ ID NO: 78404 - DNA, 2156 bp, Cannabis sativa
aaagggaaaaatattttcgtaaaagataacatctcttgaatgaaatagttgtttggtttgaaggtctagtagagtgtaggccttcatatttggaggataaccaatacatgcacaagctcttgctcgaggggaaaacttggtggaggtgctaacatgagatgcatatgcaagacaaccgaagtttcgaagatggttgtattgggggggtttgttgtgtaataattgataagaagtttggtcttttagaaggatggatggtgttctatttaacaaatagacaccagtagagatcatgaaagaccaatattgtagggataagttggattgaaaggcaagggctcgggcaacattcaaaatatgctggtgtttcctttctaccacagcattttgctgtggtcttcctacacaggaagtgtgatgtatagtcccttgagaagcataaaaggaagtgagggtgagttctttagcattatcggttcttattgctttgatattggtcttatactgagtatgtatgagtttgaaaaaactctgtattgccaatattgcatctgatttggtttttaaaaaatataaccaagtgtgtcttgagtgatcatccactatggttaagataacttttgaagatacaaaaaatgtaaccagttttaccataacatctctagatcgaattattattatattttattttgacaaaaaatcaattgaaagtcctatttatacaattttgaaaaatacatggtccattttatcatttaacaaaatagagagtccaattaataacttttgcaaaatacagagtccaaaatgatattcaccctaaattttactacctataaaatgttctccacaagatgctattttccaaaacgtccttgcaaagtctgctacttatgaaaatatttatatttttttggataattttattggacactcaattttggcatttgtattaggaatgtatattgcagcttatttttttattcattttattggaccctgagggagtatgctgccaaatgagatactcttcagacggagacaaaaggagaggaatggtgaggatgacattaacaacttcctttgggaaatagtgggagaggcagggaagattctaggtcatgttattatttatgaagtgtgcaacctgggttggaggatcacaatgggtggtcacaaacatagtatttgggatccagtaatcatgcacagggtcagtttttttttgtcgtttccaatcttttatataagaccatgtttcaacaaatcctttccccagttaatgctacgctacactagagaaggggcacgcgcaacagtactgtcaaggaaagaagagtgaggatgatatctagttgcaagaactttagccacaagagagtttggatgtttcaacagtcttcaagcttgcttagcaagcatagcttagttgaagtaaaacaattaatatttagggaggcatattgataaacttgtatataattttctttttacataattaatatatatataaatctataaaaacaaaacatttagggagggttgtataaaatcataagaataatattggattaaactaattcttagattaattatagaatcaaaatcataattagagtttcatctacaatataacaactaagaaaattagtcatgtagagcagaaaatatatgggtcgtgctttttgacacaacacgagtttaggaggcacgagcacaacttaatatgaaaaaatataggtttaacatgacacgtcatgttgctgcaaattggcatgatgttatacaaaaaatataggcattcacacgacatgagaaatctaaaaacacaacacgtaagtacaaatagactaatccaagagcacaacacattaaaaattcttataatactaataatgataataataacaataataatagtaatagtaataataataacaatgcatatgtatttacttataaatattcaaattttaattattttcaatagtttcgtatataattatacataaagtattgttgaaaaattatataaaaaaacatacatttacgtgattaactcattaattatataaaaaaaaattagaaaagtgaagcccgagtactacccgtataagaaaagtgaaaattacatgaaatatgggatttcataacaa

SEQ ID NO: 78405 - DNA, 847 bp, Cannabis sativa
  modified_base (643)..(647): a, c, t, g, unknown or other
cccatgggctcgcatgcgagcccccatcctctcataccatgccaaccttcattacttcagctcaccctagactcacactccctctttccccttgctcgcacacctttaccccccctatggcttgcatgcgaccccccttgtgggctcgcacgcaagccttcgtaccacactccaacactttctcactcacccatgggcatgacgcctatccacacatgtatagtctctccttctttcacccgcgctcttgtcattggatcactaagggactaaacatcgaatagcacgggtactccactgcgagtcgaatggatgctccaccacttgcacaaaggttccacgactcacccaaatgcctccagcttatccaacgacccatgggctcccacaacatcccatgggctcgtacaatagccatggggtcgtacaatagctataggctcgcataccaagttgtcacaattcaacagtcttagtattttggccataactctctcgatatatattggaattggaagattcaagatgcgttggaaagatgagaatgagacatttgaatcttatgttcatggcaagatctaattctgaacatatcactacaaaaatcttccaataattgtaacttagtaagttgatcttactnnnnntactcgtgagttgttacggggttgacctccgagttgtagggttatacctcaaaacttgcaagcatagattttcgagattaacgatcctcatgccatatgcattgacttagtcattctttgaccgatcttacaactgatgtctctcgaccgcagggactaatcgttgactaaactcaaaaattaactctgtcgatttttgg

SEQ ID NO: 78406 - DNA, 871 bp, Cannabis sativa
cttgctgatcaaatggttggtcttctttgtagattttttagtatgtgtttttttaatcttattctttcaatcgtttattcactgtaaactgttttgcacttctatttcagatcaatcgtgttgaatttgttcattcgaaatcattcctacatcgcgatatcaagcctgacaattttctaatgggtctagggaggcgtgcaaatcaggtttgacaaaatttatatgtagaaagacatatttggatatactggttctatttgtcagtgagtgtataccaatttggtatttgcttttctcttgcatgcaggtttacataattgactttggtctagcaaagaaatatagagacagttccacacatcaacatattccttacaggtaagtctaagcttgaacctttctactttgttttaatgataaaatttaagcttaatttcttatattgatcgtcataactttgcagagaaaataagaatttgactggaactgcaagatatgcaagcatgaacacacaccttggcattggtatgttatcttgtgactattttccttctgccgctagtgtatcacagtaaagtttttttcaagttattagtgtcatcaataagatatgtgacattctgacttttacagagcaaagccggagggatgatttagaatctcttggatatgttcttatgtacttccttagaggaaggtaattgttttttcttgtgccactttttgtatttttgtagctctattaaattaataatagtttactacagtcttccttggcaaggactgaaagctggaactaagaaacaaaagtatgagaaaattagtgaaaagaaagtttctacttcaattgaggtatggtgtagcatgcata

SEQ ID NO: 78407 - DNA, 1859 bp, Cannabis sativa
atttttagtgtctggtgaggatagcgattccacttagcacttttgagtctggaggagattctttcaatgtcccccatggacgtacctcctatagatgtggatctcaaagacccaactttagatgaggcaccttttgaatctatttagaccaaacgatgagaaaaaggcaaaggcaaggctcgcgtcgcatctccagctcctcttgtgcaaaatgattccatataggaaatagaccaaaggccaaaccagttgagaaattatggcctgttggagacatactttgctaatagaggtgtatgaaacattctgggactcatgtggcaccagatgtttgtccttggagagtcatcatcccagagcgtagatggtttcagagcatggagttgggcccatatctcctgcggagcccaccttttgctcagaacttactttgctcaattttgtatcaaagctagagttgctcctttctaggtcttcttcagtcgcgtacaagctactctctaggtggtttatattttgtaggtcccgaggtcaggccggcccaaccctggaagaaattttgtacttttgtgacttgaaatcacaacctatgcaagggtatcctacaaagattggcttttatcgcctctagatgttcaaacacattcggtgtcccacaagctcttcttcccattgtccataacaaggaagtactagttcttcaccatgggctttcccatgaggcgtgttccaaaaatttccttggacatcaaatttctctgtaaaatcctcatccttcttcattttccttgatagcttaaaagaggattccatttcacgatctgatgctggtttgttttttgttgaatccatccctacaacagtacccaaagatgagctgaggcagcggatcaccttccacaaacccttcacaaaggaagaactgaaggtggaggacatggtgacctccaaatttctatgccaataaagcttcattgccaggtttaaaagcattcacggagtaagtggcaggggtaaacctcaaactcttagtgacctcaaagaaataactaccctagaatttttaatttcgatagcaaagtcaaccaaggatgaggagcttcttcccgctgcctgggaaaattatcatcctaaacccctcatgaaagaagaggaaatccaagctaggttccatgcagtgtactcggatgtgagcactttcgaaacaagtactctagaagagggaaactgcccttttgcattattcgtactgccagcttatctcagatgtcactgatagacaaaggggtttttaaccattttttcctaagcttggatcctcgtagatatccgatgaaggattattttgatagagtagataaaatagttaggcacctaaatagataggaattccccccaaacattactaaactgcgtcctttccttactatgttcttcacaaactttagggaatatgatagcttcattagtcaggaagaaataactttatttgcatgaggggaaccttataattacaccttcaacggttgcaatcacatgatatctctgttattttatgctgtgtggtttaagttgctatttcctacttctttgactaatttgatcatggtggtgtttggatattttcagatacgcttgagtccaggatgctaagtgatctggtgagcattattcataaggttaatgctatagctgacaacaaagggaaatagaagaaatctcaggccaaaaaggtcagccacacaatggacccccaagcacccctactcaggatcaaggagatttccatgacccgaatgactcttagaggtggtagtaatggagccacctaatcgctagctccatcaggcgctgtgcct

SEQ ID NO: 78408 - DNA, 934 bp, Cannabis sativa
atttgacaatatgtcaacctgacgctgggtgcatcaccaagtggcccaggcaccaggtgcccgagtgttttaaaggggaagtgttccaattctaattctagtacctataacatgtttatggaatgtcttattcatgtctaagtacaaatttgaggcattttcactaagacgaacccgaaaactgaaaccctagtcaggaatgtcaaactgggtgctgggtgaaaaccctaggtgcccgagttgactttcgagatgctgttttgtctcttttcaattttcaggcctcaaacttggattcttcttagttcataatattgaaggatggtgagttggaaacaacatagcgggatttaaatacccattttgaagttcctagagtcaacctaggcgcagagctagggacccctcccaaactaattgctatgactcaggactactcaactccgtaaatattttcttacttgccacatgtcaaacattgatatccaaatcactaggattagtttttaggtaaaaatactcatatttattgtaatatgatatgaaatttaaaaagaaaatattaaggatacaatgctactcaacacaggtgatactagtgtgaaatattatttcatagtggtttttttgttttcattttttgaaatggtatttcatagttttttttttggctgaataaatggtatttcatagttgtttttttttctcaaaatctattcgagtgttgtgttactaataacaacactcataaggcatgtttggtatacatgaattagattaaacagacaaatttattcggtctagtatttgggcatgctgaaagtttggatagctaatccaactaatttcatctgtctgggattatttatcccatctcgctagatgggataaataatagcgagatgggataaataatcccatacatgtgagattt

SEQ ID NO: 78409 - DNA, 870 bp, Cannabis sativa
tttaattagcattcacctttcaaatttaatccaaaagaactctgtagttcatggttttgtcccatgtggcttgcgataaaaattttatagttcatagtttgacaaaatatgccctttgattaaatgataagttatcctagttcgaggaagtgccactacttgtaaattgctatatcattaatcatgtatgattttgatcgtgacaaaacaaaaaagatacattctcattttgtcacctcaaacaattatattgaaaattgacaaattttgaggtctaactctagaacctattgaatattatgtagtttacacacaagggcatgaacgttgactagtttttttcttttcaaaaacaacattttcaacccaacttggtgtgtttgaaatttgaattagttttcaaatgtaatgtaatatgaaatttccatacttttgtcatatagagcacaattcttcatgctatacatttattattgaacaaattataaattttatcggtttgtatgcagtatgaaaaatatcatttttttttatttatttaaaaaaattatttgacgaacaaaaaatcaagaaaaaattataaaatatggaaaaattatgtaagagtaatcattaccttatactattattttcatattttttgaaagtttctcataaattatatttttaattttttttttcatatttttacgaagagtttttagcagctaagtcctctgaattattatttcacttgcacttaactctctaagctcaaattttgatggtaaaaccttttaaactactggactgttaacaaatttagagtgttatctatttaccacaattaaatgctaacataaacgtactcttgtacatatgacacaagta

SEQ ID NO: 78410 - DNA, 697 bp, Cannabis sativa
cccaaatttccactctcttccatgactcaatcttggtaatggtaagtattttttttctcaatatatatcctctttcttcatacattgttacatatttttctctcaatatcaatttcatcttttacacattttatctattttttacagaacttaaattatagaggagattcaagaaaaaaaattgacaaaaagaagaaaaattcctatttttgcatatggacatttctattttgggtatcctatcatctatgatcaagactttgttttttttttttttttttgctttgattatttacaatgtgattagattattactgttgtttgtgtaattttcaatataaataaagctaatttgaaatatttatcaaatttcaatctttgagttatttattatcccattgctactatttttgttgtactcataatatacttatataataaattagattttattttacaaaaaaaaataaagttcggttttggacggtttaaaccgaccaaaccgtggtttggaatggtcggttttaaatggatttttagattggtcggtcagtttttggattgcactaatccagactgaacactgaaatctagatttttatatgaaaaaaaccgaccaaactgaccgatgctcacccctagatactagtcccataggtaccaaagaacaattctacaaagtcagaatctccataac

SEQ ID NO: 78411 - DNA, 607 bp, Cannabis sativa
atgtgtaactttagcacatgcttagagctagcgggtgtagtcactttgttttttagagaaaatttatttattaagttattatttttttatttaattagttaaaatagtttttaaatgtgtttaatcaattagtaaatagagacgatttctcattcgcaattttaataacgttcacataatcttcagtcttcactatcagaaaaaagattttcttttcgttacttcattctatgtatatttatataatacattagaaccagcggaagaaagatatcattttcctctcagaaaaattatatacagttttatacgattatattacaaatgtattctgagcaatagtacgattatattgggtgtggtattttgacggttctctatcgtgcaatagagctacgagatagtgttttgactaggctgttttatcctggggacggcgagactgatagtttgcttgcatagctcttgacaatgtcgtgaacgtctttaagagagcgacctagtctgtgactcaactcaaactttaatttggtaaactcgttccttttattttttgcagcaacttttttcaacaggctttggtagagcttaaactctttaccaccca

SEQ ID NO: 78412 - DNA, 1235 bp, Cannabis sativa
ctctctctctctctctcattatgcataaattatgttgtctgtgattctcacttggtttcattgtatactgatttttgctcaatttttgattacttttttttttttgggttggggggtttcaactgctttttcttcttttagagtatttgggttatgtgatttcatgtgttaacagaacaccttttgggtctccactggtaccactggtatacataattgtgctaacattatgaatttgtggtggaataatctctgttgggttttgttttcctttatgaacaataaacaataaacaaactttatgaagatgaagataagtttctttcaaatgtctagtactgttttttgttttagtactagaaaatatgagacatgggtttgatttaatattaagtttgagtttcattttttttcagtgattttcttccattatgaatggttaactaattagactttatgttggtacagtgatagttatgaaataatttacagggaaagtttgaagtttcataaagggtccttaacttcattggagaccttttaattggaaagtgcttatgaagtttatgaatatgtggagaaatgaaaacaataatttttatgagtttcctcgcattagtaccttcattactcatttttttaatatctatattagaatagatgagagttgcttttgtcaatttctccttgaaagttgttataaagctaatgagagttttcttaagctcactattcagttggagaaaatgctactgaaatttttattttcatgattgacttatttcttgctctgtcatcaacagggttcgtatctattaactgattagctagtagaacgaataatcatatccaaacttgactactttcatcactactcattttctgccctctattagaatagattagtgtcctttgattatgattattggttagagattaatatctcaaacttaagttttagtgcctaaattcaagattaactaaaaggaaatagtattgtatgtatgtttctatgcatcagcaaattcttccttttcaaaagtaacaacattaaattccataacacatgaacttcttctacttgtactttatgttagatttgtttttgtaataaagtttgtgttataaagcattttttgtttttaaactattaaaaaccataacaaaaacaaaatgtgaaatgaatctaagtggagaagtttgaagggtaggtttgcaggtgtacctctaagtct

SEQ ID NO: 78413 - DNA, 676 bp, Cannabis sativa
  modified_base (366)..(376): a, c, t, g, unknown or other
ttttctttatcaaatgagccacaccaaatatgggcccgtattaagcccaaagggctttaattgtttaggctcatcactttagtatttagagagaagatcacatcacataattcttttaaatatatgcatttaatttttagagtaaattacactctatactttttttatattgttctctttcatttttacattcttttttaaagtctattatttttatcttttttttaaatattgtaccagttttacccctgtcacttcaagatactctccatgttactctcttatgtcaaagtatgttgggtacaatgcatataaaaaaaaggtatgtttcaattaaatataaaattaaaggtaaatttgattaannnnnnnnnnnaagtggtatttttcaacttactcctaatttttattctttctttccaaatctattatgtttacttattttttcagtcattttactaattttacctctatcactttacgataatatccattcttctctaattaaaattttgtctaacttttctacaaacctacacaatcatctccaaataacacagaactattgtattgaaattatgttagttatgtgagagtataaaaataattttggtataatatttataaaaaaaaagggtaaataccattttgtaccctctgttttgcaaaagttacc

SEQ ID NO: 78414 - DNA, 1810 bp, Cannabis sativa
  modified_base (1772)..(1785): a, c, t, g, unknown or other
ggtacctagctttcttttagccactttcagagcacgcttgtcctttccaactttgagaagctcagtaattctcttctcgtatggagcaaaaccagcaacctcacgaatcaagttgcgtacaaaatgaaccctcttactggttttctacatgaaaaggcaataaattagcaagagatttctgagataatgatttacttcaagccttaaaaaacataaatgtaaatgatctaatctttgacccacaaaacacaaaaggcaaattatgtattgaacaaacaaaaatgaccaatgaaagaacacaacagaatagaaaaacgatagtatattaggtatcagacaggatcaacttactcctttacgatcagagggtcgtggagctaattctttcttggtcacgacatggcctttgttcaaacccacaaagagacccgtgtttggctgttttggagccattacctggtttcattcaatagcaaaaacctagttttaggttcatctctagtatataaaacattcatctgaacctttttcaactaatagatattataaatctcagtaagtgaagcaaattattgtacaactatgaaccctattatatcccaaaaatctacaccaggataggcaaaatacatcttatctccttccaaagatggataattcaaaggtcaaatttaacataaaaatttcattttagcatgtaaccacgaactaggcaagatactgaaaatctttggcaaagtatacaaagagcaacaaacagacgacttaacactaaaaaaacagcaatgaagttggcacacccaccatcccaaatataaaaatcattaacaagaaaatcagaaaaaacacatatctacataaatatgattctacacatgaaatgggacttccatatttccgcttaacaaatgaaaattttttaaaaaaacgaaaaaaaaaagtgttttcatgacatgctaagctaggcaattcaaaaataccaagtcaatatgaaaatttccagttcttttaatattccctccagtgatcatagaaaaacatgagaaacaaatcaccacaaaagacgacaggggaaaccatttcaagcacataaattcataaatgaaaaacatgtaaagtcatcaatcttatttcagttctcggctcttctttcatattcatgctctgccgattgttcttctactaaatgtcaaaatcataaataatatacggaaaagtagaagggtcgatagaactcaaagtgaggaggaaagtacctgagcaaactgttggagccttggaggtgcggcagcagatttagagccctcacagcaatggagtctattctttatattagggtttttcttcgggtttacatgagggtccccaacctttcttaaaatatcacttaggacccaaataatcttcacccattattttatcaaaaagaaagcagcacaatcaattttttctttaaaaaaaaatgaaaaatcatttggtcctgattggtaatatgtttgttttttaattttttaatcacaaaataaaaataatttatttttataaaaattttatttttaaaaaataaaaataccttctataactacttttgtttttcaattttaaacacaaaatacaaaaatgtattctgtaaagtttatttttattttttaattttatttaagtcgagtttaggtctgggtcgtatacgagtgcaggttagaggtctgattcggcgctagggtcatgggagggatttgggtccgattctagtcggagtctaaaatattgannnnnnnnnnnnnntgtttaaaaaaatatttaaagtgat

SEQ ID NO: 78415 - DNA, 719 bp, Cannabis sativa
cgtgctttttctgtttcttcttatgtttagatgattccatagagtcatcttttcttttagcgttggaaccatctggattgcatgcctttgccgagacggtacttgttgtgacagtgctggatttacttcgcaagtcagtctttaacaatttcatcccgttccttgcttcctctttccgtaggatcacatgagctctttcattgaactcactgatatttttcacagggtgaccttgtaagtcatcccacagctcgcccccaactattgagaggtcagtcgtgatccgtgcttgaagagcagtaagttggatactattattcaagtttctaactctagcagcaactgtactgaaatgacttaagtaagccttaagtgactcgcccggttgctattttacattagtaagggaagacgcttcaagtcgcctgtctcttgctacctgaaagtgtttcttaaaatccttagacagctgttcttaagaagtaattgaatgatgtgtgaattaattgaactagctactcgctgctccattcagggaggtggggaataaaatataatatgtaaattatttgatacgttgttggctcgcattatggtattaaaattgttgaggtgagcgactgggtctgaagtcccatcgtacgacaagacgtgatggtttttacatccctgaggaaatttagagctcataatgtctggatggaaaggctcgggttctt

SEQ ID NO: 78416 - DNA, 1012 bp, Cannabis sativa
aatttgaaatgagtggtctagatcttctctctgaaaactacaattcaattcgacaaataaaaagttgaaaatatagtatttaaaatttggctcaaagcattcatttttcatcattgcctgccttgagtacagcacacattaaagaagggtcatttcaatcgaccaaccatctttacaatttcttccaagagacgcaccctgcacgcgcgtgttatcaacgaatgtagtaaaggcgcaacatgcgtgccacgtcatgaaccattagttcttggccctttaattgatgatagctcaaggagtacattcgtgatcctaacaatcaccacgtgtcataaatttgtctttaagatttagaaggagactgcaagctcccacaactcaaagagtctcgaaagcttggggttaaatattattcgtgtttcgaaagaggtgacacatggcataaaaaggaagagataatctcataatctcactaattaaaatctctgacgaaaactctatcacgaagaagcttcattgatccaagaacaagtcaagactgagagataaatggaagtctacctcgccttatcttagcttctcagacacagaatacgtattaccactctggaacccggagtggtccaaactcaaagcctgcccaaatgatacctagatggatacttgaagggcctatcacggacgctgactgtccaagagtatcgcggacgtctaccttggatgcaacccgaattccccaacgacggttatgctttttctaacacaaaattagattttgtcccttttgctagaacatggtagttcgtacacctcacacacttttttaccagatggttattccaagcatctacttttaaaggttgaaccttttggcggcacgtgtccaccaagtacaatggtctcctattgtccagctggtgcaacacacgagcataattcttttctaagagtccaatagtcagctttctttttacatgtattttgtcccattagtgggctttttgtaaaaatc

SEQ ID NO: 78417 - DNA, 1057 bp, Cannabis sativa
gggtatttaccattacacaagtgaataacgcagctagccaatatgtagtaacaagtgaactttttgtcaacaactcctattatactgtactgtttgactttggagctacacactcatatgtggtgttaagagtaattgataaattgggtaggccctgtgatttattaagatagggtttggaaccctattgcctagcagataattagttatctctaaaaggatggttaggtctatgccaattaaaattgagaataggcagttaagcattgatttagtggagttggatccaaccgagtttgatattacacttaggatggattttctgtccaagtatgtggccagcattgattgcaagtaaaagatggtaacttttcagctagaggttgaagaaccatttgcgtttgtagaattcattcagggttcttagattctagtcatcttggcactgaaagctagagatttattgcacaatggatgtgtagggtttctagcagctgtgattgactccagcaaaaccgaaacattcgggcctgaggatgtcagagttgtaagggagttctttgatgcattttttgaggagttactggggttgtcactaaagggaaaaattgatttcattattaacttgacacctggagcagagtctgtttcaaaagcaccttatcgggtggctccaactgaatttaaggagttaaaaatacaacttcaggggatgcaggatctagggtttacctgacctagtgtgtaaagaccgcttagcttaaatttgaaaattagcagttaattaagatttaattatgaaaattatttatatatatttaaataattatttatgttgttatatttggattcagaatgcatttttgtatcatatagtgaaatttcataattttgcattttcggtgcccgacaacatagaacgcggtgttggctcagtagaatcacaattttgcattttagtatatcagggcagtttatttagacattgggaatgtcgggattagtcgagaatttagagttttctgaaaatacccttttagtgtcttttaatcctttt

SEQ ID NO: 78418 - DNA, 519 bp, Cannabis sativa
tgataacacatgattggagagagaaacaacttctaccatacatgggccactaacttgtgttagacttcatatcattttatgagataaaattccatgtacgtgatgtataggccatatatgatggtgtagtaaaatttttggcctaaatgtttgtagtgaaatacaaatgttgagcccactttcaattaaggaagtcccgtccaaagcctcaaatttaaataacacaaaattaaaacaaatcaaatattttcaaataaagtaattttataattaaaaccataaaaatatttaattaaattaattttgttagatattagatatatattagctgtaaaagaattagatatttagtagatatttagtctcatagctttgtatataaatatgtattattctatgaaatcgaaacatataattcgaatcgctattttctacatggtatcagagtcattgtgattcaaaattggaaattcgaaattagggttctgaaaaaaaaaaaaaatattagggtttgagttt

SEQ ID NO: 78419 - DNA, 509 bp, Cannabis sativa
aggttccaagattgagaatcaatttgaatcatttgatccatcaacatgatctgaagtgcttggagtttggacaccttcatgggccatgaacgtgagcaaagaaaaagaacaaagaaggagagaaaaaagaaagagtttcactttgaacgtggctctaataccatattagaaaataaaaggagaagtaatgaactaaattctgtgtattgaatcaattattgtacaatactgggtctaccagcacggcatgaattagttacaaactagtaactatgtaatcttactgtctaactttctaacagattcaactaaaagcaaaatagctaactagctttttttcattcttgatagttactaccaaaataaaaactaaaaaaatagcaaataataatgaattcaggaaatatagtacatcatattagttatttcattttagaaaatttacatggcatactaacttttgctatttctttacataaatactgttaggcggtatttttttacttttt

SEQ ID NO: 78420 - DNA, 539 bp, Cannabis sativa
taaattacaaaaatacacactatagtaatttaattgtatattatattaaatggataaagggacccacaatgaagagtgagctgtcactgcccaaaacatttaacatcacaaaaaagaatttcagaaaaaaaaaaaaaaagaaaaaaaaatcaaaattggcagcccaccaccagcctttacacactcacaaccaccttttcacattattaaatccacccaatcacaaccctccacctcattccacacaataattatgttgaacccggtaccaccataacacaatacttccagatttttatattaattttactattatattcaccaatcacaacactccacgtcatcagagttatagattctttattgaactcggtaataaaaaatcaacatattaatttactactaaatccaccaattacaacactccacgtcatcagagttctagattcttatgttgaacccggtaacaccagatcacactattattaatttttttttttgaacaatgaaactattactattcctattattattattat

SEQ ID NO: 78421 - DNA, 661 bp, Cannabis sativa
atagcttaaatccaaaaataatcgactaaaaattctcttcatatccaccaagccgtttttcattaatttctttttattgggaagtcctcctcttcttgttacgataaccatgcggcaacaatcaacctcggtaatcccactaacttttatttccaataattgcttccctggatgagcaccgtttaccataaccatcggagatgcagtgtactccgattccgactccgaatgtttctcaaggacgatcgatacaacttctgtggatctgtcgtcgtcttttgaaacccaggtatcatcgtgatgatcgcctcctacctgaatttcatcgctgccatcttccacctctgtttccgtttcgagttccggcaaaaaggtgattccttccttctcacaaccagatgccctacccgattcattggtccgcccttcttcttcgacttcttcaagatggccaggttccatgtccctatagtcccccttgaatttcgtccccccgatcaactccccctcaacttcaaagctctttcctatttcaaagtcttgatgccagcatgaattgaaaaaaccactgaatctatatcccaagtcattaagcttaaataactctagcttaaatacagagttctcaaaatccaaattcaaagattctggcacaaagcca

SEQ ID NO: 78422 - DNA, 1122 bp, Cannabis sativa
ctgagataaggcattctcagtattaggaatacaattagggggtacaagaattaagatataaattggaaacagtagcaagatgacactgcaaggcagaccttgttcgactggatgaatcaccaaaaagataaagtctatctctaactttccttttgagtagcacatcacctgtctccttgtccttgacaaaacaacaatgcttgtgaaactcaaggaagacatcattgtcctttgttagcttagacacacaagatttttagtaatagctggaacatgtaaaatagatttgagatgtaaagaatgtagattatttgaggaaggtaaagtagaagagcctatatgggaaataagaagcttcttaccatccccaacagctagtgtgtcagatccattgtagagttgaaagacatcaagattggtattggcagaggtgacatgtgcaatagcacctatatcagcaaaccaagaatgatcatctctaaagtcctgcaccatagtggaggtataggcctgtggatcataatcaaactgaacctcagtgagaaaggcacgattctgggtctagtttaactttggaggaacctaatttttgtcaaatcgatagtgacacactgtagctgtgtgaccaattttcatgcatacttggcatatgatctttgttggattgaaacaaggaagacccctgccatggccaaagggttgatttggatactcagttgaaccagttctttgattgaaaaatggtcgagaaccatttccacggcctgacccaagagcaagattggcttgcatctttacagcaagattagccatggtgctgtgatgttcgattctactttcatgagagagaagcagagcttgaacttcctcaattgagagagcatcacttcttaatgtgattcttgagataatagggtcaaactcagggccaaggccatttagaagttgaaacataagatcttgatcattgagaggagatcctgtaacagcaagagaatcaaaaatggaaagaacttttatcaatgtattcagagatagtgagactccttttttgaacatttgagaattgtccttttagctgtagtcgtcgagctttcatctgagatgcatatttttgttcaa

SEQ ID NO: 78423 - DNA, 745 bp, Cannabis sativa
gtttgtggcctgggaatcgaacccaggtgccgcagcctgcccccttatttttgggaaagtttgaatgcgttattcgaatcctcatagctttgttatccacactccatttcgagagttctatatattgttggaaagctcgttctgagctctaagtgaatatctgtattttgaatgccaagtttatattatgtgaaagtggaattagagattaaccctaaatttgtaaatgccggaatttgtgactaggattaccgacacttgatgaggatcacctggggatttggaatctccacgtttgcgagacatcaggtaggacagtagttgcacatagagttatgcgcggtggcacttatgttgaaaattttatatgtgattaattggaaaccgaggttagggttattaccctaacatgagcgatttaatggcctagggttattaacctattaaattattaatgtatattttatgccaggagattgcaatatatgtaaagttttagggttatgcgttcaaggcataatcaggttggactcggtaactaaaaccgagatgaattattctaaggccttattgtatatagacgtgtgagtgtaacacgtaggtctatgtcacataaacataaataggcatgtgagcgtaacatgcaggtctgtgtcttacaaacaaatgtgaatggcattaatgtttatataatgtgttaattatgattattgatattttaaactatcttactgggcttggctca

SEQ ID NO: 78424 - DNA, 1005 bp, Cannabis sativa
agggcacaaaacccaacagttgcctactggagaactggttatttccagcaggtgggttaggtcccttccaatgtttgtggatagatgagaattgtcagttgatatgattgagctaaatttaaaagattatgatgttatactaggaatggacttgcaaccatcgattgtaaaagaaagatggtaacttttgaaccggagggtgaggacccattcttgtttgtgggcaaggttcaaggatcctaaataccattaatctcgacacttaaggtgagagatttgctatgggatggatgtatcagtttcttagccagtgtggtggatactacaaaggaaacaccaacaagaccggaacatgttctagtggttcgagaatttctggatgtctttccagaggagttaccagggttaccacagaagcgggaaattaatttcgaaattgatttaatatcgggggcagagcctgtatctaaagctccgtatagaatggcacctacagagctgaaagagttgaaagttcagttacaggggatgttggatataaagttcactagaccgagtacctcaccttgaagtgcaccgattttgttcgtgaagcagaaagacgaaaccctacgaatgtatattgattaccgagaattgaataagttgacagtaaagaacaagtatcctttaccgaggatagatgacctgtttcacaagttgcggggaaagatcgtcttctttaagatcgatcttcgatctggttatcaccagttaaggattcaggaggaggatattccaaagatagcttttcgtacccaatatggacattatgaattcttggtgatgtcctttctgattaacaaatgctccggcgacattcatcaatttaatgaaccgattgttcaaggactttttaaatgattttgtgattgtcttcattgatgatattttaatctactctgattcaaaagagacacacgagaaacatcttcggatggtgttgcaactgttgggttttatgcc

SEQ ID NO: 78425 - DNA, 514 bp, Cannabis sativa
  modified_base (211)..(213): a, c, t, g, unknown or other
tttagattttgattgttcaaaaaaataaaaatggattggatgtaatggaatggaaaagagataagttttattttgttctttcatttggttacattttataatattttacttttaccatcttgatggaacgactattttattttgaaacgaaatgcaaaactattttaatgtattatgagaaaaaatttaatgaattttttatcaatttttnnnatgcattttaaattttattttattgttattcttatatttttattccttctaactaaatgttacctaaatgaataagaaatattaataagcatgccacttctgcttttacactcttgaatatgagagtttaattataagatcatgtaactatggacagaatctttttggagaaaaatgttattgagtacttggtgggcttctttgttttgtatcaaaatgtagaggtttgagttggaccaatattaatatttgttttctctgttttgtattagagggcggcgaaggtctcccaaaatagtgg

SEQ ID NO: 78426 - DNA, 914 bp, Cannabis sativa
tttaattttcaatgttatgattattttgtatttcagtcccttcaatgaattcggttattcatcttgatttgacctacatttggagctgtattatttcgaattttagatttttaggtgttatcaaaaacacagataaaattaatgtattttgtttgaaaacaactataacgacattgatttgagcaaagatactgtataaacgataaagaaaaaaaataggaaagatgtgaaagagaatttgaagaaaaggtaagataatgttgtcttgttttatttgagaaccacgtggagggtactccttattatcaattgatttgtgaaactcttatgtattttcttgttttttcttaaagcactagaagaaagttgggtcccaaattcccaatttccataaactttttatgttttaaggtaatattaaaaaagactgatttggtacacacatgacaccaatgtattttttaatatatatatttacaaatgaaaaaaaaaggttaatatatgtaacataaaaatttaattacacatatattttttaagataaataggacattattttttacaaaagtcactaattagacaatctattaataaaataggtatgtatttttaaaattatataaatagaatcctaaattgatttattgtcaaaataacttcataataatccgatctagagatattatgacaaatcagattgcaatttttatatctgttcgtattaaaacagatggtccataacttttgcaaaatacaaagttcaaaatagtatttactctattttttaaaaaagaaaattaaaaatatagaataaatcatcgtaaataaaaaaaataatataaaagattaggtaaatagcggcataagtacccaaaattttatgtttgtaagcggcataaacccaatatttattt

SEQ ID NO: 78427 - DNA, 646 bp, Cannabis sativa
gcctaataaatctcaaataaaagttttgggcattcttgtgtcttgactcaacttttttttaccactataagattctactaactttatggtagtatggttggaaactccacaagcttgttttcaaaatggcaatgcagtcccagtagaacattatcacctgaccaaaaattaggtatctaggtcgatgcttcacactagtcaaaccatacactacaaatgaaacactacattaaaacccattcagaaactccttacattagcacacctaaagcattgtcagactatcaccaattcttacatttcaaaacaacagaataatacaggaaccaattcctatgtccctccaaaaaatttacccatcttatcctatgggatgtactaacatgagcatattttcccacaatacactaccaattcataatctctaagaacagataagaacaaaataattatcatccacacgcattatctagaaactaaaccctaaaaaggcaaaattgatgaacattgtaagcgaaaatgaagaacataccatagtgaccacgcctcgtttagcggtggagttacgaaacaaagccggattgagagctgaggggcgaagtttctggccggaaaaatctgcggagaggctgccgccggcaagggg

SEQ ID NO: 78428 - DNA, 727 bp, Cannabis sativa
tattgttattattattattaaattattaagcattttaatgtgttgtgttttcaaattgatttattagtatttacgtgttgttttcgaacttattttattgtgtcatacttaagtttatatttttttatgttgtgctgtgttcaaatttatatattttcatgttgtcacgtcgcctttaaacacatattttttttttatgtgagatcgtgctcgtatctttgaggctcgtgccatattaaaaaacttggcctatatttacaacatagtgatttcctttaacaaagtggattagagcatctccaatggtaatattttggagaatgcttgatgaggtggaaagcttatgtgacaaaatatagaggtgctataccattagagataaaagaatgttattcttgaaatttgtattgatgccacacaatggcattgatgctgtcttttttatacaataaaaaattaaaagtgcaatatatatataatagtttaataaagaaaaaaaattatatatatatatttttttgagaatttatatatataataatatgtgatatcataattatagcatttttagaaagtattatactattggagtgtttttaaaagtaaaggtgtcaaaaatgacgtggaagaaaaataaaataaaatattatattttgaatgatgtggagtatgtagagcatttttaaagaatacttggagatgcaataacttttattaggggtatatt

SEQ ID NO: 78429 - DNA, 847 bp, Cannabis sativa
ttaaaagatgacatttgtgaaaagaaagataagttttaataaaatgtcaaaattgaaatcctctaggccatataaggtgttgaagcagtttttcatcaactcatttaagaagatcatataaataaagaggattgtaatgaattaatttgactaaattaaactacaataaataatatgggcattagggatttatagtagttcacccccatgtcacgatagtaatgaggctacgtctacttttatttttattgattagatccgacacaccagagttacgttctcaagagtgtgtggattaaaatatagcaaaagatttctaggagaaatcttaatcgagacttatgagcataggactcatgggagactcaatattcctaaatctgatcaaagttggtagttgtaaggttttggggaaaaacaaaccaataaagtataaaaaagggacgtgtatcaatgatgtttttggtctttgtgtcgactaagtatggtggacttaagcaaaaagatgaagaaataggtatgatgttctcagctaccgtcaagtaagttcaaaagagaaggtctagaagaagatccctccttcagcctcttacttcattatgtaggtagtagggtttgttagtgatctcccacatgttgaggtgtctcactaacaaatcctttatatcatctttaataatcaataagaaattacaaggaaataaatatctacaacaatccccttgtttttacgccaaaatcccacaaacattgggcaaaggtttatttttcgactaaggatgcaccaatttgaaatggagtgacaagggatgtcacatctcggcttagactttataatattgatgat

SEQ ID NO: 78430 - DNA, 507 bp, Cannabis sativa
ttcttgaaagaaattatacgacaaatcgtttagatacgaagttttgaatcttcttacttataatgttttgagttttgggggtaaagttacactttattcttgctatttttagtaagaaaataatgcatcttctattattattataaatcaaattaactatatttcaaaacattaagttggcatttagcagaaactatcacaatttagtaatgagtttgtagtactaaactatattcttcatttgttattatttaagaatgtagctgagatttcttttgtatatcataaaataattggggttgctcaccctttaactaattatactttaatgaataaaggtagtgtcatgtagattgagttaatctgcttgtgctattctaacatgacttgcactcccttgtaattttttttttttaaaaaaaacattaatagttttcatatatttttgtgtggtgctcaacaatattatatctatatgggttacccatcaaattatattatttaaaa

SEQ ID NO: 78431 - DNA, 776 bp, Cannabis sativa
gtgaaatcgtatttttgttgtttttttttattattatttttgtgcatttgtgaaattaaagcactcgtaatgaaaaaaaaaaaatccataatcaaaatacgcacatagttttttttggacgtgaaggtattttaaaacaagtcaatctaataccttcaatttacgctttctttttccttcattctccaattctctacatattctattctcttcgtgaatttctttttcttttggtaactaatattcatgaaaactattttagaccaatattcaacaaaagttattgacttgactccttattttgttaaattacaatttacactttgtattttttaaaatagtacaaatagtactctaaattcaatttttatcaaaataaaacataataataacttgatttaaaagtgttatgatcatattgattatattttttcgcatttgttcatgttggaaactgattttattttttaaaaaaaataaattgagctcaaaatattattttataatatttcaaaaaaaaaaatatatatatagtccaatttaaaatgtggctatataactgaattattggtttataaaaaattattgggtgatttttttttataacaatttattaaaataataattttttaattcttagtttaactatttttatggctaagtaacatcaagtttaacaattctcggttaactttcatctaccatccaccatctatattattaattaaaatcgtgttaggataatattgcttcataatactattaacgataaaaaa

SEQ ID NO: 78432 - DNA, 842 bp, Cannabis sativa
gatatgaaattaagtgttgattgttttgaacttttatgactttaattataatatagaattatgtattgtttgttatacctcactctttacaatttctttaaaacattatataaattttctattgtgtgaaaattaatggatttttttttaatgtttaattaccataacgcaagactgatttatttataaatgttattctaatatgaagggagttctgctttctgaagaaaacaagcatttgcaacaggtaatttaatttatattaatcatatgaatttttttatttactcttttattgtatattgcttctgtgcttataattggttacattacatcttatgttttgttaattataacttaggttttgaccagaaccctgatcattatatcatcgaacatatataatataaatagcttcatattatttaatttaatttcttttcggagtaaataagccatttatattccataaacaaaactgtagatcaatgttccactagttcaacagatcacttccctcctatacaattacaatgatctcaaaccatattctatctttatataccttatttgtttaatagcagctaaactattaattctactactttcattatatttgttagagagtcccacattgctaatgtgtagaaagataatataatatataagaggaatgagctactcttcccattgccaattggttttgagatgagtcttatctccaaatcgcatatgtacaagcattgaatgccactatgaatatttctcctctcggttaatttgctgtctagacaccttcaaatttgattggaacactatatatatataaaatgcatgagcta

SEQ ID NO: 78433 - DNA, 576 bp, Cannabis sativa
  modified_base (343)..(358): a, c, t, g, unknown or other
gactttgctttgcttctctttgtaattaattttttctttcatttctttttatgtatattaacataaggggatcatgtgatgtcaatctcttcctattaaaactgatgatactaccaaaacaaactaactttctaaaaaactgaatatataatggaaaacttacaaaaatattaaaatttggattaagttttataaaaatactgtcacacggaaatcctttcagaaatactgtgtttttataaaaaaaacagtggaatacaaaacagaacaactaaaaacaacagtagaacaactaaaaaacaacagtgaaacaacaatgaaaacttaacacagtacacagtannnnnnnnnnnnnnnntttttgaaaaaaattccaccccacagtataaaagtaaaaagttggaattttcagtatgtggtgtaattatccctatataattcctcacaagaaggacaaatgtacattggttccatgggaggccttgaccctcccaatattttttttccttatttctattatatttttgtatttttttttaaaaatttatttacaaattcatttaattgccctcctta

SEQ ID NO: 78434 - DNA, 1513 bp, Cannabis sativa
cccgtagccattcctcattgcacagagctctatctaacctttccataaccggattcatctcatgtccattacaccacataaggtctgttttagaagaacaaaaatcaatcaaacgacatgcatcaatcaccaatctaaactcctccatcgccacatctcttctaagtcgaccccctaccttctccgctaagctcactatctcattgaagtctcctacgcacaaccacggaccaacaacttctcccctaatgtttcttaatagttcccacgaaaattttcgttgcgtagcatccgaatgcccatagaaacaagtaagagtccaaggaaagaaatcttgacccgctacccgaactagcaaatgaccaggagagcttgcatcaaatcttacactcaattcctccttccacaaaagtaataaccccccactcaaaccaactctatccactgcccagtaattctgcccaaagtttaaggttgaacataaattctgagcctgtactcttgttaacttactttcagctaaaaaaataagactcgggtcatgatcccgaatgtgggattgcagagctcgcaatgtccaaggattcccaattccttgaacattccaacttagcattttcattgctctcggcggtcttgctgagcaagactcgccgcttcgtcattggaaaattgagatgataaatcaatacaatgagaaatactcacctcagtggtagtgaccacattgtttgtgccattgagaacccccgaaccgaacacaaactgctgccccatttcattcgaatccactttacccacggaaacaggcaccccaccatcattcgcagtaaagaccactgctctgcctttgccttgatttcttgcccgattcttaatcgaaaccttcttccgattgccatgaatacttgacttgccaaccttttctccctcaccatgattattattcactcccccagagaaagagctgacccccagatcattgataatttgtttaccctttagaagtgcccgtcgatccctttcctcttcagtctcgccatccttccctccattctttctctttttagcttcactctcagctccctctgtaatcccatcagaagtcgatcccccctgctgcttgtcaaacacatcagaagcagccctattctcctttgggttattatctttgataaagtggcccagagtattgggctcagtaacattaaaattcccagcccggcccaatgttttgggcacattaacattaaacatcccagcctggcccacttggtctaatgtaccaaaatgacaatttttctctccattgccacctggcacagtattagttacttcaccatctcccaagattgatgactccccgataaaagctatcccactactcttggcagttacatagttgtggatcatcggagcctccactcgatcctcagttgccgtctccggcgccaccataaagtgtcatatggaatcatctgttggaaattatttaaccaggatcttagatcta

SEQ ID NO: 78435 - DNA, 893 bp, Cannabis sativa
aagggtgtatcaatgcatcctttttaagggggtgcattgtagaatcaccctatattttatataaaataaaaaattgtaaaatagaatatttttataaattttgaaggtgcaaataaaacttctcgtgcctttttcgtctcgttttgttctttctaatttctaacaaattagttggaagatgagtattttttgttttcaaggttaagatccgttatttaaattgttaaaaaatatataaaaatcatacacattaattaaatatttacatatgaaaatgtatgaaatagtaattaagtgctatttgtctcttaatattattttaaagattcaattttttaattagtcaaaagagaaaccctatcattttcgttataatgataactgataataatgattagtaaaacttttctatgacactttttgtaatattttgtgattttgatttgattaagtaaaattgtttacgtatctactaaagttgtcttatatataaatatagtttgaacttaatattatccaattatgatcatttttaataataaaaaatttactaaacttaagattagcttgttatatttcataataattgagaacaaaaatatattgtagtttttaataaatattcattcaaactattgaagataaccttagagataatggaaagaaattaatgaaaaaataaaaataaattaatatcatgaaaaatatccaaattcacaatagggaagaacatattaatggttagataactatttgaaaatcaacattgtggctagcttgatattgactttgaaatttggatgtacttattaagtagttgtactactcttttttatgaaaatgactaacaatattaatcactaattctataaatatataatgtaaaataaatt

SEQ ID NO: 78436 - DNA, 791 bp, Cannabis sativa
  modified_base (71)..(71): a, c, t, g, unknown or other
ggtggttgtggttgttgctcgttgttggaactagaggagggtacgcggttaagagagagagagagagaganagagagagagagagagaatgagatttgaaataattgggtttttatatattaaaatgggaaatgctgacggttcaaaccgtcaggtatactgttcccgttgcggattccctttacactttatttttcaatttcggtctcgtgaccgttttaaactatcgggaatagtaaatgattgttaaaattcgtcgagaatactccactatagctgacgagtttaaacagtcaagtatactccactgtagccgacaattttaaaacgttagaaatttttattagcgacggtcaaagaaaaaaaactgatttgaggatcgtcgaaaatggtgcttttttagtagtgcttatctttaatcttatattaaatgtagctatataacataaagtatttttttggtattgcaattcaaatttaaatttattgcacataattaataaatatttttctattattttttttttacccaatccacatatctaaaaaaatatatttttattattgtttcctttttaaacaataaaatagaaaaaataataaaaagaaaaaaaaatattaagtatatgatatttttaaaataataaaagtattataaaattaaaagtaatacaattaattaaattaaatttataattaacatcaaatttttaatattatttttaatatatataatattgcttaaattaaatatttctttaataaaaaataataaaaagaaaaaaaattac

SEQ ID NO: 78437 - DNA, 1148 bp, Cannabis sativa
aaaaaaaaaaaaaaaacacattgttagctttttttttttttttcctttctttcctttctctttcttcactctctctctcttttctttttttgaaagtttaaaattttttttcacgctacaccgataattatttagtcttaagagttgcacgattgctattcctatctcactttaattgagataccaagttctccataatttgtattttatatatgtgttagtttttgttgtcttttctcagagaaaaaatggttaaataatttagatattatgtttgataaaagttgctacgcttcaacaggtaataagaattgagggcttagttaatatcaagttattaaatgttgttgctgggaatattgttgttgttggatatttcatttcagatgatccacaagattcagttcatggtgttcctcttagaccatttgccatgaaggaaggttggtgttgattttgtaaggaacctaatgcatttcaatggaggcctacttcaggattaacttgtattgaagaaagtgttggaaatgttattgcttggccagctgacaaagttataatgagttaaattacttaaactgcttgtacttgagatttcaatgcatgtttgttgacaatattaagtagtagctcactctgcacatttagaccaattatatattattttatatttcagacggggcaacatcattgctagcactgtaaattaattttgaagtgaagagctttgacccattaatattactatattttatataatcgatattttatataatttattgaaaaatttaaatatattcgtatcatatatgcacatataagtattcttttaaattgtgagaaaaccactcatggtagatgtgggatattacaaattattttttcattcacctcttccaacaaaatcataaaaaagaaataaacaaaatttatttatttattttcaaataaatttcaatcagtattttacatatgtatgtaataacttttgaatttataacatacccttaatatattaatttgactcttaattttgccccacgaaatgataaaatagattatttgtcttgcaaaatatattaaatgaatctttaaacatgattttgagccaataataatatgactaaaatgctcttaatttttataat

SEQ ID NO: 78438 - DNA, 560 bp, Cannabis sativa
ttaatattaggattcatacaaattttttattaataagatggaagaagtagaagataaaagtgagtctttttaaaagccttctaatctattttattgaaatgaataatggcaacatccgacaaagatgataaacttcaattttattagaaaaactaaacataaacaaaccactaataagtaaaaaaagaggaaataacaaggaagtaaacttggacaaagccttagattatataatactaaagggcattattattcaccaggagatgcaaatataaaagattgaaaaatttaatttttgcaaatgccaataattatactaaattttagtaaaaacattgttgtaacagtctgcagtaccaaaatgttattctgtcactatagaacacaattttgcagaaacaaactagaaataaatagtgcagaatttaaaaacttgacacaaaaaaaaattgtatttcgtagtgtactctttcaaacactactagtctatgggaccacgcctagagaatgaaatcaattagtaaagtatcaaagtttacaaaagcaattgacttaaacaa

SEQ ID NO: 78439 - DNA, 1440 bp, Cannabis sativa
  modified_base (1387)..(1397): a, c, t, g, unknown or other
catggatgccttctctggggacaatcgaataatgatgcatcctctcaatagggagaagacatctttcatcactgagagaggagcgtaatgttataaggtaattcactttgggctcaagaacgcagggcaacttatcagtggatggtgaataaaatgtcctctcagcaattgggtttaaccatggaggcttatatcgacgacatgctgggaaagtctaaagatagattagagcacgttgatcacctctgggaatgcttccaaatcctccttgtccgttcaatgaggcttaacccggccaaatacgctttcgctgtcagctcatggaagttctttggccacttggtaacccgttggggagtttaagtgaatccagatcaaatagagcctttttaggcaacaagacaacctcggaccgtgaaggatatacagaaactaattagaaaaatagctgcactgagccacttcatctcaaagctttctgataaaagcctaccattttatgacttgcttaggggaaattgcaagttcaattgggacgataagtgccaacttgccctggaaactctgaaaagatatctgactactcccccaatcttgtcaaaaccagaatcaggggagactcttcttctttacctctccttgtcccggcacgcggctagctccgtattggtccaagagcaaggaaaagcatagttactgatatactacaccggcaagaccttctctggagcagaaggtaggtatccagtaatcgagaaactggctttggccctgattatctcagcaagaaaactccgaccatacgttcagtgccacacgattgcagtaatgacattattcccattaaaagggtacttcataaaccagagatatctgggaggttgatgaaatgggcagtagaaataagtgaatttgatatacaatacctcccccgaattacaattaaaggacaggcattggcagacttcttggtcgagataatgccagaacaaattccctacgaaggagattccgataaaagtgattggttgttgaaagtagatgggtcatcaaacatcaggggtagcgggctaggaatagtactcttatcaccagaaggggaaatgctggaacaatcaataaagatggcattctgggctaccaacaacgacgctgaatatgaggcctttattcatgggataaaattagttagagaaatgggagctggtagagtactagtctaatcaatttctcaattaatagtctagcaggtttggggggattttgaggctaaggagccaaaaatgttcaactatttggctcaggtcaagaaattggcatcaacctttgaatattaccatattagtcagatccctcggaaggcaaacatgttggaaattattttacnnnnnnnnnnntttactaacaagtatgttggattagcatcctaatatgaattct

SEQ ID NO: 78440 - DNA, 1485 bp, Cannabis sativa
aaaaatgacaacttagactagtgtttacaatatgaaacaatgaagaaatttataaaataagaataactttgactctgaaacatgtgtactcaatataatattttctaattttttctcatatttaatatattttttacttcatttattgaaaatagtcttagttattgtaactcgatatgagggttagtgcctaataactattcaaaatttataattttactttgttctatttaatttctctttcttccttactattttttttaacctatagtatttttttttaatgattttaacatatactatttaattaatataaaaattaaatattttccttttgaaaataatatgatatttaaattatttgattgtttcaattttgacaaaataaacacatttttaatgttttttatagcattattccttatttataaagatttttttatgtatatttgtaaatctttttttttaaaaaaaaataatatttagtgtaattaagtttgcatgtgatatatattaaaacttgtatttattttttttcatatttttgtaaatagcatttaaaagttaaatttctttttgtactgttttcctttcttttttttttttttttgttcatgaaattataattttatgaatttttatactatttatagttttttcaaaaaaaaaatatattactttatagaaaaaatttcagaaaaaaatatagaaaaatcaagtaccttagactaaccaagagataacaagttttttccatattttgtaagcttttttagaaaaaattctcattaaacaactttttttaaaaaaaataaaaaattaatatttttaaataagtattattatgcgtttagaataggtactttcaaataaaaaaaaagtataaataaaataaaattaatgtaattttaaaatacaaaatattacattccaataaaaaaaaattgttaactataaaccggttttctctcaaaaaaaaaaaataaaacagaaaaaaaataattgttcactatattatttatttattttgagaaaaagtccactttcattttttacctcacatgatctagcaaatctatgaataagattaatgaaattactggaatagaaatctatatatccctttctcttctcaaaaataagaaaacgaatctatatcccacccagcaaagtgcagtctaagacatttatggtaataataagggggaaatgaattaccttagtgaaaaaaggatgaagaacggtaacaacattgacgagggaagggtccaaaccaatctcctcatgagcttcacgcaaggccgtctccacatcattggcatccccctcgtcagctttcccgccgggcagcgcaacatcccctgcatccatacccatatacaatacatatatatatcgatacaattcagatggaagaaaataaggattgttgtacggtacctgagtgagttgagaggttagaggatcgtttggtcaaaatgactc

SEQ ID NO: 78441 - DNA, 705 bp, Cannabis sativa
  modified_base (657)..(666): a, c, t, g, unknown or other
gcaacaatcgttactgaactgaccttagattcaatcagtacttaaagagcttcacagtcagtcttcttcctccgccctcgatatggtgtgaaaatcttagatcagtattattagctgccaatccaattccacatgttcctacaaagcatatcgaaattgacttgtattttgttctggataaagtactcaacaaacaaattcttgttcaacaaagcccatagttagttctcattttccttttcttagagaaaacaatgtgttgcttcttcaaacaaacttaggttactatgagctgtagtttacttattcaagttagttaggttgtaactaatcttattagttgttaatgctgttattttttttttatctctacactatgaacaacatttttattcaatacttgatttacctttaaatatgttttgaccttcaacagttaatttctgtttaagttacctttcctatatggatatgacctattcatctaaatagctagttatgaatgtgactgttactctgcaatctcatcagttttttttctttttttttaactctattgtggtgaaaatactttaggggaggttttgcataaaaataactcaatgcccggatgataaaaaagttagagcttgtttggctctgttttcagttttcagnnnnnnnnnntgagaatagaaaactgttttttgtcattttaaaaattta

SEQ ID NO: 78442 - DNA, 1022 bp, Cannabis sativa
  modified_base (655)..(655): a, c, t, g, unknown or other
gaccgagatacgccggccgaccgagatacgccagtcgacggagataggcctgccgaccgagatacgtatctcatctaagataagtcattttttctaagctatctcatcccacttgagatatgtcatctatctagtatctaactctcccacctatatgcttattttatctagaatacatcttatatagtgtttctttttagaatgggccttttataacttttgggcctttttataataatttggacttgctgatttttctcccaaacatacactaggtcatgaaaaccctaggtcaagcaacccttgaagctggatttttaattctttaagttctatcagagccattttgtaaggtgccttagaaactggttttgctccgggtgtgagatcgataacaaaatcaatttctctttgcggtggtaaacctgggagttcatcaggaaaaatatctaaaaattctcgaaccaccctgatatcctttgactgaactatctcaggtcgtgtggtatccaataccacggctagaaaccctaaacatctgtcttgtagtaattctctagttgttaatactaaaatcactgaaatttgagatccatgaaccgatcccacaaaaataaatggttcctcgctctcgggttggaagatcaccatcttncatttacggtcaatactagctgagtacttggataagaaatccattcacagtataatatcgaaatccgctaaacccatttctattaggttagcactcaactccctatccttaattctgatcgacatagaccgaatccaccttttggagatgactaattcttcgccaggcagtagggttccaaaccctttatcataattatcatgcggtctatctaatttaccgaaaattctggctgccacataagagtgagtggccccagaatcaaacaatactaagaagtatgagttgttgaccaagagctgacctattacaactcaggggctagcttctacatcaacctgagttagagcaaacacccttgctggag

SEQ ID NO: 78443 - DNA, 1036 bp, Cannabis sativa
tcgtgcccaactgcataagcgggaaaattcccgcctaagcaacgttcggatttcgaaactattggggcacgacattctcgtgcccaatgaccagaaagtcgcgcccatgcatccaaaattagaaaaggaaaaaaaaacccaaaggacacttcgactttcgagtgcaggttggaacattgtgtatcagttcagaacgaaattgatagatatatacacattgataatgctcgagtaaatattgattattatgttattatgtattattaatatcatgggcatcaaagggaaattctttacgtgaaagaaacccacgaaaacaaagttatataattggactcaagagtctgaatctcaaacaaaattgggtaatttctactcaaacctttgtcaatgtcttcttgttgttcaacatgtttttaatttttagtttttgtccaataatcattgcttgtaatcttgattcggagtagggacttagttcgtatcggtagtaaggcgcttgttgtgtaatatttctatttttgtgcatgacaagtatgaagaaattcagcgcttctatcctcatgaaaaatttggcaaaattgaacgaagcaattagttaattaacgagtgttgccactgtatgtacacattggacaaacaatgagattgagaaaaataaataaatagtggcatgactaagattgtccattggtttcttccataaaaatatgagaaaagtcccttattatgtttcttctattttttagaatgtctacaaattctatttataatgtaaatatacaatagaagtaactttaatattattggtggctgtaacgatgtaatatggtttagtattcttctctcaagagtggtacttcaaatggttgtatttttataatgcattctgaaatttcaaatgtttatatagataatatatatatacacaaaaatgaggctgtgaggtcatggactaaaattatataaaattccatattgagctttggtctcggttcaaaatccacactaaagaacatttatgtgttggttataa

SEQ ID NO: 78444 - DNA, 2971 bp, Cannabis sativa
gtactacaaaataaggggtctaaaggacattattttcagaatgtagatgccaaaattgttcaggaaaagcacatggcattcccgaaattcaagagtcaatgtgataattacaaagttttaggtcataaaaatattaccaagctctgctttagtgcccccagtatagcatcttcattagcatccaaagacattattggcctcgctagagttgggagtgcagattcaatctgaaatgagaaaactgcatgatcagctattttttgatacatcaaaccatgaaatagaagactcgaaatatccaacaaaagaggaacaggttgcaaacatttccattaaacttctctcaaatcactctaccattcacattcataaattgatgccttctataaggcctaataagaagttcaaaaacataccggacgacgatcgagaatagacatcagagctgaatgttccctcactgagcgctcaatccgaccatcgctatctgaagcttgtttcagattggctgcaaacctatttaacctatcctgcaaattctttgtaagtgtgctggattgaggcctagtccaccgtgttccaaattggcttctaaattgaccatcttctcttgcctctttctgcaagagttcttcaacttgaaccagcatttcctgattcacccggctgaaatctttaagctgctgtaattcaccttccaaaccagctggacccccacaaatctgaactgcctccacatcttcttttagatctgtaggaagagtgaaatttccttccaaagcaagaatggattccggtagatccatttccttgagccttacccgagttagctcactagcttgctgcaacttctctgcttgtgttcttataatgtcatccaccatttcagtgtacctagaaagagcttttgcactattgtccgggactaaactagcaaacattttttccttactagcatccaacacttcactcattgccattggtttcaccatggaaaatgccgggagaggaggtaaggaactaggggaagggaccctcatgaggtaaactctgtcattctccttcatggccctctccaggttgcgattgagactggcctctaacttgataactgcttccaccagctgtggaggagctccttttgaagatttcttggcctcggatagtgcagcaatcccactctttaatcgagcaatttcctctgcaatctcttctttctcatgcaattccaaactacacctatagcaagcttcagcaaaaaacaaagaagcctttagctgcacgtgagatatccagcccttatcaaaatgctggttcagaggtggagcagtcagtgccgcaaaagcctcctcataatacaacccaacctgtaatgacatccaagtcaaaatagaaatcaatatattatagatgcagtaatatccacaatttatagatgcggcaaataacagatactaaaccatcacagagtcttatatctaataactaatctaaaaatctctaacgaacacttgcgccaaaaaccgcaactttaacctaatcaatcaaatgtcaaaatagcccagtagccatcaaaactttgacatggacaaatatgatattgacatggttctgataaacaagatcatcaaagagtgacccaaaagatttctgtttaatagaaactgaggaatactatattcaataagaagccaaaaaaaaaaatcataattctcaagaactccaaattaccaagattagcacaaaactaattcataaaatcattcaataagaaaaaaaaatcataattgtcaaagaactcaagattaccaagattagcaaagaaatagcacattcctgtaacaaaagattgcatctttacctaaatgagtcaattcaattctacaaataacatacataatataatcaattaaacacttaacttcccatctgtacctgcctagagatcttggcacatactgaggaatgcaacaataactgcagaaggtcacacatgataattctatgcaataataactgcaaataatggtgttttatggtcgcacagtgtaatattttgcagcttgtgagaccatacatggttattttactaataaaatcttttataaagaccatattaacactctcaagaactccaaattaccaagcttagcacagaattcattcataaaataaatcataagcaaagaaaaagcaattcaattcacttcaagattaccaaaagatttcatctttacctgaatgagtcaatccaattctaaatataatcaattaaacactaaatttcaatcatttttacctgcctagagatctttgcacatactccaggagtactccccttagcaatggagttctcaaaaacacactcctgagcctgagcaagcatcaacctctccaacattccagcacactccaccgacaaatccacagtcgtagagccaccaatcgaagccttagcagcctcattatctctcaagaaaagaaaagcaccagccgcagcaataaaagcatgagaagcttgtctccgaccatcaacagtagaccgatcataagacaatccaatctgactataaacagcacccaaattaaacaacacagcagccttctccagatgaatattctgctgagaagccttctgtttgttcttaaaagcatcatgccaaacgaaagtgacggagttcacgtgatccttatcgggagagattgggaatcgagtctcgacgagacatagggctttgtaataattctgaagaagatcacgacgggcggtgtgagaaggatcggattggcgttcgatatcggaacgatactccttgagggtttggagatcgtcttcgaggttttgagcttcgcgatcggagtaattgaaagcgatatagttgcgaagaggacggtaaaggtcgatttgagtagttttcttctcgtagagagcgagcatgatattggtggtggccgccgacgaagacgacgg

SEQ ID NO: 78445 - DNA, 534 bp, Cannabis sativa
  modified_base (131)..(132): a, c, t, g, unknown or other
ttgagcaatgagctaaacaaatgacagcatagtgagtaattttgtgcttttttctttgaataattgctggtgaatacttaagtttaattttaggttacagataaatacttaagtttaatttttgacagtannaatacttaaattatatttctaaaacttctgtaaatgtaatgatttatttcacatacaaggtctctaattcaagtctaagatgtcctaactatgtcaaggaaaagaataaaataaacatttgactccttcacatgtaaattccacttggctttggggatataacttagttaatagaacttcgctcttccaattaggtctttgcaatcatggatcgggtgtttaattgtccagacagtattgatagcatctaatacctaaatcggtagctaattttttttaattaacaagaaaaacaatcgaaacatgctatatctggaatccatgcgaaagaggatcaagtttgttcttacttttctaaatttttttgaacaagtatttaaaaaaatgcaacatttctaccaa

SEQ ID NO: 78446 - DNA, 1049 bp, Cannabis sativa
  modified_base (582)..(588): a, c, t, g, unknown or other
ttatggttttgcattatactatgtattttcagatgaattctggttaatcatacataaatgccccttaagtaattttaaagagtaaagctttgtaattacataaataatagaaattattatctttattcataactgaggttaaattttacatcaacaatgtgcgttacatcatttattaactggtaataaggtcacaaatgttccacgttccaatagttctttattagcgagtcattgagtcgagccaatttgtaggctccaattccaactgctgcttcaattacatatggaccctcccagttcggggtgaacactcctgtagatgcatctctcgtgtttgcaaatactcaccttagcaccaagtctccaacattaaatagtgttttctttagttttttgttgaaatatcttgtaacttggtgttgatacgctgcattattgacttgcgactcagttcatttttcatcatgtagatccaggtataactttaaaagctcctggttttcttcttgattataaaactgtcgcctgtgagtcgatatgttcacttcaacaggtagcattgcttccgagccaaatgcnnnnnnnaagggagtgtgtcccgttgccgtcttctcggtagttttgtgagcccaaagtacttgagataactcgtcgacccacctacctttggcaacgtctaacttcttcttgatagtatcgttcaaggttttattaatagcttccacttgtccattcgcctgaggcctggatactgacgagaagctcttaattattttgttcttctcgcagaactcagtgaacaagtcaccatcaaactgggttccgttatcgaatactatcttcatcgaaattccaaacctacatacaatgttcttgaagtcgaggactttcttgcaggttatggaaacaagaggctcgacctcaatccatttagtgaagaagtcaattgctactaccgcgtacttggctcctcctcgcccagtgggtaatggcccaattagattaatcccccatatagcaaatgggtaaggtaaggtcatcatcct

SEQ ID NO: 78447 - DNA, 601 bp, Cannabis sativa
ttaattcaatttactgataaaaaacatattgatttcaatttcttttttcatttattgtattatatttctccattagtttattctcattttcattagtataaacgtgccataagtttgttgctagatgtgaaattgatacatacaattggtccaagttaggggtggtaattcgtgttcgagagtcgtattcgtattgtgtcaagatccatgtacaatagatatatgctcgactcaaatatgacccatttaataatcgtatcaaaaaatcaaacccgaacatgactagtttataaacggattgacccgacacgacctgtgtaacctgtttataagcatattttctataacacatgtcaacaaccaataacatgtttatgaagtattcaatacatttatgacttgttaaagaactaaaataactttaaatatgtcattaacgagtcagtttcgtattagtcgtgtcaaccggaatacgactcgtttattaaatgagttagacgagtcaacccaaacacgatccaaactcatttaaagcaaacttaaacctgctaactcttgtacggctttcgagtcttcatatcgtgtctgacccgttttgccg

SEQ ID NO: 78448 - DNA, 3328 bp, Cannabis sativa
taattctctactgaattggcctagatacaatatttacttaaagaatttaactttcctcttcaagaaatcctagtaacctggtgtgacaacatggacaaaggtgcccttatttcaaatctggtctatcatgttaggaaaaagcatacagaattggatacaagagataaagtgcttgctaaagttcttgacatcagatatgtgccatcaaaagaccaagttgcatatattgtctcactaaaagcctttccaactcaagattttattttcgtattgacaatttaggtgtggttttaaccctacctgatttgagaggaggtattaaaaaatgaattggttaccagtccccttttggtcatattttattctttatggctgttagtatccagccattgatttgtccataatttgtagtgattaggaatactgttaagcctctcttttctctctgttttgttagaaatgtcagaaaaatattctctcattatggccaagtgttcttgttctagaaacttttgtacccctgctttttggttatatatttcgaatggattgtgtataagcatataatataataataaaaacatgtaattcattgatatatgtgttcagtataataactatatttaagttttcctagaagctttgattaggggcatatcttggtcacaaatgatcagtaaattttgcaaaaaattgtatgcaactttcgtggctatatattgggtgtgaaaagttcgaaatgaagctatatggatgaatcaaaggaactgaattgatttggtagttcaaagaatacttaaggaaactaaaaacatgattaatagtgttatgccaaaaaaaaattgtatagatattgattggtttgagtctttgtaaagatttgagttccaaagttctaattgtaatattgtttaatagtacttaggtctctgaaaagatgctgcaccctagaataagctttatggatataagttatacaagtacagaaagcatagagagacacccataaaattatctatataaatagttaaatactaatacacatgtaaaaactaaaggtcgtaattaataacaggttactatattattatatatggtacgtacctttgctaggtaatgcatgttactataaacgcacgtgccaaaatgtttaaacattaatgaatcatcatcataaggaagccttgggaccaaatcgtaaccataaacgaatctaaagtaatgaatatcatgttccaccaatttatcttccataaactgacaaaaggtttggtctccgaccctaggttgaccaaaggtgtacactccttcaagtctctggagtaaccatttctcatcatgataagaaagaatagcagtgaacacagcagctagggccccacccaagctgtgtccagttacaatcaacttggctttgtcgttttcttccaaaagcttctttatttctaatttcgtagtaagcaaagggttttctcttttcaaaatcaacctctttaggaaaacctttactcttttgtaaccctagagctttcatgaagccaccgtggatttttcctactcctttaatctcgtaccatgatatgtctatgtcagaactccatgcttcggcgtcaaatggtttggttcctctaaaggccaccacaatggtatcatggtcttcacctttgtctctcataataaaggcttgcgttgtggctttgttttgataatctgtttgtacgtatataatataataatcactttcaatatgtaacaataatatcattaattattaaatcatagcatatgtaaagggaactcaatatactccacctaataattatattaataattcttttaaaaagatatatatatataagtatattaacaaactaaaaaattatattcataaattagtatgatatataagagattttttaaatccttatatagaaaaagataaaaaaaaaaatacaatatgttcttcttatttttaattaaacataattttttttttgaattcataccgttccaacagtcgtaaaatcccaggaattccatctgcaaaaagattaatcaaattaaaatattaatttatttaagaaacaaacaaactataatttataattatatttttttgagaaaaaaaaatagaaaaggatatcattaattaatttatttatgattcttttaagagtgactaaaactaataacataatattttccccctttttgacgctctgctagggttttggccttttagcttacgactggggctatcacgggtcgagggtcgcgtaagaatgagacagtggggaaaaataaatcaacagtgaagaagaagaaggtaaagaggggactgacgtcttctgataaagttgtacttggtgttcaaggactgaatctattttctcaaacttttggtttacaaccaagtaaggaacaatgaaaacgtttattgttgttgtaacttgtgtgattgagtcatttagattttggtagaagcaatctcttgtttaaatatttcagaattcctatttgtactaaaaagctccttgtccttaattgtgaaactttgattgaaaaaatagttcaaagaattagagtttggagttcccgaaacatttcgtatgcgggtagaacagtactagctaactcggtcatgaaatctatccattcctattaggctcaactcatgataaatcctaagtctgtgctgagtaaatgttatatgcaaaagttttttatggaaaggaatgtctcaatcaaatgggtcgggcctagtttcttgggatgaaatgtagtgcaatacgaaaagggaaggaggtttggggttctagaagaatcaaaaaatggaaatgatgagacagaaattgggaaatatgtctaggctatagagtcgaagcaagattctttttaggtaaattgggtgaattctgtgtacattggaaaaactgattggatatcctatgagtccccaagttctggtagtggaaacaagtagtttgaatcaagaacaagctcagggacatgaacttttttactcactttaatacaagggaaatacaatatcaatgaagggtgtaaaacactttgtccttcccactaaacggtgacttggagaagtggagtttggaataaattgtttatatcaaaacacatgtttgtgctttggttggcgattttggatagattacacttgaaatctcgtttgtacaaatttaatatttgttcaaatgatgattatgtgctttgtgatatggaaaaaagaactagagagcatgtattctttgaatgttatttatgtaaagtctttttttggcaagttaggtgacaaaataatttttcc

SEQ ID NO: 78449 - DNA, 897 bp, Cannabis sativa
taaattagtggaatccatgctaaaagtcaattctaattttttacaatatactatattttagtgaccatgaactctccttatatccacaaaatgtaatgtgatctattttatttttaaatcactaccgatagagtattttttaaattcccacactagaaagtcctataaatatattcataacggtagtcattaatcttacaaaagatcttaattttttttggttaacttttagttgaaataattttttagtccagcctagtgttctagtaaataagattagaaagaaatacttactattgtttatttttttttgcctccttcaaactgaagatttaaataattttagctatgatttttgtctctacttgcacatacctattaaattaattacatcaccataaatattctcttttacgatgcaaacatttgaatcttattaataaattttacgaaatgaatttgaatttgaatttgtgaaatttattattcttatgattgtctcctataaatgatgtacaatttcgactacatattaactcttactagttgatcatttatagtaagaatgttatgttattatgctttttttttttacaatattggaatcagagttcttttattttactttttgcaatttgggagtcgtagagaactttgggataaacatatttcaaaagggttaccattatcactgtagttttttttttattaatattaaaaatgagtaaaggattcattcagaaaaaaaaaaaaaaaaagtaaaggataatttatttatgatatccaacaacactattgtcaacttacatcaatataatttaatattagaatttctgcatttttatttaaattaaaatttgtgagagcaatgttatatagtttaaagcgtcttatagt

SEQ ID NO: 78450 - DNA, 4596 bp, Cannabis sativa
tttgtttcctatttcaattaattttattaaacggtccaagaaccaggcggctaactttttagcttgttcttctagttctatttctggcagtgtttcacgcgggggtgttgtccctgctggtttggaagctatcttggtaactgatttaatttaataaagattaaatttttggttcaaaaaaaatataatgaattgaaaattcaaaattacacttaaaataatctttttttttaaaaaataaataaataaatagagttgtagaataaaattattcttttcccaaataataaatgaaaaccacaagaatatttgttaaagaagacaatagatgattggaccctactctacacctaaaaccaaccaaacgttccaataccattttcaattaacactttttctttttcaattttcaaaatatataaaaaaaaaaaaaaaaaaagctttcttcttcaattttcccccaaattccacaaaaccctagaaatttctcaaaatccccaatttcatgcaccaccgagctttctgtcaaagaaagctcgcatctttcccaatcatgaatcgattcaatccgattcctctcgtcctcctcatctccaccttcctcttctgcctcgcctccgtccccaccgtccgatccgacccccaattctcctccgccatccgattaccttccgacgctacccatcaagatccatgcggccaatcactggagaaaccctcttcctgccccgtcacctgctttcgaaccgaccccgtttgtggggtcgacggtgttacgtattggtgtggatgcgccgaagcacgatgtaacggtgtgaaagttgccaaattagggttttgtgaggtcggtaatggaggttctgctcctctctcagctcaggctctgcttttggtacacatagtttggctcattgttcttggattctcagtcttgttcggtcttttctaatccatttttttttatatatattattactgaatataattgattgattcttcttcttatttcttattcttctctaagatcagatattagggttcttcatttcgtttgaaaattctttgctctttgatcattgtgtattgaaagagccggagatatttgtgtattgatgtatatgtaaaagagggatttttttttcttctgtatttaatgttatcacatatattcacattgattccaatttttgcattgttttatatttatatttatatgtaaatatgtatatatataaatatatattagcaatttacaagttgttgaatgttctaatgagaatgaactcaatttcgaaccaacatgtttctcaggattagaatttggataattcggattgaattgttcatttcatgatagacaaaattgaattgaattgtttaaaaaaaattgtgacatttttgttaattctattgcaaattgggtgaatttgagtttcaagttatgtaaatggattttttgaaagaatataataatagttatcaatacccaacaagtgtagctcaaatgattaaataaaataataatagacacaatttgatggtggtagaattacttcataccatttgaagaagattctgaagaaaaacaatggttttgtttgaataaattatacataattgattagtaatttaaatccaggttggttttgctggctttctgatgaaacatgtgaactggcattagagagaaatgacaaagaaaaactatagcaattattgacatttaagccctccaacttttgaaggactctttttgcctctggcttggcaataaaaaaatgaatatatgaacaaaaatgaaaagtggtctattgtgaaaaatttccaattccataacatgacaataacatctgtttaatctcattattgaataaggcccctaataattgctcatcatataagatggacaagttttactctttgccggaaaatgaagtaatttgtatgagcatcctaaagatactaccaacctcctctttagagaaaccattatggaatcatacatcaaattacaaaatgtcaaaagctcatcaatcaaattatattttgttggcacaattgtttggtggaatcaaaactctattcttaattcttgggactttggagtgaaaacccaggcttttcttcttcgcgtggagcaattttcggtgttcttgaagtataggcgctctcgtatggagcatcgtcaccctcatcctctaccttggctattgtctcgccaggtgttttatgaaccccattactggaagtattattgctaactaggcttttgtacatggtgagagcttgagccatcatgttggcaggattcgaagctgagctcggtagcaacattgttgtgccctggtaacaaaatgttaaatttatggggaaaataaataattgaagcaaagacataagtccacagaatgttaagaaaatatatgtttttcacctccttagcaatattactgaaggcttgaatatattgttcagcaattctcaaacttgctgcctgcaaatgacatcataaggttagcaactcaatatactttcagtagttacggacctacagtaactcatccggccgaacatattataaagtttgaagttcaagcccgtctcgaacacttaaaatagtatttgttatattttcatttcgttcgccctaaagatcgggtgcctaaaatgagagacgaaaacaataaatataaagcaaaagcttgtcccccaaacagtaagatttctcttttggtaaatgatgacaatctaataatggaaccaatggtttcctccatgtaaatgcccatattatatatatatataaataaaacatgtggactcgtatccatctcatggaaaatcttggtgcagaatagaggtcaaccagtcatcaagaatggacacaatttaacaaaatataacacaaaataaaattgtctgctgcaatccgaacaggagctcagcaaagatacgacaaacaagtaaaaaatttgagcattttattacgagcagaccatcaacatccaatctaagggattgaaaaaccatacctcaactcccccattttccttgagagtctttgacacaacggcaagaccttcagcagttgcttttgctttggcaagaatggcttccgcttctcctgtagaagtaatcatatgttaagaatgagaagagagcatcaacatcagaataaaccataataatgtagatgaaatatgattaatcaataggtcaaggagaatcaatacccctaactctacccccttggtaagagcttgggtaatttatttgtcccacatgtatcctctaaacccaatttcgctaaagattcaagcaagcaacaacccattaagagcatcatacattacttgtacattaagaacttggtacagcagagtagagcatgctaaatgatacacaagtaaagactagtaagacttcatttagagatcctaagtaagaaaatatattttgtgactcacaaagtacaactttatattacttgcattttcagaattaaacaaaattaggataaatagagtacaactcaacaattaaataaatttaggataactagaatataacttgccctgtgctctgttgacttgatttatccttgcagcttctgattctaagatcacagaactctttttaccgtctgcgatattgatatgggcctgcctttctcctgtaaagattaaacagatttttttttaacaaatcaatagtcataaaatcctaaatatcattattatgaatacaaggtttcagattaagaggtacttctctgccatggccacatcaaatttccttatagatataactgatataaactaatttctattaccttctgactcgagaacttgggctcgctttttacgttcagcttctgcttgcatctccatagcagcccttactccacgaggaggagatatatcccctaaaacaaggatagatagtagaaagtttataaaagaaatattgggaacataaacaaagaaagtccatcatagaacattaaaggtgacttacttatctcataacggaggcactcaaggccccattcttttgcagccttgttaatggactcctgcacaagatgccatgcaacagtcattcagtggtcctcgattatcaagggtatgagaaattttagtaaacacctttaacttaaactactcacaagattgaattcatacaaaaccaagtataacatgattcacaaattaccgacataaacgaaaaatgactctcaaaaaacttatactacgttctttaagtcgatcatcaaatgttctcagcagcaaaaagacacaaaaatgaaacaaacaatctgtgatccgcatgattttatatcattaccattcacatgaaaaggattgataaaaaaatgtgaaggaaaaaaaatggacgacaaaacaagtgaaacacctgttaaaaactagttctttgcttcatgataactaatttcaattttaatattaaattctgtcttagtaaacaacaaagcttcaacacatgccttgcaatactgccagcattttgttcatattcaaatctattctactcagtactaacagacgatacattcagattctcagataaagaaaa

SEQ ID NO: 78451 - DNA, 2871 bp, Cannabis sativa
acacgtgtgccgtgtgcatgggaagggaatctaatagatgaatttttaatatatattatataaaaaataccttttaagaaaatatatattgtaaaaaaattatttatttagctaaaaatttgttatccaattaagtcttttaatagcatgttcttgatttattgtaatcgttttaagaatttttttttgtttattttttttagcaaaacgagttctaaatttagatgagacttgtgtttagtagacagacttataaatttaattatctaattttgcatatcttttatatttcgaatttttttaaatttggtgcattttaatggaatttgttctttttcttaaaaaaaagaaattgtaatccaattagagttgtaaaattgtcatattataattattaattatttaaattggcattgtgttgtaatattttaaattaattagtgtttttgtttgtattttttttttgagaaaaattatttatattattttgaattgagtaattaatatttttattattaaaatacacataaaaattagttaaaatttgtatttttttgaaaatactagaaaaataaatacttatgtaacaattaaataaataaatgatgcattcaatgaaaataaattatccaatccaataataattggattagatttgaattgaatgagggagttaattagaatgtatatataaatatgacacacacttgtgcattaaattatttttgataggtgaactcattttaaataaaaataattaattaaaattacttgatataaacatgtgtgtcaagttttggtataaattatgtgtgtagatatcattactcatacattaaattagataggtctacaaaaatattagattctgtcctaatttttttatttttttttttgaaaaaagtgttctcctagttggagttaatggaaatacatatctgtatttttttttttaactataattagatacaaatacacatatttctaatgtaaatttatttgagtagtatgctatatatttttttccactcctaattaaatcaattatcaaatagagtttgcattttgttttgaaaagttttcaactttttccatcttttcttaaaaaaaaatcaactttttcactaaaaatgaatttaaaaccttgtagcaactagctagtattattagatggcccatagtatatatataaaaaaaagggtaaaaaaaatcataataattatagaagccagtccattatgagaagaagagatgagtttaaacaaataaaaaaatttatatacaaaaaaaaattcagtaaatggattttaactaaaaataaaaacatattattactatcattattatttttttacaatactaacccactagtagaataaaaaaacagatatatgaaaaaacgacacaaaaagcccaaaacgacaatatattatttaagcagttccaggtggttttggatcatgatttttgttggctccagttcctggataatcaagagtagtttccaaatccatcctaccttcttgtatcaaaaattttccttcattttcttccaaaccaaacacttcctctcccaacaaattctgcatatttcaaaaaattcatatcaatacaaaaattacaattaattaaccaaataatttagagaaagaatagtaccttttccattggtactttgtgttcacccaaatttgtaaatttatttaaagagagactccctataaataccaagaaaaaaaattatattaaaataaatgaagtgaaaattgaaaagggtatttgtaaaaattaataaaaataaataaaaaaatattattagtacttacttgtgattggaattgaatctgagaagagcaatatatgagaagaaaaacccagaaagagtgtagtaataataataagaagtgtttttgagaccatagttttggttttggatgaaattgaaaagaagagatttttatttttttggatctgagaagaaaaagggttttaaatgttataattgttttggttggtgtgaaatgtgaataggttagtagaaaaagatggtgggctttggtttttataatgaataaaataacataagaagaaagagagtgagttaagctaaaaaaaaaagtcaactatagttgaatttattatttttgtttaaaaatgaaaaagaaaataattagagttgtgaattgtgatgacttgtctttgtctatgtggttttgtgtgaataccgacatggtttggctttatctcttattaaccagtgtgcttgctaatgctatacataataaataccattttatttgggtaatatttttttttacaatttaaaaaaaaatacaaaatctaaaataatttttaaaaaattatttctacaattaaagtagtttacacaatttatagtttactcacaatttttttttttttgaatgatgtttgaatgtttgaaaaaggaaaccttttatataatagttatttaaagataaataataaattaaaatttttacttaatttatacttttatagctagccataagtaaaaaattaaaatttattcaaataagatttagtgatatttttggtagattgttttgagctaatgatgtgacacttttaaattggttgaaaattaattaatttagtagattttatagacttttaacttgttggatctttccttaaaaaaattgttagaaagctactttcaaaatttggaggcgataggcattaaaaagactcttagttggatcaaagacaagcagtggaataaagtgcagcgggaaacctattgccttcttgctgtccaagccttatattctttggtttttttgtgttctccatttagagtggtgattcaagagtgtaaggagttgcttg

SEQ ID NO: 78452 - DNA, 1067 bp, Cannabis sativa
atcattcagtgcattgctgattttgtggaattgtaccatttgatttgtaatgattaggaaatcattgtatttagaatattcttttttttctgtttttatttcttgccagctgtacagagcaatttcagctctttcattgtatccggcctatggccctgaattctatataaggaaatcaatatctcagcatttattgagctgagcaatacaatatcaatcttctctgaatttcaacttgtcctactcgtgaggatgacttttcagccatttataattgatcgatcatcgatgagttacaaatattaaagaaacaataggtacaatattaataaagtggccaacaaaagtgggagcaacaaagtccctaattattcacatggaatttttgacggtgcataaatgcgccgacgaaactactcttcaccgacacaatttgtgaattgcaccggcaaaaatcatgaatgcaactgtgccttttcgtgcgaacccatttcaaaggttcatttacctttgccagtggacatttgcactaataaaaggtcaaaagaaaatggcgattaaaatcctgcgtgtggacaattcttagcagggaagtggaccttttgtcggggcacatttgcgccgccaaaacgtcctattaaaatggtgagaaaattcccacgtggaaattggatttgaaagaaaaaaaaaattgacgtatatttgcaccgacaaaagattaatgaaatgatgcgtttcgatttatggttaatgaaccagcttttactagtgtgattttagacttttaccaacttaacaaatttcgtcggtaaaaggttctaattaaaatcgaaggcacaaagccttcttcctcactttttttctctgcattctctttgtttctctctctctctctgatcaccatccttccctctctgattcttttactctctctaattctcactctctcatctctctctctctctctgtgtccaaaaaatattgaaaaaaaggcctccgaccattattgctgcccgagtaattttgactgtcgcctccctttctctcagtcaaggtaagttttaatt

SEQ ID NO: 78453 - DNA, 537 bp, Cannabis sativa
catttcaacccctatttttatgtgtcttgttattggacacagtcgtgccaaacattttttatagatttcgttgttttacgattgatcagcgatattttttaaaaatactagttatattttttaggaaatatactcctttagtaccttgtgtttttatgaaaaatatatttggtaccttatgtttttaataatacttaattggtacttcatatttttaaattgtacatatttagtatcctaaaataaaatttaatcactacagttttattaattattaaattaattataattatatatgtaattaaataaataaatttgacttcagaattcataaaactttagaaaattgattgtattgattaaattttattaaaaaaatttaaatttagggtaccaaatggcaaatacgtatgattgtaaaatacaagttaccaaaaaattattattaaaaatacagggtaccaaacttgtatttagataaaacacagggtaccaaatgtgtaaacaccctattttttaacaattctcatttttgtc

SEQ ID NO: 78454 - DNA, 1056 bp, Cannabis sativa
gtttcctccaacagggcaattaccgggtcggttcccgacgcagcaaattccggaggtaagttccgctactgggtctgcttctgatttgggttcaggttcaggttcaaagtcgtggcttggaggatggttgggtggtggggataagaaagagccccagacaccaagtagtggaagcgagacgaagattttggagagctttgatgcgcctccagtgcctagcttcgagttcaagtgatttggggttatcggttaagaaggtatgctcgtgaaagagaggtttttccaaagattgcattagaaaataagtatacaagcgtgaattttattagaccgcgtttcacttttgtatgggaaaatactaattttatgctgcaaatttaaattttgaaatgtaattagttacttttgatgttccttcattataatgggtgaaatttttgttgagttatgactcgaatagttgtggttctgctaactactaattaactcactctgttagtgttgtttgcgactggcctttaattgagctgctatcttgtgttgaagctgaaataaaacttgtttaatggctttgaattaatttcatctaatggtagttgttctgttaaccactaattaactctgtaattggcctttaattgagctgttatcttgggctgaagaagctgaaatacaattctttctaatggcttttaatttcatctaatggtagttatggttgtagcatgaagagaagaggtagggagtatttgatggtggagcagagtaatggctaatatttatttgttacgtgttatttttggtttagttaaggatattttttttcttactttactttcattttttggagggtggttcatggtcttgatttacgaaaatttctcttgttctatttacaatacaccatatataagcaaagatttctgtttgaagaagaaaacaggtggtagattggtgcatctgtagactgattaatagaaacagcttcaaccacttttactttcgatgcaattgacccttctctcaagtcttttccgttataactgtacaaaatgt

SEQ ID NO: 78455 - DNA, 690 bp, Cannabis sativa
  modified_base (218)..(219): a, c, t, g, unknown or other
ggcatgcaaataattgttggcattttctttaattaattaataatagaataattaatatttgagcttttttatttttacactttaaaatagacttttttttttttatatatatttttatatataatcgcaaccaaaaattgtatagcaacctacataaaaaccaccgaataaaccattttagaaactcaaacggcaaatttttaaaaaaaaattaaaannatagtatataaggtaatttttctttataattttatttttttaattttttacactaccaagttttgttcatatgacatacgtcttgtaaataatacctctcgaaatataatttgtatagtagtatggtttttccatcacaatttattcaattttatagtaaaattatatagtgaaatgatagatggtatatgataaatattgacaatattagaaaaatagtgtatatcttcaattttttacaatggaaaatataaaacttgaaaacaaaaataaggataaaagaaaaaaaaaatcatgtacttatatctttggttatttcaaaataactgtagacataggtctccattaccctaacctcatatctgatacaagtggagacctaattctttaaccgaagatataggcctataaaactctaatttcatagttgaaactcgcattttttattacactataaaaattaatttattt

SEQ ID NO: 78456 - DNA, 1369 bp, Cannabis sativa
aaagcttggaaatgggagtattttgtgcatgttattgtttgctgagattaatagcctgttgtcaatgcttgaagatgttcctggtgttcttgagattttgatgcatgttgttatcttaaggtgaaatattggtaattatttgtgtatttgagctattggggttatagattgcatctagattgttttgtgtaattttagggttgaaaatatggtttgaatttttgggttttctttgagggaatgaaagctttgaagttcaagcttgaattatgggtaatggtgtagcttgagttctatgcttagttttgtgtatgaaatggtaaatttgagctttgttttggcttagaattgttgtgtaaggtttgtgagatataaaatttgagtttatgtatgatttcgtttgattttagcatatgttttggttaaggttcgaagacatgaaaaagttggcattttcaaaccttaaaaattggttttctgggtttttcgaacctagtggccgcgaacggatttttggtcgcagcggccaaaacctagcagagaaccatcccattttcccgattttgttttggtcataacttttgactcgggcctcaattttggacgttctttatattttttgaaagctcgttttaggctctatatgttaatttttaaatggagttaaaattatgtgtatatgtgaaagtaaatttgggaattaaccctatttgtgatattccaggaatgtgtgattaggattacctgcgcttgctcaggaacacccagggatttggaatctccacatacttggattaccaagtaagacggtagttagcacgtagagttaagcgctgtggcgctcatgttagatagtataatgtgcttaagtgagaaatcgagattagggttatttctctaagtttagtaataatgtggtctagggttattaccctaggatatatgagaatatgaaagtagtaatatgcaataatatataatatggttaaccaaatgaaaacatgaattagggttattactctaaaatagtatgtgtcgtgaattagggtcattaccttaagcatttatgttgtgaattagggatattgtcctaagtaattgtgttgttgtaaaatttgtgttaccaccctaaagatatatatatatatatacggtgaattagggttattaccctaaatatgtattattttgagcatgctatgatgtggtttatgattaaatgattggttatgcaagttagggtcattaccctaaaacttcatatataggagtatatattgaaggtgttgaatgtatgtatatatgtcaagagttatgtgtgtaagacatgttgggttttgtgccctaaataagacccatttcaatataa

SEQ ID NO: 78457 - DNA, 1594 bp, Cannabis sativa
  modified_base (150)..(161): a, c, t, g, unknown or other
tcctctcggtctcatctcagctatatactaataatcctctttttctcgaaatgttaatggctttatttccatactattattaatttattattgtgtaataaaagtggtcaactcacttgtgtctatttatttctttattattattattannnnnnnnnnnnttattatttatttttttaaaaaaagagaagtttatagcaaccaattaattcttttctgatttccaaagaaaaaaaaaattaatccttttctcttttctgttggttattcttgaagataacactacaactaccttgctgtcattgcttcattctagatatttaggattaattatcatttaatccactgaagatatatagtatttttcacacacgataatataatttgaatttgaacctagctaatacaattaataacaagtatatagaaactccaacaaatcatatgcaactcaaatctttactaatataaatcaagcccattctaaccaaaataagctaacaacattagagagagaagagaaagaaagaaaaaaaaaatctgcatgtacactaatattaaatacacaacatgagaagcagaagaataggatgatttttattatatagattaattactattagctactctttctgggtttgttttttctcctacttttctttgtgggatttattttcttgatgttattattattagctcctcctccaatggttgccgatgattcttctttgtcctcaattagctttggatgatgatgagtttccccttctagtacttcatgttcatcgattttagctttcttggattgactctggctaataataatgataccatcatcatcaccaactactatttcttcttcttcttcttttttctgtagacttttttcaatgctaattttccgaggcctacctctctttctcggcgtcgactgatgatgatgatgatgatgaggctctccttttatagatgaagctgcttcagctatggctactgaaatttcctttgttttctgattctgcttcttcttcttacccatatcatcaaacttttatcactacttttgcctttatctttttaaccaatcgaaacaacttatcggggtgaagaaagaagaagaagaaaaaaaaccattagctgtcttcttgtctatatatatatatatatatatatacgtgtataatattatgatgtatagatatacaaaaatatatgatttcttgtttaaagaagaaataagaaaaaaatacttcttcttaagggggtggtaaagcagctatggactcgtatctttgactaataataactattattattattattattattattaattattaatattattcaggagaagactccattaaaccacatctcttttctcatccaaagataagacccaaagagaaaaagagaggcctgcaattaagtatatttaaaaggatcttaaaagcaaaataaaaataaaaataaaataagggcacatacttaaagaaatatatatatatatatatatattttataaatatgtgcctttttaataagagaaatgctaaagggcaccactggtgcctagcaccctcctacgtgttaa

SEQ ID NO: 78458 - DNA, 622 bp, Cannabis sativa
acaatataatataagactatggaaaacaaaaggggaaaagtatagctagggttccgagatctagattcttctggttccatggcgggttggggttgtccatgcaaggcttcttctctggggaataagacggcggttagctctaaactgaagggaaagaggaaggttacgactaagaagaagggtccaacttctttagatttggttttcaaaacaaatcaatgtccgagatcttaggagtggatgctctatccatttttgattttgatgaaggtgaagaggagttagctggtgtggtggtttctcagacgattgaggatgtagcagaagttatgatgttgaggtcaacactcatgcatttgtttgaataggaggctcgcttagattaatttcataaactttttaaaagcaacgaagacgtgtgaaggtcaagttcaagcaggtaagattgttacgcctccaattttatagagctctgttattcataatttaagcgataaatttggagagtcaaaatttggaagtaaatctctaaatcaaaaaatttagattgaaacatatagaaaatgaaatagtatactggcaatcagttatgacatgctatgttttgagagcaaatcctcca

SEQ ID NO: 78459 - DNA, 573 bp, Cannabis sativa
agaaatctatcaggcttgccaattttgtagaagagagcagttacagcaattttactttctccattgacctcatggctttcgtgaaccatgtgtagctccaagtcaaaccttttatatatatttatatgcaaacttattagtataaataagataaagttactttaaaaaagaacaaaataagataaggttgtattcagtattgtaaaaccacattaaatctcataagtaaaggaaaaagaaattaatgatatctaagtaatattggggagtagaataggattggattggttaaattcattatgttattatatattaaagcgatattggaaaacgcaaataatcctccttgctagtatgggataaattaatcgtatataatactagacaattacctcatttcaatggtgtacgaagaaaaaaaattaattaccacagcattgtatttaactagtatttcttttaatttgttgttggtagtagataatcaaggcactgattgatgagaattagtacgataggtcaaagaatccagaagaattagaaacaaagatcaccttctgccattgaaagagt

SEQ ID NO: 78460 - DNA, 729 bp, Cannabis sativa
aacttcactgcgacaattgcagtatgatcatgtaatgaccttttggtcatgttttatctatttaaattattgaccctatttttctaaaaatattaccctaatatatgtttatttgaattccattaattctcacttttttttttaaaaaaaaaaaatatctgtttttaagccaaaaataaaataaaattaaacactcatatttgaatttttaaatcaacaatgacttacttataggcacgaaccttatacatttattgtgatatatatagtatatatgttttggagataattattgttctattgtcttctctaactaaaccaagaataaatttctataaaaattaattcaacataaagaaaatgtactactgattacaaaaaaaaggatatactgatcttattcatcaaaaaggaaaaaacgtactactgattgcaagtttggcatcgtgcttgaccatgagtacgcagttttgcattcaaataataacaaaccatgcaaattaattaaattcatcaaaaaagaagaacacaccaaaccaaaccacacacatttatatatatttaacaacagctatatcacacgtaataaacatgcaaatagatagaagtaattagtacacgtaatatatgattattttaaacgagagagctaatagagagatgatatctcaaagcgcctttactcatctattgccccgtcttatatatccatcatatatatatatatat

SEQ ID NO: 78461 - DNA, 2657 bp, Cannabis sativa
agtgccatgatcaacttcatcagtttgattgttccctgcagcaagaggagagtcatttcgtgagggtgactggttgtttatgtgggaagaagctgtccaaaacgggacaagtacagacacgggagtttctggtttgcttgtatttaggaaccctgtcatgaaaggaaactcatcctcgttgaatataacatcacgagagatatacaaccgacctgtactagacagacacttgtaccctttgtgcttgtcactatatcccagattcacacacttagttgagtgaaactgaaatttgtgattttgataagcacggagacaagggaaacatgacacaccaaagactttcaagaacttgtagtctggttgttgtttaaacaagatctcaaagggtgttttaagtttgaggattggagtaggaagtctatttattaaatagacggctgtctggaaagcgtcccaccagtatttctgtggaacatgtgcttgagccagcaacgtaagacccatttcaacaatatggcgatgcttacgttcggcacgaccattttggccagaagtatgaggacaagggtgttgaaaactgatcccatgatcacttccaaaccgaggaaaaccctggtactctccccccagtcggtttggacacgtttaacacgacagctaaattggttttcaaccaataacttgaactggacaaaagcttcaagagcttcagacttggcttttaaaggataaatccaagtgtatcaactaaaatcgtcgataaagtgaatatagtacctaaaattggtattggacatgacaggggatggcccccaaatgtcagtgtgcacgagttcaagtggggcagccgccctctttggattatttttaaatgggagagagtgagactttcctaattgacaagcatcacaaaaattcagattggaattaatatttttaacattgaacttgtgtaaaacagtatccaagacacgattagatgggtggcctaacctcctatgccacctatctttgattgaacataaagactgactagtcataggctttgttacattcgactcgacagaggacacaactaaaccagagaaaacagtaggacatgagacggatttgagtggtgatatagctgaagtaggtgcatcaaactgataaagtccatccttaagcctccccttgagaactacttgccctgtctccttgtccttcacaaagcacaaatcagagagaaattcaacacacacgttattgtcagatgtaagctttgaaatactcaacaaattcttggtaatgctaggaacatgcaaaatttcctttaatataagaggagaagcagatagagtttgtaatgagcctataccaatatgatgaatgggaagccgattcccattggcctcagtgaccttttccttaccattatactcttctttgagattcattttgttgatttcagccgtgatgtggttactcgcaccactatcagcaaaccaagcatcatgatcgagagtttcagaggtggcagtgaaggcagctgaggtgttttgagacttattctgattgttaaacccaccaggtggcccatgtagctttcatcataccggttgtagcaatgagctgcggagtgaccatacttgccacaaacttggcaagttggacgatgaccactagttctgcctcctcttcctctggatctattactcgagcctctattgttgttgtggccacctcgattgttgttgttgttattccctctgtttgctcctggatgtgcgcctttattggctaagctagcagagggattcattggtactccagtgagctttgaagagccagaaaaagagtggagtctctccattttactgtcaagacttaatagcatgtcttgaagttgttgccatgtcgtagagccgcgagcttcaatcagcagcaccatgggcagatattcaatgtcaagaccagacaaaacattggatataagttgattttctgggtatggttctccggcaagagcgagaacatcaggccactgacgcttttggcgcaaataatctgccatggataaagctccctttctcgctgtttgtatctttgttcgatattcatccatttttgccttcgaatgcgctccaaataaattttcaagggctgtccacaaggaggctgaggagtcacaacccattacttcgcaggcgattccctctgtcattgatccataaagccagccaagtagaagttgatcgttcacgatccattgttcaaacgcagggttcacctgtccaacagaactaacactgccatctaggtcagttgaaggggaaagaaattcttgaggtttgggtaaagtacctttgagatagccatctagccgatgtcctcgaactatggcagagaccatcgttctccacaaggagaagttgtttcgatccagcttgagagcaaatggctggttgagtgtgcttccaaattgaggaacaatgatattcggagctgagttttgagctgaaatgttcgagacaggagtctgctggttccctgcaccctctgctctggtggcagagcttccttcgactggtgtattatccatggatcacggcacacaccgattatgctctgataccaacttaaaattataaaagaagcagtagaaagaaggaaag

SEQ ID NO: 78462 - DNA, 590 bp, Cannabis sativa
aatactaacgaaaataggggtttttaccaacgaaatttgttgaagaagatgaagtatgtaacacagagcttcaattgggcattggattagtatacagtgccacatagaagaagatggagtaaaagcttttaacttgctttaacctttttccaaaagaaaaagatgatttctttgaggaccacaacccacgaaacgacgacgtttacaagcctaataataatagtggtagtagaaaaaagttgaagctcaccaaagaccaattacaagcctaataataacaatttccttagttaatgcacgaatacgcttattttcaaaaaaagaaaagaaaaagtcccaaagaacacatgaaagaaatggtttaggctcaatataactcacttaaaataaaataaaatgaatttttttaaaaaaaaaaaaaaaaccataaaattggctttctcccaagcaaataacaactatcaaaatcctttaaataactcctaattaaacaaagtttctaataccatattaagaaaatatgatcacttattacatcatagaacatatgataaactaaaagtaaaaaaaaaacccacataataaaaact

SEQ ID NO: 78463 - DNA, 2203 bp, Cannabis sativa
taactgtttaaattttatttttagtactgtaaactatttaaaaaaatttaaaaatttacaagtaattttaaataactacaacatatgcgatcttagaaaaataaactaaaaggtttccctaaatgccaaaactaaaaaaaaatatctaccaacacgattctttaaaggtatctactacataaattttcaataacataatatacctcactattaataacatagggacatgattttgtctcgtgattgtactttcacagaatgtattccgtgatgtacgacaaccgttagatgagagagttatttgatctgagggctgagattgatctaggggtaattagagttaaaaaataataacgtacactgacactcatctaatttactttgagacccatttaatgtaccacagaatacattatgtaaaagaacatcgcaggataaaatcgtgtccctaataacataacataacattgaaatttaaagatgaaatttttttgtgtaaatttctattgagaaagaaaaagagataaaagaatcttaaaaatttcataatccatccaaatgagaaaaatgcttgatgcaaagacaacaaaagtagttatcaaaagtgtccattattataattaaatcaaattattattatttgaatttaaatattattattatgagtatctatccaaacgaacatgggagtaataaaacaaaagcgtggactttacaagggtccactcctcgaggtcttctatattacaaaataattttaatatttttagatttttcggcgctaaaaattaaatatttaatctcatatattttaattttaatatatataaaattaaaaatttaataattttctttaaaataattccgtatatacaattttttttttaaaaaaatatgtttatacatacttgtaaagaaatattagacaattagaataaaaagttattttagagttacttaattctttataattaatctaaatattttttttatgctatggaccaacccaaatgagtcacatggcttgtcatattggaagatagtcttttttaactttttactttcgagaacacaatattgtaataatatttactaataattattattagcctacaactaaaattttattttttaaaattacacattttattattaattttaaaaaatatcatatttttctaaataagaatctaaaaatattttttttttcttataactcattatatttcaagaccagtcctgccaaaactcatatgcatcgatttctagcttgaatatgatcaacatatttttatattttaaacaatatttatttatttttcgttaactagtttatatagttgctcataattaattttgttagagtattttattttttcctatatcgagtttttagttggagttttgttccttctattttacagtcttgtttaatttattagttgatttagtaaattaataaagtttctaatttcccttaaaaaaattactaatctacaactacaatattgtcatagactagtttatgctataatatacatattttaattaattacattatcttagaaaatagaattaaaccctagaaacacacccaccaaattataaactagtaataaaacttaaaaaaaaagttcaaagttcttttctttaaggattaaatcataattaatttatgtatattattggttaaagtatatgctatgcatgtgttgattcatgagtttgtagggttgataggttacactccaagtgatctttaatacctttttaagcattatgtctcttatttatgtgtgttatgtatatatatgtatacatatctttagacactaaaatagaatcacatgctaaatacaatattggatttaatatgaaacatataaagtcaagtgtcttatattgatcatgatactcttaattaggatcattatatatacatataatatttgtaaggtagtaaaatccaataagaactatatgtatagtatatatgtatatattcaagagatgggttattaaaaaaatatgatatcatgtttaatcccaatcaaaagttttgatctttataataaaggagatacctttgaaagattatgtcaacgactacattgaaatatatataaataaatatatatatataaaaagaaagtaaaagaaaaagaaaaaagaaatgatgaattggatcataaactagatgaat

SEQ ID NO: 78464 - DNA, 1370 bp, Cannabis sativa
accaacgagtaactttgaccaagatcagttcaagtcagctatagtgaatccacttgtagtctcgcaaggatcatcgggaatgaataatggatcgcacgtgctttcctaaaatgcccttagtcattattgaaacggacttgtagtgaggattgatacccaatagtgatgatttgtaactaatgagtaactttgaccaagatcgtttctagtcaactatagtgaatccactagtagtcacgacgggacggttatgaataacagatagcataggccatcgtaaaatgctcctattcattatggaaatggacttgcaacgatgattgatacctgattgtgatgatttgtaaccaacgagtaactttgaccaatatcagttctagtcaactataaagaatccactagtagtctcgctgggattatatgggatgaatatcaaatcgcatgtgcctacctaaaacgcacttagtcattatggaaacccaatttcaatgaagattgattcccgataatgatgatttgcaaccaatgagtaactttcagcaagatcgattctagtcaactgtagtgaatcccctagtagtctcgcttagatgattggggatgaataacggatcgcacgttccttcttaaaacgcccccagtaattatgaaaccgaactttcaaagacgatcgatacccaatagtgatgatttgcaaccaacgagtaactttgaccaagatcggttctagtcaactatagtgaatctgctagtagtcatgttgggatgatcatggataaataatggatcgcatgtgccttctaaaatgcccccaatcattgtggaaatagacttgaaacgacaattactactcgatagtgaagattttaaaccaacaagtaactttgaccaagatcgtttctagtcaactatagtgaatccactagtagttacaacgggacaatcgggaatgcataacagataaaacgtgcctctctaaagagcccccagtcattacggaaatggacttgcaatgacgattgatatctgatagtgatgatttgtaaccaacgagtaactttgaccaagataggttctcgtcaactatagtgaatccactagtagtcttgccaagatgataaaggatgaataatggatcgcacgtgccttcctaaatttcccccagtcattacgataacgaacttgcaatgacgattgatacccgatagtgatgatttttaaccaatgagtaattttgaccaagatcgagtctagtcaactatagtgaatacactagtggtcacgacgggacgatcggggatgaataacgggtcatatgtgccatcctaaaatgcccctattctttacggaaacaaactggcaacgatgat

SEQ ID NO: 78465 - DNA, 541 bp, Cannabis sativa
atttgtgaaattaacccttttaataacctaattaattaactagaataaaattgttaaaattttgtgggaagaagtttccaatatatacacactgtcatataaaacaatgagattacaactcattgatttatgtttcgaatactaaaatatatatttgtaataataaaagcaatcactacccaacaatttttcatgacctatagtacctacttataatatattgtacgtgttttttaattataaattgtcacttcatgcaatttcatacatgtgattctataaatataatatattaacatttaccacaacatattacattgccaattcttttttgcatattttatatgtgatatagtagttgaattgaaagacaaaaaaaaaaatcattaattttttaataagctataggcatagggtagatagatattattattttacgtatatatttccaacatttttttaatcaagatgcattctcgtaataagtgagaattaaattaataaattggattaagttaatactttttgtgtgtgcattaat

SEQ ID NO: 78466 - DNA, 1230 bp, Cannabis sativa
  modified_base (982)..(982): a, c, t, g, unknown or other
aggggaaaattttatcctaattttcacacaatgtgacgtggcactcagtaatgtagcacgtgtcaagtatgtacacaacaagatgtggtatattcacttagggttctgtctttagagataaaccgagcgaattccatgccttgtatttctccaagagaagtgaatgtgccaaaccgagttccattctccgtgtagaggcatgcgataactgaaaatcttttaagatattttctttaaatatctccttgaaagtagcttaattagaatccctacttttatgggatttagtttattgagataatcgtaagatatggtatttgatttccgaaaattttctactatattcatattacattacctcttgtatatttcctataaatagtagaatcattcctttgtggaggggatcatttttctaactttctaagaggtcttacgctgctaaaatattaataagatttctcgagaatattaagaatatctcacgtggccggatcttgtgatcttaattattctctaaataaataaaaatgataccattatcatgggattcaacctctataaattcattgtgttcttattgctttattattatctaattagtaattgatctttcaattttattactttaacgactcagcgtcgttggctaaaagcgagatcaacaaaagacatttatattattagaaaaagagtgtctttgttgtgtagagaagaggatgttcgtctcttcctctgtgtttatgtaatttgtattgtttgagtctgtactcaagtctacaaagaagaagaacaacagtgctaccttcggaagaaggttcttcaagctttcgggagatagcttttcaagtcttgccttgagaggaagcaagcactcttcaaagagatcgaagagagttcaagtacttgaagttttaggaagattcgtttgagaatgtagaatacatcaagcttgtggcatataataagatggagtctattnatgcataagtcaattactttgtatttttgagacctatctaatgaatttatctctaggcgtggcaccgtggactagtaacaatctgcaaggattgttgatacgatgtataaaaatcttatgtgtttttatcttttctgcaatgtttattttctgttcaattctctatttatataattatatcttgtagctacagaataactgtttcactatcaatattcttatttcacaattaattaaattaattaata

SEQ ID NO: 78467 - DNA, 1326 bp, Cannabis sativa
catttttggagacaaagcatctttcaaggacatgtttgatcctaaatagctgctgataaaagctttaaagatctatcgtagtcttcttttcccaaacctttagcacattctccttgtagccttcttttgacatccaatagttacaaaattgaaaaggcttgaaacccctattgttaatcgccaattatttaatgaggcagtagctatgatccgagatcgccccccatctaaagctagctccagtatttgggaaggtgtcaaatttatttttacatgcatgaaaattgattattgttatattttaaatttagttttaatagaataaccttttaaaaagaaattaaattattggtggttacatatttattcttattttaaattaaaaactgactaaatttataattaagaatactaaatatattttaattttatttagataataataataataaattattaacaagattatttactaatagatattttgtcttaaggggtattcataaaatactcgatccaatctaatctacaagattcaatcaatatgttattcgtgtatctggtaagggacacgtggaatctagatcagcatcaaaggtccaccagtgggtcccaaagaagacaatttgggctaagcccaaattatataggaccttccaataacgtaccttagctccaagattacgtgatctttcgctagtgacaactcgtattcggaaggagatccggtactgtgatgccagaagattcaaacaacgtgttcttggaagaccagactagtttctttttttattcctgtgcacaagtgaagaaataaattttgcccaaatctcaacaaagaatcgtatcaagctaaaccgaaaaactttccacacaaagatcaagtaattaatttatgattaattgcccacaattatagggcatggttttgaccaattcagtcatatctaatttgcctagtcagcatattatctccatcgtgggtcgggcttcacaagatagcgcaagttatgtaattaagtataaactcccccatagagagaaaaagaaaactaagtgtaattctctaaatattatatgttacaccctaactaattttggcatgttagtgatttttaacatactgggcagcttgttgctaatcaaaaagattaacgaaaaacgtgatcaattaaaatttacttatttaattggaaacataaagtaatacatttataaaatctcgacatcccgtttacaaaatacatttacaaaagtttgctattcatatacaaaagttttgccgcctagcgactatacagcaaaaagcactgatgtcccaaagat

SEQ ID NO: 78468 - DNA, 509 bp, Cannabis sativa
agactcttgatctttgcttccaatattcctcttcttgagaaagtaattcatccaggatagtctcactcattttgagctcttcaaaatgttcaacacttgtgtcatgtgtattgttaagagccgcaactttaccttgggagattctgattttttttttggtaaatcaccaaattttgaacgatgccaaagctgaagattagtgtgacaactggaaaggttctgcagaagttgatcagtaggattaagagatgaactcttccaattttgtgagatgatatcatgacattggtcctcttgcaaccaaagtttttcaaatctgaaccttgacttaaatctctgtacaggttggtcattagcagaggtgacagagagaagcaaagctctatgatcagatctaagaaaatccaagtgagtaacagatggagtaatgaaggaatcagcccaataatgattagtaaaaccataatcaagtctttctttaacattggaagcttgagagtgtttattat

SEQ ID NO: 78469 - DNA, 829 bp, Cannabis sativa
actttagctgaaggtactttatttcatagcagtcttaatgttctctgtgttctttcaagcactcaaatttgttatttacttttcttctctgacaaaattttattgatacattctattgttatgttggtgtaggcctagtggtaagtacatgtttaggaggtgcttttgttggatctctatttagtgggtggcttgcagatggagttggtcgtcgaagggcattccagctctgtgcattgcctatgataattggctcagcaatgaggtcagcaacatatgcaagcaattgttcattcattttcaaatgtgaccaattatttagttcatagaaatgctatttttttctgaaagatgttagttttgtgcaaatgtattacaatggaaaaattgttgtgcaatgaataaagtgcttggcttgtacaaggtattcaatataaagttgaaagttttttagtttgaggttataagtgtatgaaagcttacttccttctagtgtaaactagaaattctgtctcaaacttacagtagcctggctctctagcacttgttgaaagatatttctatatttgtctagcactgctgtagttcttctcttggtatttggtaggaatccttcttttttccatttatttataacactgattagagttcgaaaaaagaaaaacaggaggaagagaaaactattaggaacgaatagcatgtatacaactacagagggaaaaagtgactcatgtacctgacttgtattgttttcaataatttagaatgtattttctcttaagtttttggtatcatcagagacacaacttgcagattacattatcttggt

SEQ ID NO: 78470 - DNA, 1889 bp, Cannabis sativa
acacaacaactccaaatttaaattttaaaattaagaacaacaatgaacaagaaattacataaagacccaacacttatattaattgaaaatatgaaacattaaagaaaaacacaaacaaaaataagagcataggaaaatacaatacataaataatcaccatgattcagggaaagatgtccttattcaaagtattgttataaaatggaaaagtctatttccaccaaatcccaatgaattattgttattaagggttggccaattttgcttgtgtcaccctattactgactcaaagtgacattaaaaaaacacttatccagacctttttaacctgtcgtgtaaacttttatcttctgttcttataatcgacgcctatgacaccaacacaaaacttaatgaagtaggcactcgcaaatcctttttcaagtctcccctctgcatgcccctgccaccattgttatccgtcgtagaaggagcaacaaaagtagccacgttaactttcacttccccattcctgagtggaggcgttgatgtcattcgagcaatcttagtttcattcgctattgtttctattttcttattaatatccttcaaattttggttaattttttgctttaggaaaacttcttggttcatcatcttcttgctctgatcgatctcgtgcatcttcttaaactttttactatacgttgtactcctgctaaagaaggctacacctcgggctgagtgtcatacgagttatagatgattgcacatgcatacattgcacaatgtgctcaactcgctcacttttttttatcaaacttttctttctcttcttttaagtggcttttcgagaggtgtcttagataatgtaagccaatttcacctttttttttgtcatggttatggctttctgagtcgaaaaagaaaaaaaataagacttaagttgagaaactagctagtgtgccaaaatgctcttccttaatttactttgtggtactatttattcacaaatttcatagaaaagatggtattagggtttcaatggcggaataaatattaacaatcaaatatggtaactaattcaattttttttttgttatttgtgggttttaaaattggactttttttattaatacagttgtactgaattctacatgcacaaatacgatgtctatttagctaaattaattatatggtatataatattttttttacaaaattacagtgatcaatcaaagaggaattagaggaaaaagaagaaatattgtgatttggattgcagctcgagtatagtttagattgcaattatggtttgatggtaatttagagttgcaatttagattgcgactgacaatagctcagagattgtaatatagtttgatggtgatttagattgctatttgggttgcgatatcggttgcgactttagttttgttatggagatcaattgatgcttcacgtggtggtatcaccatttaggttgcgactggggcatgactaagattgctatatggtttgatggtgatttaggattgtgatatcgattgcgacttcaatttgttttggaaatcaatagatgcttcatgtggtggtcggtctcgaacaatcacaaagggaggatgaataattaagaggaggaagaagaaggggattgagactgcgatatggtttgatcgttgtttagagttgtgatatgtgttgcaagttcaattttaattttggaaaaaaaccaagcttcaatttccttggtggagaataacagggaggaagaagaagaaagaatgacaaaaactgtaaaaaaatatatattatcgcaaaaatgaattagggtgtgtttggaagtagctgtgtaattactaggcatggtaattactagggtagtaattacacaatttagtaattacact

SEQ ID NO: 78471 - DNA, 604 bp, Cannabis sativa
tgtattgtattgtagtgattaggcaatagaggcgtagctcttagtacgatgcagtcagagcaagaagcatgtttggccgcttcagcaaaccagccgcagtttaccacagtgccctttttacagtgacagcacgaactgtcttccctattccttcctgtcccatcaaacaatacctctcaatcacacaattataattattttctatttttatataaaaaaaaataaagaagaaagaacaaaattaagacacataacggatcatcaaatcaaatcctgaggtgtgaacaaaatatatacttgacagggtttatttaattaattaatcgaaatcgaaatcgaaatccaactttgaatttgattttgtttttgttttatctttacatggcaaaatggtaaattgacgtaacaagtgcaaatggatgaggatggaatattgaaacagatgggccaaaacccaaaggataaaaggcaacctcttcccatatcctgaacccatatacgccttggaaattgttgcattttgtttcttataatagttacacctaaaaaccaaaacaactagatttagtgtgaccctaagatgaaaccatgaatgcatgccctt

SEQ ID NO: 78472 - DNA, 1949 bp, Cannabis sativa
  modified_base (1686)..(1691): a, c, t, g, unknown or other
ttttttttttttttgaagaggatacatatgtaaacacataggaaaatctaatatattatgtttctactatgtgatacataataattaaattatatagaatttctatgtttggcatattattcactaatgcatgactatgttatcaatcaactattaataaaaatttatttaaaaaaataaataaacaataatgataaactgagtaataattatgtattttttttttaattttacaacctttaaaaaaattagaaataaattaaaaaatcatgcccctcttcttcattcactccatgcgtagttttataattttgtaggatcactttaatcccattaattaattaaaacaacatttaattaattcatcttaaataaaacaatgttatttaagacattaatttttcttaaacccataaattaattaaaaaaattaatttaatttatccttaaataaaataattttatttcaaataattttcatattatttttcttttgattatttttaattaaataataaaacccattttattatttaattaaacttaagacaacttttgccttaaataattaaaagtggttttaaattaacatttgaatttcaaattcaaaaccaaaaataataactcattttaattaaaaataattaaaataaatattatcaaaaaataatataattattaaataaaataataatcaaaaaaattatattgtatatgcacatacacttatacatatatatatacactatatgttatatacacattagggtcgaccatggtcactaccgtggccggcagctttggggagccaacatggccacggtggccttggaaggccacaagtatcatcgacgcaccacgaggatcaaatgacccagacccttatgtgtcatcatctctggggacggctagggacatttgtccccttttgcatggaaaattatgctcgttgatgccgagagagagtcaagaggctcgtcgaacccgtttgagcagctgaggaactcccagacccgatcaggtttttttaccaatcgcacgaattaccaaacggacgagaatcgaatttccaatttagctccgttcggagctgtgacactaattgactagaaaccaagaggtcctgatcgatgcccagtagcttggtcgacttgatgctcggtcgactaccacaagacctaaacagtcctttcacgcgcatggtaacccacgcaaaagatcgaagttaacatcaatttacatagagaagaggcataatacgcgaggaccaatggtggtttatggtggcgcaacgttgtgcatggctagaatatatggacctgatcttgcatatgatggtggtcattagggtttgcacagccgagatttgagattaaaatttcagctccgtgttataagcattatagcgtatataatttatataaaattatttttagaaaaaaaattgggttcccagccatccacattattaggttcttaaaacagaagttgtaagaatcattttccttgagaaactttaacatgtaaatgaaaaaaactaatgacatgaccaagagttcatgattactcaagattttggttaatctaatattaatcatcattgtgatatgaattaggtctttatagcaaacgataagtttaagacggcctacatgtcagtacatgtcatatataatctctattatnnnnnncatcttcacttagatgtcatactacatcagcaattcaaattgagattgcatgcaccgaataatgggcatcagtgaactgtactaacaaccgttaattaaagatttcataactttaatatgtttttgattattttattcatggctaagtgattttaactttccgtacaattcaatgttatattattttatgatataataagtatagattaaaatataaaaaattatatattattatgtgtatggtaaataaatgtgtaa

SEQ ID NO: 78473 - DNA, 671 bp, Cannabis sativa
aactatcattttcttttcttgtaacgccaatccgaatacacaaaacatctcttaaccatggcacacaagattcttgtaaatctgaaagcaaaaaccgcaaaacacaactagtgaatgcaaactattacccggaattttactagctataaacaagggcaagcttcctccaccatgaccaatgcacaacacacgcatttgcttcttcccctcaactgcactcttaacatcataattacatgatgctatggtggccaatccaaccgataccatactcttcaaatctgaaaatagaattatgataccattcaatgttataaagaaatactttaaaccatcaatttttttaagaacaaagtggaagtaatttacatggaacagcaaggcaatgtggctgttgcatgaggaaaacagaaccaggctcagaatcacggttagcagccaatactttcacagtactttggcgagtaacaccattgaaacgaagcaccctccattgatatccaagtatattgaatttttctttgtgtttcacatctgggtttgcttcaagatacctcttttgaagccaattttctattgttggccagtaaacttcactctgaatcattttgtaaaacacattaagtacatcaaagacatatacagaaatatatagatatagagagagagag

SEQ ID NO: 78474 - DNA, 1074 bp, Cannabis sativa
ataaataagagagctatctcttcccttttattattacgaagtttgatgaataactttttggtaataagttggttttggatagatttttttctataaagaatattgattaatgtgctatgttcaatctcataaataaataaaggaaaataaaccatataaaattttggtttgaaaaaaaaaatgttgatcggtcaacccgttcattcacagacgggtacaagtcttatttgaaaaccagttgtgaatccgaaattcggttaccccgcctaatattcaatcctaccttttagtaagaaaaagtattaaaccactagattatgcttttgatcacaatattaaattatttaatatgtataaaaaatatatattttacacataactaacaacaaaataaaataaattattttctcaaaaaataaataaataaataaataaaataaactattgttgttttatgtcttcaacaacaaattaaaataaataaaataaaaataacaaattcaaagaaattaaaaaaaatgtatgtataaataaatatttagttttgttttaaattatttttctttataaataaaaatagaatatatatatttgatctactaagttttgaattatatttgtatcatatgcattatatttttaaattcttttctttacattaaatattaattgtatacataaatattttaaaatttatgtaaatatgtgtggtagatttgattagatcggctacttttacataccaataaacatccaatctgtataaatatggattttagaattttaatccagttaaatctgcacaaggatgatattattattagaataattaaatattaaaatttatataatttaatttaataattgttatattaaaagttaaattgatattgatacttataataatactcttttttattgatttctttaatagttggaatgaacattgtaatcagaattattgtatttagtttagtatgagaatataatggaataaaatttgtattgaccaaaataaccctattggttttattttaaaattatgaaatatttaaaaaaaaaaaggggtaacat

SEQ ID NO: 78475 - DNA, 3926 bp, Cannabis sativa
taaaaaatttatgtcccattaccatcacacaacgcagtcgcataccccacgcatcgatgtttgacattgttgtcgttttttctctttaatgccgtttcatgttcagtgtcgcttttcttatccacaattattatagttgttagtttgacgattattgatcaatatcaacgaaatcccagcaaatttattattaaagataagagtgaggggttagaacttagaatgtagtcgttgtcgctttggatttgtaagggacaaatgattttatctggagtagatgagattctttttattttagaatattatttgcaagaatgtatacaaatacattatttatatatatagatgtgagccgaaattaatgttaatttgtatatatgattataatatctcataaaagaaagaaaatgaaagaatatataggctggatgttgatttacaaagggtcctattcatagacaagaaccccaagctatacacgatagaatgtcaaaaaaaaaactccctaataaaaacctcaccaaattgaaggaacatgctatattcacaaaaatgtcctttcctaatgctgaatctccgcaaacatgcttcttcaatcctgtgaatttctctcgtttccaataaaataataataataagaagaagaagaaaaatcaataagaaaactcatggcctctaagtgagatatactttttgatccaaatagcaatatcatcagcacaagccatggcctgaggtgtgtggaggagcacttcaagagtggcaaaatcatgcacggcgtccttgtactcaagtactggtgcatccacgttagctctccgcagttcctctgagtaagcagtggcgcgatcacgcatcaagtcgtgctcggcgaccactgtgagcgttggggtcatgtgtttcagattcaactctctcctggaaactagggggttggctgcagggtggtcaaggttgaactctttcttgggtaaaaacagcttccaggccatagagcacatagccttgtcgtacaaataagaatttgaaaatttgatttcggacattgtgggaacatttccagtgaagaaagggtacattaggacttgtgctacaaccttaatgggatccaaaagcttcccagtcgtgacggcttttcgagctacgtagtctgctatgttcgcaccagaactcaccccaagtagtacacatctgtcataattgataacaagactgttacatatcacacaaactagagcaaaactactgctaaaactagaagcattacactaaatagggacaataaatgagtaggccaaaccaaacacctggttagtttccattcgaaaaggaatgagtttgatctaagcaagctcttaaaatcctgattctaaatcaatgctttacaatcgacaatgtttctgtgagaagtatagcatcaaaatgtttaaaaaattcaggttaaacacaaatcctgatttgcatttacacacaaagcaatgtaatttgcttaaaataaataaacaagcaaactagaaatgaagagcaaatgtcaaaaaattggtagaagattttcataactaagttcaagggatcagaagctaaaaatacaatccatacatttgtgcttttacaagtccgtacatattcataggctaaaggttatctacaatttttatgacaatcttgtgtagtagtaattcgctaatctaaggttctgagaatccaaactttaaaccatgttccacaattgattatggtggtagttcgacattatgtggataaaaatgtaaattttccaacgatttctaaaaaagaacaaatatttatctctatttctagcacattgagggtatgcttcaacatatatgagcaaacttaaaagcaaaaatcaaaggtaacaaagtatcagtattaagacattttcatgaatgagttttaggaagctatacctcgatggatcaccgtgagcagccaaccaaggctccgccatggcctccccaaagctatcaaaaattcgacgattagcacggacgtgtctcacattacgaagagaagccaagttcgcctgcttcccaagccaattcaaaaccttaatcccatcctcaaaggccgcaggaaaccgactctccggcgctagcctataacccacggccacaacaatcacatcacaaagcttagccatccgccgacaaaaggcgtcattctccggcgacgcgttgctcccactgacgaaccccccaccgtgaaattgcaacatcaccgggagtttccggcaccgagacaacgactgaggaggagaataaccaccgtaagcaacaccatcatcacagctgctgctgcgactcttatctgaagaatcagaaacccctaagacggaatcggggaggaagattcgaatagaaagagaagataagggatcgacatggatgtctttactagcgacgccgttttggaaagaagggttagcctgaacaatggggtctccgggtctggagatgattccaaatgggtcggaattggatccggatccggagccttcgagttgagaagatgataatttgtgaagtagttgcttgaggcagagcttgtaatacaagctgtagatcttgacggtgagagtgggcatggctggtttgatcgaggagatcaaaacagtttttttttttctagggtttcgaattgaattggagcggtggagaagaggaatgagaagaatgactggttcaattcaatttaggatttgggaaaagacggcgtcaggtagagacggtggtctcatcagttggagttattgggaagcttcgatccaaaaaaatgttccggtgcttcgctgtctagcggttcaactatggactttcaattggtatgagcgtgctgccacgtcacatcttactgaatgttttaccataccgtaccaactacagctgctgcgtctgtcttttgtcgttgctgacctggcattgcatctctcacgtgcaccacatgcttttgttgttactattgctaattaaaataggatttctatcattttttttaatgaaagagtatagtcatttacaataacaaagtatataaacggatggatagtctctaaccaataataagtttcatccacccttaacgtaaatttagccaagtcatgggcagccatattaactgtacgcttgacgtgaaaaatagttatattaaggaaaaacgacaaaagacaagaaacattaacaatcagatcatgaaaagtacaaattgaattgaagggagctttcaatgcattaacaactataagtacatcagtctcaatgtgtgaaaccggtagatcgtgttgtaatgtccaataattaaggctatagaaaagtgtttttgcctccatttcacgggaagaaaaattcccaattgctggcattgaaagagcagccttaacacatccatttgagtcacgaattaaagcactgtactccaagcacattgttgttgacatccacagcggcgtcgacatttaatttaaaaccatcaccaagcggcggcttccatggagctggggcagggacaacttggggagggggctgcgtttgggcttgagaagcttcaggatggtattttgtggtagcaacaagaaaattttggcagtaggtgtaggcatatgaggctaaatctcttgctggttttggtctttgtccatgcacaactttgttcctaatttcactccaaatcgaccaaagcatacaaaatatttgttccatttcagatttggaatgaattgaatgaagatgcagcaagtaatcacctcttttaattgaagaacaagcatgccagtcaaaagtaagctttgagtatgtccaaaccttcttggcatatttacaagtgaagagtgttgggttttgtaccctaaataaaacccattttcaatataatcagatttactatagttaataaagatcataaataac

SEQ ID NO: 78476 - DNA, 826 bp, Cannabis sativa
cccttttaagggggtgcattgtagaatcatcctataatatattcaattaaaaaaattcttaaatgaatgataactaagatttgaaaaaaattaaattatttaactttattatatattagtaaatgtttttttttcgtaatagcaaaaaaatttatgatttacatatcttaaaatgttcacattgaagagttagattacaactgtaatttttttaagatcaaccgagtaatgataaccgagtaacgaaatgactagaaattatttttaaagttaacaaaaagaaaaaagaaagatcatcatcaaaagttatgccaaaataaaaggtattcaaacatggcaaaatattctctaaaaaaaagcaaaatattattaaaagttataaaattagatggtgaagtcattttttaaaattaaatgctaaataaagttccaaacgtataatatatatcctaaaatttattaattagtacacctaaaaattttgtgtaacatatattccttgactcatattatttcaattatttttccttttttttttaaaaaaaaatatacacacaaattaaatatattttgataatttagagataatttcttttttgaagaaaagctcttattaaattaaaaattttataaaaaatttactaaatgggaacaggattaaaaaaaaaactaagacaaattaaaattatagaattttttttagaaaaacatagaagcagtgttaaaaaataatatcacttaattaaattttaataaatagagtgcaaatatttaatgggaagttttatttgcataccaaaattttataaagatactttattttaat

SEQ ID NO: 78477 - DNA, 836 bp, Cannabis sativa
  modified_base (34)..(50): a, c, t, g, unknown or other
agtatatttgaaattaataaacaacataaatgtnnnnnnnnnnnnnnnnnagtataaatgtttatttaaggtaatattaacccaaaatagaaaaaatcacgtatgtagattattattttgaatacatatatatttcttcattaattattatatgtaaatgtatagttttttttttttttttataaaaaattgtaattgattagtgatctctaatttaataaattagaataaaaaaataaaaaaaatgaaaaaattatggagagaatggatatttagaaattttaatatttttaattattaattaattataataaatttaaaaattatagataggtagttctatttttctttattaatgattagataagattatatatatatatattttaagtattaattataaatagataatttattttttcttaaattatttattactaagttattattattatatggagaagattttaatggttacatcaaaaatgtaactatcatggttatatttttagccattagattactattgaatggttttgattaatttagaaattaaataaaaataaataataattaacttataacctaatagtcacctaataatttatttcattataaattttaatgaagattaattatattttaaaattaattattattaattaatttttcgtaatttattattaaatatggatcttttagtaattttttttgcccttagattattaaaatttgtatagcaaaactctttttaatttaaaattatacacatataatttcataattaaaattttattatacttataactttaatttaaaattattacacttattta

SEQ ID NO: 78478 - DNA, 802 bp, Cannabis sativa
aaataaaattctaaatacaaaattacacaaaaaattcgaaattaattccatgaaaaagcatgaaaaaattggaaaaaattgtattttatgcaatgcataccatccaagcgctcacaacgggggacctgggcgagatttcacgcacagggaggctgctagcagcattcccacacgtgcaaggcccccaaaccctgcccacctggccgagaaaattcagacatcaggcttgtccaaaggcgcgtgcacatgagaaaatcgggcatccacgtgcgcatggaggtgtcacacctcctaagatttttccgattttcaaaaattcataactaattcagataaaatcgaaattaagttctgtaaaaaaaatgaattgcttattttttccattcaatccaataaaaataattccagaacgaaaatccaattattttacgtacaaaatttgcaaacatcaatcaatcaccaataaacacatagacaaagacgttggctagaattggcggcattacttatacggcgagaaatgtgagatatacactgatcataagagtctgaaatacttctttacccagaaagtcttgaacatgacacaaagacgttggctagaattggtaaaggattatgactatgagattctttatcatcttgggaaggccaacgttgtagctgacgcattgagtaggaaagggcagagccagattaatatagtaaagcaaatctccagccatttagcacatgagatgacccgagctaagattgagttcgttgtggggaagttggctaacattaccctgcaatctactct

SEQ ID NO: 78479 - DNA, 1008 bp, Cannabis sativa
ttgtaaacccacttacaaccaatgacatgttgatctgggggaagaggaaccacaatccatgtctcattcttctccaaagcttctatctcagagtccatggaattgtcccagactgggattttttttgcttgctaaaagctaacaggttcctgtatggtggaaatggcaacatcagagccttgaatttaggagaaagtttggagtagtcaagcacctggtgtagaggatatgcagtgactggcctactgtcctgagaagcaacagacaaattattagaagacaattaacagtgatagtcattcaaataagatggcttggtgatgttcctaacaggtctgctgggagaaagagatgaacctacagtgtgaattggttcagacctgtcttgatgagtggaatcagtagcagtaggagaagaagagtgagatgaggattcatgatcaataggagactgaggcaatgaaaagaagctttgatattcaagaggcaaattgctagagtcaacaaaagggaaaatagtctcatgaaaaacaacatccctagaatagaaaatacaattggtctttagatccaaaagtttataagctttcataccaataggatagcccaaaaatatgcaaggaacagccctaggtgagaacttagacctagaagtgagaagtgttgaagcataggcaagacaaccaaaagctctcaaatgatcacatgctggtttttttgatttaaggacttcaaaaggggttttaaatttgagattgggtgtaggggttcgattaattaggtaggccgcagtccctacacattcatcccaataaggaagaggtatataggattggaaaagaaaggccctagcaacattcaataagtgttgatgtttcctctccgccactgaattttgttggggcctttgaacacaagagtgataatgaactatgcctaaggaactaaacaactcagggaattgaagttccttcgcattatcaaacctaatccctttaatttgaaccc

SEQ ID NO: 78480 - DNA, 904 bp, Cannabis sativa
  modified_base (69)..(69): a, c, t, g, unknown or other
attggtactacctatatcaacaaggtgcatcttgttttctggttgcccatctcgaaagaactccacagntaagcgtgcttgacttggggcaatgtcaggataggtgacctcctgtaaagttttcccaagaagcgtgcgagtgaggacaaagcacgctgaaaatactcgtgttggtctttagggtcagtcatcagttcatgaagcagttagagtgacgtactcgtgtataagagtcattattctgtgggtgtaagggcccaatggaagcttgaagcggggacgttacaacctgctttagcctagggccggccctgctcgtgaattaaagctcgttagcgtcctaaccacataaaacttctggtgttatttctttattattcatctatttttttaactttcatatatattttattcgtttctgaaaacaacactagatgctattgtaaaaaaaaatgaagtataatgtaaaaagtagaattagaagtatcgtgcctaagaaagtggttaaacaacatgtatcagaatttgttagatgtaaagttgattgtggtaatatacttatttgatgtaccacataaaaaaaccatcaaactgtttttgtttttttcttttcgtatatatgtgtgtgtaagaagatcaaacttaaatatgagttgttccaaaaatattttagacttttatgctgtaaataaaattatgaaatattaacatagtctccatagtagtagtactatataatatatagcatttattatatatagtattaaatttcaattagaaaaatatcagatgggctaatgatatatattatgcagcgatggaaatctaaaatgacgtttagttgagaaaaataaaaacataagaatgagaatgagaataaaaatgaaatagaataaaatttaaa

SEQ ID NO: 78481 - DNA, 963 bp, Cannabis sativa
tgttctaaattagtatggataccaggcgaaataccatgagctagggtaatttggttgcatccagtggtggtcagagagctcaggttcccctcaatatccgtggccaaggtagaggtcctaggggcagggcacgtggccgggtgatgttaacccgccacaagctgcccgagctgctcaggatgcccgaaattgggacaataggtttgcagcgatgcaagccaggattaatgaacaagataatgagattcaacagttgagacagcagggtgctcttgcaattcctgctccagaaatctaggttgcacctgcccctgctgtccaggtcgaaccagtggtggcagtgaatcggatggaacccctatatgaattgtttcgcaagcaaacacaaccagttttctgggaggtcctgatgtcatgaaagtcgagcgatggctaacagtgattactagaatcttgaattttattggcgtcactgttaatgatagggtggcctgtgccactttttagtttcaagaagacgctctggtttggtgggacatggtgtccatgattcatgatgtgacaactatgacctaggaaaagttccaggaagtgttcaatgctaagtattgtaatgaatcagtcagaagtgttaagagaaaagaatgtcacccaactgactcagaaagaaaacatgagtgttatggagtatacaactcaatttgaccgtttggcaaggttggcctcgagaattgtgccaatcgacttcagtaagaaagagaagtatctggatgggttgaatgtgaagagcagacatgacttgatgatcactactgactacagaaccacctatgctgaaatggttgataaggcactgcgagttgaggacgcagtgggatgtatagttgagtctcgtgggactccgattgttggcggggctcctacccctcttgcatcaggttttagtaggggaggtagtggctc

SEQ ID NO: 78482 - DNA, 530 bp, Cannabis sativa
caatgttatgatgagatataaaagttaatcttttttgtatggtgccatagtgacatactaagcagtaaaaattgggagaataattattgtaaaattgtaaatttttattcaatcaatgatttttgatacaagcatgatggcccattttatagtgccaaactgtttcattggttattttggaatcaagaaaaagaaaaagtaaaaggtacagtatttgcaaaatcagaatgtaagtagtaaagctttccaatcttttcacccgtcctaattgtttgcttcttcaaattgtcctggatatcacagtgtttagcatgaaagaaaaaagaataaacaccagtttctgctagtgtagagacaaataacagattgggttgaaaagttggaacataaagaacattatgaagagacagatttggggaaaattgcattgtaccaaaaccttttactttggcactacaaccatgtggcaatttgacataagtgatagaactatcaacatatgtgtaatgaaataaagaaaaatcaaagta

SEQ ID NO: 78483 - DNA, 565 bp, Cannabis sativa
ctgttaaaatcgacacttcttctaaaaccaaggttgccgcacttttttggcttacacgaagagtcccaacatgtcaatgccatgaatctatccttaatttcataacccaaccaccagaaatgccttgtggctttatcaatgacattgcaaatgatcttgggtatgagaaaatttgacttactataaaccagaatggtctgcacaacactacagatccaagtttctctcttggcttgggaaagcaacttagaactccaaccctatttagccacaacaaagtgaaagtcttccactttgttattggaaagaaataagggatttcccaagaattttcccctcctaatcaagctattataacctaaaattcccttaaccaaagtcaatagtctattggaaggacaatatgagctctgaaagcacctctctaagtctattggcgaacaagttaccactttgtaaaccacattgcaatgactaatgtgtctaaagtagtttcaccttttagcaaacttcttagggataagcactagaaaggttttgataactcccttagtgaactccccta

SEQ ID NO: 78484 - DNA, 1416 bp, Cannabis sativa
tggtgtgtttatttggtgatgatatatatattatgtggttactattttcttctttcaggtaggcctatgaacaactccgtctccacgtccatgttatgacgatgatgatcatcatcattaatgttattattatttactaccaccatcacctgatcttccttctcttcacttcctgagctaactttttgtaacatcccacactgaaacatgtatatgtacatttctctttaaaaataaataaattaattaaacatatatttttttataacaaataagaattattgataccttataaacatatatatatatatatatatatatatttggcgacatgggttattgatcaccaatagaagatatttatgtatatatataaacatatataattgttttgatataactagctataatatatgtgaatcttgaattagattataagtgtgataatgttggtgagtaaagaaaggtacctgtacctgttgcctcagcttagcattatgctccagtagacttttctcctgaattgtcactcaatagattaataaaaatatgtacaagagtatatatatatactaaattacgattgcaaagttttatattcttcaaaccatgctattttctagacattattataattacaatatggcttttacataaatttgaaaaataaaataaaatttcttgaagaaaaggattaaaattaaaattttagaattgataccaactagaatatatacgtataggataagcaaatgagatatgttgtgtcaataaagccaaaaaaatgaactagacgatcagaggtaaagtatatacatatcatatgatagaaatattaaactaaaatcacatgtattggaattatttaaagtttggtttttttatttattaattttattttggcatgataaatttctaaatgttaacctgtttaattaagtactccagaactaaaaaaatgttgcacttaaatttctaattttgtttcattattaaaaaaaaagtttctaatcttataaatagtaagaattaagtccctatacatgatttttttttttttttatctatttgagttgacaaaaagatagcatggcatggtcaaggtaagacaaaaatataaaatttattgtcatatatattttgtattcaatgactattttgctatatcaggatactttaaagaattaattttcagtaaattaatgttataattagtaagcatatacctcttgcttaagtttctcaatctgctccctgtacagttgattcttgagtacaaaagagttcagaaatcagctctagtttgactttgtattttggtaaatcaaaagacaattctatcaaatatgctgcatgtatctaacaaccaaaagatgtgaaaaatatatttattttaacatatctataaattattta

SEQ ID NO: 78485 - DNA, 2579 bp, Cannabis sativa
attactaattagcctaaaaaatattatcaatccatctatccctctccctccaccccctctagttccctcattttctctcctttaccaaacatagtgttagtcaaattaatatttgcattataacccacaatctttaggttccgttacacataaccctccaattaaaaaatttggtggtcaaatcatccagaccacgtattctgtcttaacaaggtttcgttcattttgtaccgtttaataatacttgcatgtcccatttttactgttttgtgtaactagctaagaaaaattcaataatctgccttagcggccaacccaacagtgttaaaatgagttgagaaatacttgcatcccagactttacctgaattaactaagaagtaatttggcaatgcttaaaaaaatgttggtcatattgattattaactttcattattatgtttcatttttggactttggttatggatagtttaaatctccaaatgttaaattttggttgccgaggttatcattatttatttattaatttactttatcataatccagatttgctagaaaagaaaaagtgagaatttctgaaagtgaactcataagttgacctcctacaactgaatccacttgcccttgtttaacacttttcaatgtaaagttttttaccttaaaatattgcaactcgtttcttgcccctccaatcccacatagtcaaattttcgatttcttggaaagtcaaccatgattgattcacaaagaatattttgtacccctttctcttcatataaaataatcatatgcataattgctttgcagccaattatttatctttttttaagcacgaaaaagaaacaaatgtcaactttttcttgtaataaaagacacaaaacaacaaaattccaccaaaaaaattcttggcagatatttgatcattaaaagaaagaaaaaccaattaaggctgtttcttcattttgtttttggttcattgttggtgttaattttgagttttatgagatatgagaagtctcttaattgttattttctctatgttatgtcactttctgctgatttttgattactcttcttcgtatcctctttgtactaataagagtaagttctatcttttagtatagtttctttacatgttcttacttgaatttgttcattttccacttgtctgattgattttgtgcttgtttaattggaacagagtcacccttcatcacaaacaccacacttagtttctgtcaatacaaagggagtacttgttgcaattccagtgatgatatgcagataaggaatgagtttaaagccatgaaaatctctgattctggctgtgcttcccttctgaaatcagtactttgcgcggtaagaacttcatccttgtttcttgtttgatttgattgagattatttctgtcatgaattacttccattcaatttggtttaacatcaagatttataataactttattatgctttggtagaaatgtgatccattttcagcagagctatacagagttgaatcagtactaactcgaaaagttcctgttctatgcaactcaacaaggcaaaactcaactgacttttgttcaaatgtttggaacaaatgccaaaattcatctttagtgaattctctctctggatcacaagttgaaccaccacttaactctacttccaaattttttgatatgtggaaatcgaaaagcacattctgccatacatttggaggttcttctgaggctggaggagtgtgttttaatggtgagcatgtctcactaaacaacactgaagtttcaagtcccccaagtggtatgtgccttgagaaaattaacaatggatcttatctcaacatggtagctcatcccgatggatcgaatcgaatattcttgtccgatcaaccaggcaaaatctggttggcaactgtcccagaagagggatcaggagaagtattggtagttgatgaattagatcctttccttgacttaactgatgaagtgttttctgatactgagtttgggatgatgggattagctttccatccaaattttcgagacaatgggcgtttcttcgcctcattcaattgtgataaggtgaaatggccacaatgttcaggaagatgttcatgtaactcagatgtgggatgtgatccagctaagttgagctctgataatggagcagaaccgtgcagatatcacagtgtcatagcagagtttagtgctaatggtaagacagttcttgttgactttttatctttttcattgaattatattaacaatgctttggcttgtaatttaaggtagtgatgccaaaccacaagaagttaggagaatattcactatgggacttccatttacttcacatcatggtggtcagattctatttggaccacaagatggttacttatacttcatgatgggagatggtggaggtataggtgacccttacaacttctctcagaacaagaaatctttgcttggaaagattatgaggcttgacatagatagaataccaagtgagtaatgtcacttaaaatttctgtttcacacaaaacaaacacccctagccaaagtacattaccacattgata

SEQ ID NO: 78486 - DNA, 1117 bp, Cannabis sativa
  modified_base (285)..(286): a, c, t, g, unknown or other
atataatacttcttttctcctgtctcaagttaactaattaactttttaaaaagggaagttacaacataagtagaccttaaccgggtatatttgttattattttttttttgccatgtcacaagctaacttattaattttttaaacaaacaaaagttacaaccttttatcgacatttcttctctcgtctcatactcaaggccggtcttaggctaaggtgagctaggcccgcgcttaaggcccacccatcttaagaaccaaaaaaaatattttttaataatttttaannatactatttatttttataataaggacctatttttattttttcttaaaattcatttcaacttaagatcactgctcatactacgaaacatgtgacactttcatatggtactgcgactacatttttttttcttctttttacaacaacttccacttgttcatttaaaaataaataaaataaaataaagttgaaaaaagtggaggccaaattgcattagaaaaagattattgaaggtgcaaagcaagtgagagttacatgtaatattgactttgaatgtattcacaattagatggcctcaaattagagtttagaatcttttatgtacgaatacatacaaaatagtagtatcattagtctcattttgaccaaagttaatcctaacttaacatttaataattagaaactctaagctgcattttaaaaatgagcatatcaatacatttatttaatatttttttacactaaatacaatatttatttaattatcaaaactttattacaaacttaatgcattgatacacttttattttttatttcgtaaatgcattcaaaattgtcaaaaaaatataaggtatttttacaatgtacctcacttaaaggaatgaacgggtaactatttcggcatccgaaaaaatttcttagtctaattttttttcataatcgtgtgtgttatagttatttaaaatattcaacaaatttttaaaaaattaagaataatttacaatatataattcaaacttgaaatcatttatttcacacacgcataaaataaaaaactcacacgtgcaacagactcttcgaatcgtattttcaacgtgttaaatttttctaaat

SEQ ID NO: 78487 - DNA, 577 bp, Cannabis sativa
gaatttaaatttgtaatgttaaaaaaattacattttttgttatataactacttttaatataatatatattatccattttttgacattatattatccatcatcttgaaaattgattttgggttctcaaataattaaccccaaattataatgccaatcctaaaacaaaaaagagaggaaaaatttaatttcataaaatgcatataaactaactctaatttttaaattttccaaatttttacaacaatctaaattttttaatgaatcaatcaaatgtggcttttaataccacttgttaaaaattttcaacactcatacactacgccacatatcaagagctaaatcaataaataaataaattacatattaagtgtataaatatatatagatataaagaaaactcttgttgattcaaagctagagaagaataataaatcaaataatgaaagcgtacattaatcaaccgataagcatgatccctgtaaagataatcttagggtaatgatcttctaagaaaacaagatttaaggctctctaattttctctcttgacaaagaaagatgagaatagatcgcaactc

SEQ ID NO: 78488 - DNA, 626 bp, Cannabis sativa
aaaatttaaagcattccttaattccaaatttcagctaaaggatcttggccacttaagatttttccttggcctcaaaattgcccgatccaaggcaggcatatctgtctctgaacgaccctttactcttcaattactcaatgaaacaggtctccttggatcaaaggttgtttcatcaccaatggatgctaatctttctcttagtaaggatgttggtcctcctgtcaatgatgctacttcatatcgcagcctcattggaaaactattgttcttaacaatgacaagacctgacattagctatgccgtcaatagacttagtcagtatctcagtgatcctcgtcaaccgcaccttaaagcagcatatcggattgttcagtaccataaaggaactccaggtcagggacttatgtttcactcaaattagtagcaacaacttcccatcgatcgtttgcttcacctccaggcattctcggacgcagcctagggcacctgccttgatacaaggcgatcaatcactggtttttgcatattcctcggtcagtccctcatctcctggaaatccaagaagtagtccacagtctcaaaatcatcagctgaagctgagtaccggtctcctgccaacactacct

SEQ ID NO: 78489 - DNA, 613 bp, Cannabis sativa
tttattaattagtataatgaccgcgcgaagcgcggttatgttgcctagtaacaatataataaacaacataatatgagcactattaatatacaacccataataggtactaaagcaactgcatatagcaatataacattgagtgcaactttatgtattattattgttatattatttataaggctcgtttgaaatatcgtattaaatcgtattgtattgtattgtattatattaaattaaattatatattatatttttgtataatactatatcaaattttaatttatactaaaatattatatatttaggtgcccataaaagttaatatcacatataattttacataaaaatttaatacataaagtatacaatacaatacggtgtaatacagatgaataatataatacataaattaaatagattatgtgtaaacaaactaataagtgtgtatatgaaaatatatattacttgtcatcattttatgatatatgatggagttacttgttactatgtataacctccacaattatcacatatattaagtgtgtaaaaaggtgttacacatcttaatttaaaattcttagtgttataagagttatggtgtgtacatgaatga

SEQ ID NO: 78490 - DNA, 506 bp, Cannabis sativa
tcgtcaaactctcgggtacctactttatatatttataacaacttctatttatttattaagtattttcaaatatacaactactactagtattactatttactactcaaaatttgaaaattaaggtatttatcatccacaattctacatattcaaattttaagtaacctaagaaatgtagggaatctgggatatagtcaattccaaaagtttacgagggtcaatacatatttaaaaaatatatataaataaaaattatttatttatttttaaagtaattttttttttatatttttatgaaaatgcaggtagcaacttatttaatacctaaatatatatatttttttaatattttttaaaaataccatttatctttgggctcaaaaaaatttgtttgtctatgacccattttaaatcaaaaccggccccccaacccatctaaaaactactagagcaatagtaataatgttgtgatgattattgactaaattatgtattatttttaggta

SEQ ID NO: 78491 - DNA, 504 bp, Cannabis sativa
caaattaaaaagaataatcataaactatatatacttgttacgttttgaatgtaattaagaaactcacgtaagtcattagtaattaaataaatgttacgcgtgtaattatttttttttaaaaaaaaaatctcgtaaagtatatattaatctaataattttctttttctttttcttctttttctaacatatggattattattgcttaaaaaaattggaaaaatatcttctaagactcagtttgattaaagaaaagtagtagctgtatacatatgtgacgaaaaattgtgttcaatatttgattgttatttatgtatttatattaatttgatatatttatgccttcattatttaattaatgaatgaacaaaatataaagggagagtgatgttttatattaatccaacaagaatttttatggaaaaaaaaaaaaagttcaagggacaaaactttaggaggctcatacttagagagagacaaattataattctactattgaaaaataaa

SEQ ID NO: 78492 - DNA, 618 bp, Cannabis sativa
atagaggaagaataatgcaattatgttacaaatgaaggtagaaggtgattagttactattaatttagtagggatgttgatacaatctgtaatctgtgattccaaactccaactaatctggaccgaaacattagagaccgaatcaaatgaattcagtgtcaatagtttggttatccagaccatttgtaatgctctagttcagtcacagaattagaatttcagcttttaaaaccaaactaaacaactgaatacttttatatatacttcatatgctttttttcatgatatattgatatttgagaagaatctttcctaagtagaataaatattgttttaagaatacttttttattgttatttatgaattataaacttaatcagagtcgaacccaattaatctgttcctaagtggattgatttggtttttgaatttttcaaaaaccgtaaaactagtttgattcgaaaaaaaaaaaaatgaaaatccggattaaaccaatctatgaacagatgtagagtcctttcaagattctgtttgtaagtataagataatgctcagtggctactcctaatgaagaagaatatcatccactggcacaagccaaactagctaagcgcgagga

SEQ ID NO: 78493 - DNA, 1362 bp, Cannabis sativa
ttcatacagaaactttaaaaagacaaaggagttgggttacctcaataccccatccaatttaacactgaattagttaaaatcctttggttaatcaataaagtttgttgagaaaattctgattttgggttggtttttcttttgggtttttaagtttgacgagagaaagagactattataatgatttcaccttaatgtggtatctatccttaaaaattaaacaagcttagtcactacccacgtgtccttcaatcatccggcatgttcaacctcaaccttccaaagataatctacctgtaaaagactaaaacaccccttagtaataaaacttctcattactattactactcataaaatattgttgtgacattgctggccaatccatcgagttttcacagttgtcggatctaaaaatatttaaattcactaatagcatgtgtatatcatgtgtatatattcttgaatatctctgtagttaataaattacacttattttttatatttcgattaataaatctaactcattaattaccatagcaagatcataatcttacccattaatcctctaacacatataattttatattttataaaatatgcctttttaattataattataattcctaggatgttacaccctttaatgaagtcaatagtcaaatcatcccaaacttggtcgggcagcgagagaggttgtagaagaccagctagagacatggcagaatactcgtttctctggcaaacctcgcacttataacaaagttgagcataaccttcttcattccaatcaactaaacctctcatggcttgataagtgcgagtctcgcctgagtgatccccaatgggagaccaatgatattcctttagaaactaaggaatcaagtttaagggtgcagataaaacttacctgcttttatataacaacttctcatgctcaaaagagaacctctaaacacgatgtcctctctccaaattagtgagaatgcgagctaaaaaactgtcttgactgattttctttggtcacaacatcccaatcctgcaaagattttctagtaagtacagtacactccactgaaggcatccgagttagagcattcacaacccgatcacctttgtcgggtcgatattgaatctcaaaatcataccctaatagcttgatcacctaattttgcgtgtccgaagttaagactcactgttcaagaaggtactttagagtattttggtccgtcttgaccacaaatttgcttctcagcaagtagggaagagcaaagacaggagcagtagtcatcgcttcttgcaaacgacaaaaggctgttgtggcttcatcagaccaacataattgattcttcttcaattgatcggtag

SEQ ID NO: 78494 - DNA, 1176 bp, Cannabis sativa
gtgtcttgttaggataatgggtagtgacacctatactgtgtaaaaaccgtgtaggcacctaccataaaagatggatcccattgggtttaattttggattactttaattaatttaaaaattaaatatttatttaaatttaaaatttagttataaatatttaaaatagttgagatggttgagaaattctctccatgcagttgagatattccctcaagtagttgaaagattatctcatttggttattagatatttagttaaatatttaattttaaaataatatctgtaacataatcggttaggatatttatttaaatataaatatcttaattaattaaaatctaaataatagatttattggttataattaattatatttttataatcttaaatctatatataccatatatttaggaaacctaaaaatatttatcttataatattctctcctctcctataatgttcttgctcatgagactaaaagaagaacaagttatattgtgaatcctattagttgaaactaatccttgagtgttgaggtaggcttagaagattgagttttataatcatcattttcttccctgttggatacctgttggattgttggataggatgatgaaataaatagaaaaaaaatattttttctattaccattattactttctaatttaatatatggggtttctttgggatcggtacaataataatcacaattaaaatgcttccacttcatacttgatttagtatcaaaaaataaacaacaaggagaacttctcaaagaggcttgaccatatcgtcaactcattggacgtcttctttacctgaccttaccaagaccagacattacttatatcgtcaattgccttaaccaattcatgttagctccacgcactcctcatatgcaactaatattgttggaaaaacttttctatagaatcggtttattaattaatgcaaacaattatttaacgtaaataattataataattattttataacaagcaaaacaatatatatgagattaagattactcataaaaattgtaccagcaaaactaataatctcctttcatttagtattataacccttgattctttttttcccagtcttatgcaaagatcaaggtaccaagtataataatgcgttattccttaataacaagattacatacttactctg

SEQ ID NO: 78495 - DNA, 1034 bp, Cannabis sativa
tgtccctaattgtttaaggtagatctctaatatgatcaataggtaagagaaaaatttcatattcggtatttatggcttctgcaaacgattttcgagatttgacaaataagtgtttcaaatcatgatattattatatgaattgttttacaatctttattcacattacatattttttttcataaaattgtgtggcaatatagttttattgttattggtggagggcctacagttataaagactttgctaataagtttttaaatataatttatttgagagttgtcatctttctactattgagattttcttttattagtttttaatatcatcgttaggggttaatctacttttctttatcttttttgttttgtaaatgagttggcatttagtttttgatgttacaagttgaagttctagctattttggtgtgccatttgaggacgttataactttattgtctaaatttttgggggcagtttgtctcatgttgctcgcttactttagcagttcatggtttgacaagcatgtccttcggttagacgatgagctatcctagttagaggaggttcctgtgtggtttgcgaatatctgcatcataaattcatgagtgattctaatcactacgtaaaaaaaagacattcttccaaaaaaaaaaaggaggtaatttatttgttattattacggggccttataaagtctctctctccctaattcgatgtgtgtgaaagtcaaatgtaacaaatataatatttatatggcttatttgtactgcaggtccctaaattatacatgttttggcaagttggtcctcaaactttattttttggcaaattagtcttaaaactaaataagttttggcaagttggtccccaaactttatattttggtaaattaatcccaaaactttttatttctttagcaatagtttccacttagatattgatatttttattatttattttacttactttaatttatgtttttgtgttaaattcaaataatttttttttttaattttaatactttaagaaaaataa

SEQ ID NO: 78496 - DNA, 798 bp, Cannabis sativa
gccttaccagaggcctgatatgggtcatgccgtgaatgtgctttcatctcttgttgagctctggaaaccatcagagcaagaagaattcgacgatggatttggcatcaactacgatatgccattaccacaagtgctcaagaaatggcaagcgttcgaggaaaacagcaccaacgactactcatcttcgtcgcttttctccagtggtgacaacacacagaccagcatacctaacaggccacccgggtttgcagattccttcgcatcacaagatgcacggtgaaagctttaggaagaaagaaacgattcgatcttcgaaaatcttcaaagttagcttctttttctttctttgtgttttgtgttgttgttgttgttaactttggccttacttgtctattcattttgcaaggcttgtgcttgtttttctattattattacttagttgaagtaaatttagttgtgagtttttttctggtaatttagaagtggtgaagttagaaaaagacattgatgagtaaaaacaaagatgtgtcttttcaactcttaatccttgtggagcttggataaggattaagtcaagtcttctgtgtgtatctattttcccaagcttttggaacaaaatctatctttttgcaacagcttcttaaaataatcatagcaacaacactggacttgtggagtgtaatgaactattatatggcccaaatattttccaaatattatcaattttttttttggtcgaaaataagtgttttataaagatagattctatttggttaagcttctagatttatttttata

SEQ ID NO: 78497 - DNA, 3232 bp, Cannabis sativa
aattaatatatggtcattatatttacacctaaataaaataaattcttcttttttaaaaaaaaaattaatgaatatttatttttagttttatactaagatttcatatattttcttcttttaattttattatctaaataagtcttacacaattttacactaaaaagtactactaaagttaaactatatatatatatattttttttttgaaagcaaagttaaactatatatgaaacaacataatcgttaatagtttccttgatttgaaaccattaatttgttaagaaatttaatcagagatcatcaagttctaatgtattaattaataatggatgcaggcagaagtgatatttctggggcaactgaggcacgtaaatttagtgaagctaattggatattgctgtgaagatgaagaaaggttactggtttatgaattcatgccccgtggaagcttagagaatcacttgttcaaaagtcagtttacattttttccctctttctacttatttctaatataaactttcaatatctataaattagaatgagctagtattcagttttcttatatctcaagttgatatattaagtgaattttcatgtagtaataatatggtttatatatgcctatatggtagtggccacaatattatttttggtaattgctatggtataggctgtaattcaccaacatagtgggattagttgatgaagccccaagacatggtaaacaatacagataaagaaaatgttatatcattgtatatttcctaatcaaaatcaatactagtatagatatagatatcatatatgcgtctgtggggttacaaacactattaaaaaaatatattttcttttgttaatacgttgtgatttcaggactgtcagtgtcattaccatggggaacaaggttaagaattgcaattggagcagccaaaggtcttgctttcttgcatggagctgaaaaccctgtcatatatcgagatttcaaaacttcaaatgtcttactagactctgtaatatgcgcgtatatatttcttttcctgttattaaattttgaaactctacctttttacataatttgagtttgattgtgatgttgctggtaaactcttgttaacaggatttcacagcaaaattatcagattttggacttgcaaagatgggacctgaaggatcagaaacacatgtcacaacaagggtcatgggtacctatggatatgctgcacccgaatacgtctcaacaggtaacactgctatagaatctggcatgtacttgaatggaattttaagttgattgaggattgaaaatcaaaatattgtttggacaagattttcacttctagaaatttaattaagaatatcatcacgcaagattgtattttgaggatgcatctaatgagtctgattgtattgtgcataataacaaacttcatatatcagtgaaaaactagtgattttggttgagatatttgatggaagaaagatgttagaacaagtgatcagtgataatcaatttataagataccgaaaattcacaacaaaaattgtaatattggatgaatttacaggacacttgactaccaaaagtgacatatatagctttggagtggtgctgctagagctgctaacaggtcgtagagcaatggaaaaatcaaggccaaaaggtgagcaaaaccttgtggattgggtaaaaccatacttgactagttcaaggaggctgcggtatgttatagacccaagacttcaaggccaatattctgtgaaaggagcgaaggaaatggccttattgggattgcattgcattagtttgaacccaaaagacaggcctaagatgccaatcattattgaaactcttgaaagtcttcaacatctcaaggacatggccgtcacttgtggtcattggccggttgcggtgtcgtcctccaagtccgccagaactggaggctccacaaaagttaagatggagtttagaggtgggaatttcaggaaatcttctccaattttcaatccaacacagaaaacatgagcagaaaagaaagctctctcttgttcagtcttgacccagtcaaaactatttcaattgtaagtagcatagtaagtattttggaagtgacatgtttgaggcagccggtggcttataatatcttttttaagttaccaatgtatattgtatatatgcccgtacttacatacatgaaacctctatttttgtgtttaaaataaaatgttataatgcaaattattggatgcttgaagtacactcatctaaaattttgctctaaaattaatgcacaagggctattgtgatctcaagtgatgacctcgaaagaagtgtttcaattattaaatcattttgcaaatggtgatacattcttaaagcaaatttaaatctcatgtaccttacattatagtacttaatttcatgcatgcatttaatagcacaagtgcatttaatttcatgcatgcatgcaaggtttacctttgttcaaacaaaaaaaaaaaattacaatgcttcaaaaattaaaggcaataaatttggagatacaatttcaaaataaaactatagctaattagaatttttgtccatgaatttttacttgtactaaatcatgcctcttgaacttttaaagcggttaaaaattccttctgaatcattgaaattgttaaatttaagaacttttgtggcaaccagtttgggtagatatcaaaattggagaagtataatttagtacatggataattaacgaattaataaaattggacaaaaattcttaaatttaatgaaattaaaatgaatattatatatttatttataactcaaattatgttactgcattagtaacattctcctctacactttccaaacaatgaatatcccgatttcatatgtataccacctagcttatattggttaataactattctatcaaaacaagagttaatattatataagtgttgttaacccaaaaactctctctatctcaagactcaagaccataaatcagctaaggaaataccaaactcttcctcaaaatgagtggtatcaaagtcaaagtactcttcttcagtgctgaaatgagtggtatcaaagtcaaagtacccttcttcagtgctgaaaggagtgctatcaatactagtaaacacttcatcagtactgaaagaattgctgtcaatactaacaatatcttcttcttttcctttttccacagaccccaatattctctgattaatttgg

SEQ ID NO: 78498 - DNA, 1277 bp, Cannabis sativa
  modified_base (1203)..(1220): a, c, t, g, unknown or other
atttttacattaatatacttgataaggaaactaattacaattttaacgttacttaaataattattgtgacacgtaagcaaataataacgtcctcccactatgaatgcccaaacattattaactaaaacaatggttgcacaccatcactttccaacaaaagatagctttattactaatttcaaaattcttattctaaatattaaaatttcatccactaaaatccataatacctaagaggctaaaaagaaacttaattagcagcaacttcgtctcaaatataacctaaaaatgaggcatcccaatactataaagtctttaaaaaataaatacacataatagataccaatgaattactttttcatgattagatcaactttaataatttcataaacattttggtcacctctttcgattagttactttaaaattatgtatttatttttagattatattatattattttgttatttaagaaaccttttctttatttttttaacaatatttttgttaccttcaaacttatttaagaaattaatacattaaaataaagtaaaataactcacataacttactagtggaatttgtaaatatctaaagtactcattgttattttaaaagttatattattgttctttaatattatatgatgcatttttagcaaactaattagctgtcctataatgtaatccaattaattaaattttaaaaataaacttgttaacttaaataaaatgtatatagattagtaactaattagtatataattagtaccataagcaatttaatatttatttatttatttattttgaaacagcaaaaaaaatatatactttatatattttgaaatgatcacatgaaaaaatagattataatggttttttttttaagctcaaccaaatagcaatgtgatagaaaataatttttgaagtttgagagaagagggagactgaaatatgttgaacgaggaacgaaaaagaaaatggcaagttaatcaaagaaggaaaaaggaaaaaaaaataggtgcagaatattttttggtgggcctatttcaatggctcgttcccttgaaacgttattaaaatagcaaaagtataaacaaacggtattatttagcaattagaagatgaacgttatttttgtaatttagaataaaaataaggtgttaaatgtaaaaatctcttaattaaaaccaattaactgagnnnnnnnnnnnnnnnnnnctcaactagtgtggggaccataggtctatataatcaagcttctaataagtagatcta

SEQ ID NO: 78499 - DNA, 1119 bp, Cannabis sativa
gatggcttgtgtttcctggtccttaacaaaacacttgtcagcatgaaactcaaaaaagacatgattatcatgaggaaatttagagacgctgagtaagtttttggttttttcaggaacatgcaatagattatttagcacaaggggatgagagttattagcatgaatgaaagattggctaatgtttttaatagacagacctgatccatctccaacatgaagttgatccgtgccttcatactcggtgctgatattgagattttgaagattaggagtgcaatgattggaagcaccagagtcgggataccagttgctatcatcaacaggattggtgtgagctacattagcttgagcagtgggagagtttgatgtgggaaaaactcctgtaaagcttttatcaaagcgataaaagtagtcaagaacagtgtgtccaagcttgtgccaaagctggcactgtactcgacttgaagaagtgggaaacctgcctcctctactgaaaccagataaaccagtagaaccacgattgttaccatagtttggagtaggacagggattagtgaaatcacctccactgttattgttgctaactcgattcttgaatcctcgtccattgatccttgctgaaccagaataggatgagggtgggaatttgccttgattgggaaatctactgccacgattaggatagttttgataggcaatattagcttcagataactaatcaaagtcagtagtagcaacattaacactcagatcagtttcttgatctagatcagtcttttcgattcgagactcggaggcaagaaggagagcctcaatttcagcaacagaataatcttcaatcctggtattggttgatatgatgaaggtatcgtattcaggcagtagtcctttaaagatagcagctatgtgatctctcgaacttagaacctctccaaccgaagcaagaagatcaacatgctatttgactttcaataagtaatcatttagagacaatgatcctttccttaatttatgcagttttgttctaaactccaggatctttgaggagacttgtaaagtgaagtgtttctcaagcgcactccaaatttgtctcgctgtgttgcatccgaccatgcgtgt

SEQ ID NO: 78500 - DNA, 835 bp, Cannabis sativa
  modified_base (806)..(809): a, c, t, g, unknown or other
aagccaccattcatgggagaatttcgagttttaattccttgcgtttgaactttgcaaagtaaatcttggagaaactttttttgggacggaaggatgccattttcactgtgtataggatggtttctcaaaaaataatccaaagagccaagatcttttagttcaaaagtgctatacacaaagttgtaacgagagaggacactgcaacatcattgctatcagtaactaaggtgtcatcaacatagataagaacatgtaaacatgatgttaaagtgacttttataaagagtgaatgatctatcttagctgagacaaagttaagctaagttaggacagtggatataatttttcaaaccacgcccttgggacttgtttaagaccacagagtgctttgcttatcttgcatactttgtctggacttgattcatcactaaagccaggtggtttcatcatatatatatatcgtcttgaagataaccatttaagaaacaagtatgagagatcaaggaagcaacctgaagctacattcaagagtttcatctattattcttcttctttcttctttatttctcactattattcagattataaataatattttgagatgataaaccacactatgcgtggctagttttcttagttgttagggttagatggatctctaattatgactttaattttaagatttaatgaaaattttagtttagttcaatatttttcatgtgattctacttttttttaattgttcccatgattatgtgttatatatttttctactttatatgattattgtaaagcccgcttagttnnnntggaaattagcagttgtttatgttaa

SEQ ID NO: 78501 - DNA, 650 bp, Cannabis sativa
atgaacatacggttcaatgtctgtccataacaagagatttttcattattaaacagcattgaaaacatgataagaaaagaaaaatgtagattatcaccgtcgatcaagtacctcaggataattgtcaccgtcgatcttttgaaggcgctggattagatccctcgccgctttgttgaagtttttgagcccctaaacaagaatgtagcattttttcagagtaagaattgatcaaagtattaaaatgtaattatttgacaaaaatttgtattagcaaaataatctcttatggtctataaattaaactgtgtagccataaacggccattatggtcgcaaaacgaccatagatttacattgtgcaaccatcatggttgcatagagtaaactaagtgagattattttgtaaattttaatatttcaaatagttagtttaaaaaatttctcctgtaaaaaatgggactttcatcaaacgtcattaaacttctggcaaataattagcaattttactcccgaaacttttatatgccccttttcaataacgatcatagtttgggggtaaaattaccataatttaacggatgacttatttcactaacgatcatagttcaaaaggaatatttagacatgattttttttggccaaagttacccta

SEQ ID NO: 78502 - DNA, 1538 bp, Cannabis sativa
cttcttggggatgagcacaatgaaagttttattaacctcagaacaaaattttccattgatgaaaaattcttttacaaaatccaccacctggttcccaacgatgtcccaatattgcttgaagaactttaccgggaagccatcagggccaggtgatttcagaggaggcagagcccacactatctttttgatttcctcctccgaaggacagctacacaatcgaaaattctcctcccgagtgatagaagccgtgattaagtcagagagatcattatccacgttatccccactagaagtgaacaaagcttggaagttagaccgaaaatagtgtgcaatactagctctatcctcaatcaaagagctatccgcctgtctgattgcccaaatatgatttcttttacgtctcaccacaattgaagcatgaaaaaaacgagagttcttatccccctcatgaagccaattttctctcgatttttgtctccaaatcgactctaaacgatcctccacttcatcaagttcaagcattatcgacccttccagctctaaattatcctttgaaggagggcgattttgcacctcaatcaaaagcttttcaagcgccttaatcttcgattgacagaagccaaaaaccagtcgattccattcaccaagagctttagcagtgatccttaatttctgacaaaggataaagctttgaaatccctccaccccaagcttccaagaatcctcaattacttttctgcaagagctatctctactccaagcatccaagtaacgaaaaggagtagagaagaattctctttccatacgggtatctagaataaccggggcatgatcagaatgacggatagagagatttcgaactccagctttcttgaaatgtgttaaccactccgaagagacaataactcgatccaacttctccttgattatatggtcctcatcctgtccattagtccacgtaaagaaagcccccactccagccaagtcaattgcaccatggttaaacaagaaatttcttaggccctctccttccgcctgggtgaccggtcttccccccactttttcgatagaagaaagcaccgaatttaaatcccccatcactatccacgggtccacctgggcatcaaaaaaattacccaaatcattccagaactcagcgcgatcctctcgtcttgggggggcatacgtgaaacaacctatccagtccaaagagactctgtctccactgaatctagcaacaattttactgatatccatagtcataatctgaatattccacccttgtctccaaaacagagcaagcccaccagaggcccctactgaggacactgccactccattattaaatcccagactttgccaaataccctccatctccaatgcatttttcttagtttccatgagaaaaataacatcgggattggcactccgaataagacttcggagagcgtttactgccgcaggtttgccaagcccacgacagttccaagcaacaactaacatggggatttggcgggcatgtaaaggcccgcctcctc

SEQ ID NO: 78503 - DNA, 820 bp, Cannabis sativa
tttttcccctatggcccactttgtttcagggccggccctgcctataattatataaatatttaaaagttcggtgcattcaatattttctttttaaaaaaagtatcttttttagataaaaagcagtccctcaaatacttgagaaattcatgagagttcaaaaaattttagtcccaaaaattgagttcgtaaaattaagtataatcaaatgtataatttaagtaattttgttatcattatctcttagttgttcatatattaaagcacatagggttcttttggtacgcctattcaattgtattgtattgtatactattatattaaattgtattttatgtaatatttttacgtaaaactatgtagaaataatttttaggggctttttcattttcacactttaaaacaatattttttgcatttttacggaattatacatagaaattcctattacaactagcgctgcaacctaaattgcaacaaaaaattgtacaaaaatccctattgcaactagcgctgtaaccactttagaaacccaaatcgtaataaaaaaaattaaaaaaaaaatagtatatagattaattctcctaatttttataaatacataaatatataatatcttagtataaattaaaatttaatatagtattatataaaagtatgatatacaatttaatttaagtatgatgttccaaaggagcctataatattacaaataatgcattagaaaatttggaatgacaagattttaaatattatgagttgcagctagaactttcattgcttattaatagaagttacatttcaaataaaataaaataaataa

SEQ ID NO: 78504 - DNA, 1296 bp, Cannabis sativa
ataagacttaatattctttcaaaaaaaaaaatcataaattaatgtacagaatatatatgaattaattatatccatacagttattaacatcaatatagtagttttgtttctaattgttagagctaaaccatattatttacttttcttacagtcatgtaaattactgagaaaaatatagatattgcgtgtaatgaaacatatatatatatatatatatatatacatataattaatgataataaaaatttaataagaaattaacctgattaattttattgccgaaaagtcttgctaatcttctggaattaaagcatttgacttggtcagctaaacttcgttcgaagatgtcagacaaggtatccaatagatctccatatgttatgttaggatttttcttaagtatatctattaacacgtatgttgtggcaccattcattgtcttcccagtgaaagcctgcaaattatatattaattaaatctaaattttcttaattattaattattaccacgtactagtacaaaacagctacacaaactatgaattaattaatctttgtttttttttcaatgagatagaattaacttccctaaccataacacatttggaggtgtgaaataattacgtgtgtgttttttcctcatcacgctatattaatttttttaaaaatgctatgggcacctaatgtgctaaataccacaaaaattaaaatattattactattaatgtaaatttatatcaggtaatataaaataggagaattccttatatatattttttatttttatttttaaatttacggtttgagttttttcggtagttatcatgtgagttgtcatacgaattttagttgcgatttagattgatcagttaattgctattagactttctgtgtgaaatttcgtaaaataaaaataaaaaactgttttaaaatataaaaataaaaaattttcaataaaaaaaaaaagctaatgacaccataaaatgacaaatagcaatgcttataactcttttagactgaaagacgcattaatttgatagtactaattcaaggaaattatttaaaaaaccataaaaaaaaattcgaagagcatcatctatttaattattctaaaacctattatattcatatactaaaaactttatgaggaacccgatactctccttctctttagttaaaatcttaattaatttctttcaaaaaaaatcttaattaattaaacagctgatattaaatgaatataattattaattagatagaatcccttacagtagtatcagcagccaattgatgatctt

SEQ ID NO: 78505 - DNA, 978 bp, Cannabis sativa
aaagtaatacatttacctctatcaaatgtggacttgggtttgtcttcttacttgatttggtttaaaggtacgaaaggacccccatcaattcctccaccttcatcttgctaaaatattttgcttctttcatagccaacaacttagcgtcgaatttgttaggaaggcctctcacaatttttctatctatcactgattctttaagtttttcaaccaagagaaaaaaaattgttagcaatatcaaataatctttcataaacttagacaaagatttattgtcagacattctaatatcatcaaacctagtttgaagcattataaatttagattgcttaacaacagttgttccttcaaactgagtttgaagaatttgccaagcatctttagcagattcacaagaagatataaacttaatataaccttcacctactccattaaatatagcatgtaaaactttactattgtaagcagataacttatcatcttcagtagatcattcaagtttagattttaacttagaaatcttcgaaatctaccacaataagatgagaccatcctgaaaaaattattctctatgctttctcatcttgagacttgataaatggtcttattctgaccttccaataaggatagttagaatcattgaggaatggtgaacgaacaatagaacttccatatgcatagggaatcatattgcaaaaatacaagaaaatgttaaaggatcacactaagagtttagtatcccgctctgataccaattgaaaaaatgtatttttacaaatgccaataattttactaagtttcaataaaaacaaaactgtaacagtttgcaataacatattacaattctgtctttgcaggatacaaatttgcaaaatcaaaccagtaccagaaataaataaatgtagaatttaaaataacttaacacaagagaattatacgtggtatcagtgttcgttcaaacactcctagtccacgggg

SEQ ID NO: 78506 - DNA, 547 bp, Cannabis sativa
ctcgagccaaccttctcgagcctagctccatccggccggggtaaagacgacggcccagcactttcaagagccaccaccggagaaaccgagtccacacccaccgaaggcttcaacaccgcactagagaaaacatcgtgatatcttgacgcggtcgacaaccacgggccatacatgggaaaaggaatatcatcaagattagccacggtgaccggagttgacagagaacaacccttcctttggtggcccaaccgaccacagaaataacagaagataccaatcttctcatatttgaattgaatccacctttttactccagaagccaagtcgaaaaagcatcccgacaccagaggattttcaatattgaagtcaacttggaccctgagaaataggttccaagacgccggattatcttcttctaactccaccaagcagactttaccaatggtagcgccaagtagcgttccattagccacggagaaatattcttgaggaagattatgaatctatacccataatcttaaacactccaccagacttggtccttcaa

SEQ ID NO: 78507 - DNA, 928 bp, Cannabis sativa
tttcttaaaaaaaataatttaaatgatataaaaaaaataaaaagttacttttgattccaagtattttattttgtaacagtgaaaaaaatatatatttaccacatattaaaataatcacttaaaaataagttcaatagttactaatcttgagtcaaaacagttaatgataaagttaaaaattttcaattaaaattataaagtcatctccaatgcaggcaacgtgtagcgctatctatctaacccactaactactttttatacaatttaaaaataatttatttaatatttaaaagataataataataataaaaaaagacagcattgttgttgcttggccacaatacccatatttttgttgaaaaatgttgaaaagtaatattttatatgttgtgtaaaaaaaatagcattggagatgcactaataaataataaagaaaagaaaaacaaacaaaaagttaccatgcaaatgcaataaagaaagagaaggggaaaaaatgatcataagcacggacttaagaaaatgacaaaaaaaagagatatattaatttttattacggtatgagattgattaaaatagttgagaagaattacatattttttttttacaatttacgtatattattgaaaaactcccaaaaataatttatgataacaaataatcattaaaaaataaaaacaaaagataattatggtagctccagtcaaaatttgtgtattataatcatatattttacttttattaatataattagataattattaaaaaaaattatatttttttttggtaaatcagtcatgaagtgaattgctaaaaacaatttgtacaatctaagagcacctgatatagcaaggcctcaaatctatttacagtatatattaattgctagagcatctgagtattcaactacttgctattagttacaaagcat

SEQ ID NO: 78508 - DNA, 758 bp, Cannabis sativa
ttttgttggcaatgccatttacttcttcttcttcttctctcttccagacagcaggccatgaaaggtacaccattgggatcgttttggggctagttttctggatggaagacccgaggttggctaaagcgtctacatgactattattttccctagacacttgattgactctgaactcgtcaaaggtcgactgtaattcttttgttttctcaaggtaagctgtcattttgctatctcgggcctgatagctaccttgcatttggttgactataggttgtgaatcgctaaagacgttgattcttctggctcccatttccttggctagtccgagtccagtaatcatagcctcgtactctgcctcattgtttgtagctttgaacccaatttgattgcttggtcgatcttctcgccttgggtgaggtcagaataagtcctaatctgcttcctcttacattgcttgaaccatctacctgtaattcccatgtgccatttgtctgtccctctataaggtggaaaagttctttttccgcctgcacttgagagttaggtgtaaagtctgcaatgaaattagctaatacttgagattttaaggcagtttatggcttgtaggagatgtcgtattcgctgagctccactacccacttggccagtctgccaaacaactctggtttatgtagtatggttttgaggggaaaggtaatgagtactgtgattgggtggcattagaagtatggacgtaattttttggctgcgtgaatgag

SEQ ID NO: 78509 - DNA, 502 bp, Cannabis sativa
tctcctaaagagaaaacaaaaatggaactagagtttggcttctttgacttctttaacgttatgttatcatatggccatttttcccctgttgttttgtctcattctccatactaatgagctttgatgccaattctcgagaataaagattgaaaacagttcacgatatcctattttacatttttgtagtgttgaggaaacaaagaagaataaatttggaaataactgattaagaaaagaactaagcacataatagcaatattattatgtaaacaatcaaaaaatggaaagtgtaataacttcatcccccctcaatatttagtcgcatggcaactttttctcccttgagttgacgcacaaaagataaattgtcttggttagggacttgcatgcgtttctttgtttctatgattttgtcatcaagcaaattataattttcttatttacttatttgtatgattttaagtcattaaatgtacaatgtttttaacttttaattattaat

SEQ ID NO: 78510 - DNA, 906 bp, Cannabis sativa
acatatatatgtgtggactgtggacgtgtataattgatattttttccttttctttagacaaaactttctctccgaattcctacaatgcttaatagctaatacactatgtatgtatatatatatatatatatatatatactaaattaatattatataacactaccaaataaaaattatttttcgtgaaaattttttagtcacgtaattttttgtgactaaatataacttttagttaaaataaaaaattacttataactaaaacatattatttagatacaaattataactgatttaattttagtcacaagttttgatataattataataatttttttttagtgtgtaatgcgtatgtttagtttttagtttttattttaattatgtatatttttagttgcataactagttttttttaagattatttaacaaacaacatattcttttattaaaaaatatttaatttaaatactatttataaaaatatataataatatatttattgttaattatgattttagttttaacagtaatacttataattttataatacttttaatttttttaaaaatatcatatacttttttttaattatttttaaataataatataaaaatatttttttaatataatagtgtcatgaatacttttttttttttatttattgttgaacaatataataatagaaatatattttcttagatatatgtatagattgggttaaaaaatgataatagaaagatattttttaagtatgtgaaatgagtttaaatttaaattgcaatgttaaaaaaaaataatttatactacatgatcacatttaatataagataaaggctaattgagatttttgctccctaaactttaacatatactaaatcatgccctctgaacttttctggctgttaa

SEQ ID NO: 78511 - DNA, 1133 bp, Cannabis sativa
tatatatatagacacgattttgtcatgttagtgtactttaaggggatgtattccgtgatgtacggcaggcgttagatggggtagttatttgatctaatagctgagattgatctaggggtaattaaagttaaaaaagggtaacgtaccctgtaacccattacgacgtatcttggaacccataaataaattcacacacattattacgtaaattgggacccacttgctgtacaatgaaatgcattccgtgttttgcatttttgggcacaaaatcgattccctatatatattaatatctagaacaagctaggggttattaaagacctcttaggtatgtcctttaaagtgacatcgatagattctgcaggtagaaggattttggctagaaaatttcggctttgacatataaaagttgtgtggtttcaagtggttttaaaaagatgtaaagggtttggttgcttttggaaagttattaaaaggtctatttggttttttttttttgaaatatatatatattcacaaataatactcatggtttactttgattaccatttttgcaacttaattaaatttcaattatcatatagtaataatttttatagagggtggttaactaattgcgccaccactacgtttagcaccaatggctagtagcaattctcatattaattgcatgtagatcgaatcaagatcttcggttaaaaaattgtgtttcataatgtattaaatcaatctcattgtgatacatcaattaatttaagcattttaaagaacaaaaatatgattaattttttaataaatgaaaaattaattgacgtgtcaaacttagattggtttaacaattttttaacagggatagtagtttatcaacgtagcaaaatgtatcttattttttttttttttttgagaaaaagcatttatatcatgaattcaaattagttagacctctcggtcattacaaaaaatattgtcaggcaaacgcccatctagccacattatgagcggcaaaatgcatatcttagatttttattaattaattattattatcatcatgaaagaaaagggtatgcaaattaaattgtactaatgtgaatgagactgaacaacaggggtgaaaattattaatttgaccacca

SEQ ID NO: 78512 - DNA, 569 bp, Cannabis sativa
ataataataataatagtttcaatccgatgacttgtctggaattttagaggtagagtggagaatgctctatttgttttttattgtattaatactttgaaaatatatggaggaggtcgagaatagtgctgtaaatacatgttaaattttttaatacaacatgaaatcggtacagatttagaagatataagcatgacaaacataaaaaaatataagtttaagcacgacacgacacgatactataaattgacacaatacgacataaaaaatagttccttaaacacgacaagatacaaaaaacacgaaaggcacgacacgtaagcacaaataaagtagcccaaaatgcacgacatgcaacaagaccgaaaagcatgaaacgaaatatgaaaaatcttataataataataataataataataataaaatatacatttttttttgaagcgaaaatcttatataaaagagcaaacattacactggattcggctcatcaaacatgactgcttgacgagcacaaggaggtataaccccaatccatatggcactatctttgtgaaccaaagtataattgg

SEQ ID NO: 78513 - DNA, 1241 bp, Cannabis sativa
  modified_base (27)..(48): a, c, t, g, unknown or other
gcacttagtgcggattggatgttgttnnnnnnnnnnnnnnnnnnnnnnatcggatgaacacccctagtttaatcaaatattacatcacaaaatgggctataatgacgatattatatattgctacacagttctagttaattcaaagttgttgatcaactatttatatgcacacattcagtgaacgactcaaaatttttaatttgtagggacttatttatcatttaaaaatatttatacctatattataatcattcttactaaatttatttaattttatgaggactttttctacgattttgatctataattatcaaatttaaaaaattacatttaattttttaaaagaatatttttattagtggaggctataatcccacattaatacaactgctggttccgtccctgcacacatacatgtagtgcatattatattttttaacaaaaaaatttaccaaaaaaaaaaaaatactttatattaatatttatagtactttttttcttctttactcttttaactttagcatccatatttttcattcacatcaataccgataatggtacgaagacactcattttttaatgtttttgtatataaaaaaaatgataatcaagccaccatcggactataatcggaccatattctacatttatatatatgttaaactctatttattaaattcgtcgggaagacatcggaccgccatcagataccattagtatcgggccagtactatcagaccaccatcagactatatcttatatttataggtagcctctgaccactatcagaccaccatcagacatttgtctttaacctttactcattttaacaacaggatatcattaggccaccatcggaccaccattgagtcttgcaagaaaacctacccaaaactcaaatccggtcattttcgaccctaaatttaacatcaacccatataaacagacattaatcatataatttattcctaaatcaataaacctataaataaaatcatacatttcaaccctaaatcacacgaaatacaatacaatgaaatggaaaacttacattcatggcgcgcggtggttgcggttcagagacttgggtcttgggttggtagtcatcagtggattagtggtcttcggttggaggcgtggtgcttggcaaccgtggcttgctatagggtcatcgtgagagagagagagagagagagagagagagagagagagagagagagagagagagagagagagagaga

SEQ ID NO: 78514 - DNA, 971 bp, Cannabis sativa
tcgttttgagtaatccaacattctggaaagatatctttgtcttatcctagtttgcatatggcttttttgctcctatgtgtttagtttgcattaattcattcattcttatgtcttcttttctctacattcttgtatgtaatgtattagtcgtatcagaattatatacgaaaaatcagatatatatatatctcattagtattagtgcttaaatgtttattgtgtattgtgatatgtgatcctagtagtgccaacaatgtgatactatatactatacctaaacttgtaataaaaacatgagttaccaattggagcagatataaattgatgtgtgcattgacattagattttcagaaaatcctcgaagcttttcagttcccaaagaaattcatttcatgttgttgggagacacttccttgatttggttctatctgatcatccgattgttttggtgaatgagggtgtaatctctgttttgatagtgggttatttgactaaggccattgttcccttcccttggatatatgatattatgatcaactaaattggttgaatctcaagcaaagtaaactggtattctagtactgtttttgttttcttttctgtataacttcaaaagtttttctgctatcttctgcctgtgtttattgcagggtttaactcccaacaacatgcaatgaatttctttgggaattgaaaagctttgaggattttctgaaaatgcaatttgctattgattgattgaatacttagagagtataaatactccacagagctcaagtgagcttaacaacgatcataacaataatgtaactcacttctaactagtaacaaaagaaatacttgtctcaacattcttggcatgcttatatttgtatgaagtttagacttgatgggaataagaatgtaaaatttaaattaaattttaataataaggaatttatgtttccaagtaggttcactttttaaattaa

SEQ ID NO: 78515 - DNA, 511 bp, Cannabis sativa
gcatgctcatatgatatgcaattcgtgttgataaccaaaccatataagattcgactaaataaatttagtgtcaatggtttggtttggtcaattcagattgtttataactctttagttcgattatgatttttaaaattcttgtttatggttcaaaccaaaccaaactaaacgcataatacttaatataatttttttattgaatattgatatttaacaacaattaggcctaatattgataattattttaacattattggtttggtttggtttgaattgatttaaacatttaattgatatatttcgattttgaatttcaaaaaactaatattaatggtttagctcaaaaaataaataaaaatttagattaaaccaaactataaacactcctaaatcacttcaagaaggggaaattgataattttttaataatatttttgaagataatattttttacatggtgctagcaccatgatgaagtgttgcccgtgttaatgattttctataatatttat

SEQ ID NO: 78516 - DNA, 2525 bp, Cannabis sativa
gtgaaaccgtatttttgttatttttttgttatttttgtgcatttgtaaaattaaccctaattaaaaagcttagcaatattaattgaaaaacgaaattatttcaattattaagtgagttatctattcctacaagctatagcatatagctttagttaaatcacgtgcggaaataacttcatactacaaatggttaaaataaaaaaataaatgcatttaattaatagtagttaaccaaaccaaacaaacaaccattacttgtgtcctttcaccacggtgaaactttcacatttttagtaaatagtaatcaatgcttctattgaaacttttttttgttttaactcggactcctggattcggatctagacttgggattcggaccttagagttgagatccgagatttgcgacttagacctgggacccagattcagacttggacccagacccgaatctaattcgtagttggtgttagggtcgagtgtattgaaaatatattataattttatacaatttattcatacaagtcaatcctaaatatagtattgtattaaataatactaatataatataatacaatacaatctagcacaatataatacaatacggcatactaaagagccctatataaataaaataatgtggaataaattggataaactactcacatattattaatgtgggataaacatactcacataagtttccttttctataaatcacactatatagtatttatccaattattaaaattttattataagattatgacttggtaattattcactgtatgagtgtaatataaatatgttgtataaattacttatatcttgtatagtattcactataaagaagtatatgttctatagtattcattatattcattattttaattatatttatatttacaaaaaaaaaaatgcaatttaaacaaagtgggtttgggaaagggtgatccccttctctgtcatgctctaaacgggttatggttaaaataattgttatattttaatttagtaatatttgataaactattaataatctatttttatcaatactagaatgtacaactgcagggagaaaatattgctaatgataatcttttttaatattactaaaagttagttggtcaaatagtgaaaagaaaatctcttgaaagtaaaaactgaaagcatataaaaatttaccaagaagacaagacttttaattttattaattatagttaaataatcatctacttgcaaccaactttatttgttttctaagttaaggcgatattgccaaattaaatcatttccaataaatgaaattagtatatcacataaaatgccgctatcacttggagatttcaagggatcctaaacttgcaacactcaaaggctcaactacaatgaaaataatttttccacctaaataattgttacttaaaaatagactaacacatagaatagatttgatgaaatagaaaatagagaaataataagtgataaaaaaaatgagaattttatttaattgcaattttgagaagtcaactattaaccttataaaccgatttttgagaagtcaaagtatgaattttaggtgcaacctcagagaaattaattatctgttttaatcctaatatttttttagcggataagattgtgatgaccatggctcttgacgtgataggggataagtgccacgaaaattatttgggccttgttttgttggagttactaaactagctacgtttaattccatcataaatcgtatcaaagaagctaaatggttggaatgctaaatcttttactatggtaggtagagatatctttattaaagatgtcatttaatcgatcccaacttatactatgtctcaagctgcccaaaaaatttgtgaaaaatattcatcgcatgcatgcaatattttggtgaagtgatgatgtgaagataaaaatacactgatacaaatgggaaaattgtgttggcataaggatgaaggtggaatgaagttctgagatttaagacttttcaaccaaacccttttggctaaacaagctttgaggctgtattaggacccttcttctttggcggcccgagttttgaaaggtttgtatcatagaaatagaccatttaaatcaatcaagtcttccgaaaatgaatcctttatttggaaggggaaaagaactatatgatgcatgggctatttggagagttggggatggtagtgagattgttatttatgaagacaactggatacctctgttttgtctccaaatctactcggggttggcagaacagtggattgtttgcaatcagacctgggtggttgggatgttgatctaatttggggtcatgattccactggtttttattctgtcaagagtggttgctggtttgctactagatccttgaagtgcagcaaatcttctatttgtaaaaggtcattaggttggtggaaaaaactctggagtcttcatctttctccaaaagttaaaatgtttgctaggcagatttctcacaattagatcccaaccaagtttaatctaaa

SEQ ID NO: 78517 - DNA, 721 bp, Cannabis sativa
catttaatggatcagagtgcagcttgctttgtgtttcatctagcagttgctttgcttgtatccatgtagcttgcacatccgaaaaacctttctggttgatctctctaaggacaggttttaaagcctttaatttgtacaccacctgatacatacaagttcctccaatatgttgtttccatacactagaaaccttactatcatattcagggtgtgttttccacatcctaaaatatttgaaaggttttttcccacacttccatttgggaaataatgacagaatacctggagtatgatcataagttccctcattcaaaaataaagcttcagcattcggataagtatctaaccatttttgattggccatgattctatcgatcctcgagaaaattctgtcaaggccttgctgcttgttcgtccatgtaaaaaaggtaccagtggctttaatgtcttcaaattgacattcatgaatgcactcaacaaactcagtttcagtctgatatttaactttgtgccccaccctttcatctttgcctaaaatagcattaaagtctcccattaacatccagctctcatctgctttcaaagtctgtaaatccttccatagctctaatcttccttgtctgtcattaaatccatacacaactgtcaagaaactttggaaagtactatccattgttgttattttcaaatgcataaattggcttgtgcatttgataatatc

SEQ ID NO: 78518 - DNA, 1296 bp, Cannabis sativa
tgatcattattaaataagtacgtaggtacctaaagcaatattgccttaggatgtgaaatagaagatcatgcatgttgtatggtaagtataggaatgccaatcgggcgggcccgatcctttcggcccgacccaactcgattcggcctgactctttcctgtagtttagcaggtcaagctcgacccatatatatattaaaaaaaaaaaattatttattttaaaagaaaaataactaaattaagtaagtaaaataattttaaatgaaaatagaagacatgtttaaaaatttgttaaatttttcgttgattttgcggaagaataaatacatcaatattttcattattcagctacttttaggcttgaatggcaacgctttggaaaaatgaacagcaatagggactaatttgtttatatttaaaataatatatatttatttaaaaatttatgatttgataaaattgccaaaaaaaaaaaaaagtgttatgactcctttaaagagtcattgaaagatatagcctcttataaaataaaaattatattttgtaagtggttctcttaaagatttgctccatgtaagagatgtaaaaagctaattagacacactcacaagccactaaggctactttagtggtgagggagaaggtacggttcgaacccaaaactcctaacttattagttgattgtaatatcattacgctatactcggaaaaaaaaaaaaaaaaaaagacacacttacacatctcccacaaggacacatgcacgaaaacaaatgttaatactttgataattgtgcgtgtcaacctaagtcccacactggaagaataagtaagagtttctttgaatataagtgtgtgtcttattaataattacaatggtacaagatgaaaattaatgttaagagctgttgaaattcttccgaacaaagttgacctgtgtgtgtcattcacccattcaagttgaacaaatttccattgaaatgatcaaaatttcaaaaatatcatattgtaatcaaatcacgtggaactttcacaaaagtactgaatttgggcctaaggtgtctacaatttgggttaaaataaaatcttggaccaacaaatgagacatctcctcttctggcacattgtttgaaaaatttacaaaaatatgatcaatttaaatctagctttaataaatacggaaagaaaaaaataagtgaaaattacaccaaatatgggattctacaaaaaagtttgaaaaatatggcttttttaagtttaccacccttatatggcatttatttaaatttaaagttatatatg

SEQ ID NO: 78519 - DNA, 828 bp, Cannabis sativa
gcaccattaacgagttgagttggtggaggaattccagtgagaagaatatcatcaaatccgtgaccaatcattgtaggaattacttacgatttccatgccaagaagttagatctgttaagtctgacagtaagagatgaattcagggagttctgaaagggattccaggtctgagtaggagcagttggaggtggtggtggtggccattgaggctgagaagaggtgcgaggtgggttgtcgatgattgaaggatccattaatgactttcgtcgatggcttcctgataccatgtgaacttatcaatacaagtatttagtcaatgaatacaaagaactcataagcttgtaaaagttataagcttaagagttgaaacctttatttatagagatagttttacaaagaaaccaaaagacagaggacttgtcaactaataaacaattgacagttataacagaagactaactgaatttatttaactgtatcaatatggcttgttgtggtggcacatccactctcatagtcattactctttttggatgatagatagtgcagcagagacggctcacacacactctatggtttgggacccaaaccaagccccacaccttctgcttcctctgtccacaaccctatcgcggacgatcctattgatcatcatgcctcgaaaacataactttttattattgtttttctttttttttttttctctaaccttttgttactaattatcgtttaatcataacatatacaatatccaattaatctcataaaggcaactcacttttttcttcaagcataggaaactagcatataattgattaacggtttttt

SEQ ID NO: 78520 - DNA, 854 bp, Cannabis sativa
acctataaataggttaaattaataggctcttaatttattatattcactatgattattttaaactaatctatgatatttttactcggataaaccattctaaaaatctggtgttacttatttactatttatgctcgaactaaagtttgatatttttattcagatacaccattctaaaaatctaatgttacttatttactatttatgctctctacatttattatcgctgtttcacatatcttttgtcattgactctttttgctatcaatgaagatatatctcatcatttcaatcttttttgtactctctttttcttttcatatttgtcacgagttgtttataggggtaggaaaacgaataagacaagacaacgcgactcaaaattcacacaaaagttaacggatttgggtttcaacatgacacaaatacaactcataaacacgaattgtcatccctgagtgtttatatgaagtatatatcaaagctagatctccatcaatttgaataacaacactaaataataattctaaaagtaaattaatttaaatttacaatacaattgacttataatcatattcgtgttataggtgtatttagcacattcaaagctaataattctaatattaaaaaaaattagtcacttacctattcaacattttataagagaaaatggtaatatgatataataattaagaaaatattgtgtagagaaaataaagaataaaatattcaaattatgcttatatataccatgttaatttaattttatgtatcctaattaaagataggaaaatatggattaaataaatattcaaattatgctatatatcattgttaagtttaatgttgtattattt

SEQ ID NO: 78521 - DNA, 1049 bp, Cannabis sativa
atcaaagttaatctataaaacagacttatttaaaatattatattgtaacttttagatctaaaataataaaatactttttaataacttttgaaactatttggtataatacattttgtttaaagccatttagttacactttccatatctcctaaagaaaacatttactcttttttatattaagccaaaaataaaaaaaatactatttggttagctaaatataaaagaaattaaaataatgttttattttttttatatatgcttctcatatattaaaatgattatcttaaaaaataaattatgatggtattttttctaaacaaaaataattagcagtataattagaattcttttttaaaaaatctattaagagagagaaattaatatttttctttaaaggaaaagaaaaaatgaatacatctaattttgttaaaaaaaaaaaaaaaaaaagaatgtgcaaggactgcacatgttttcttaaagtttgactttcaaatactaataagtgataatagtcaaaagtttgatttttaaaaagaaaataaaaataaaggcaaaaatttctctggtacgttattttgctgacgtggaacgtgagtttgtgatgattgtttatgtaaggttattaatgtaaataatttgaaaactatgtatattaatgtaaaaatcccattaatttttgcaattaattattgttactttgtttttttctcaaaatacgtgatagttcatgaacaagtcagatagcattaagacccacactacgtgacgtgccatattaaaccacttcattggtcacctccgggagacttcacctggatgataggtggtcttgtctcttcctctttgtgagtaaatttgacccggagaagagatggaaggacagacagagtataacacactgtatactcacattatcttgaaaaaaaaaagtgctcaagggtttaaacttgttgcccccgaatttgcccaaaatacgtggaccagtcgaatagggacacgtggatcagataacttgtaaatatttgatgagtctttgtacgccacaagga

SEQ ID NO: 78522 - DNA, 568 bp, Cannabis sativa
ggttagacacatagtggttgctatgctatctttcaactatattttttgttatcatactttgttgtttcgtcacatgaatttatttttattcattgtgatgcttctttgaatattgtcaaaaataggcatgtgagaattgttaactttaggtaattgaactttcacatgcagttgctctttttcttgtttgttttgggtgtgcttttgaaaggcttcagtatacttgataagaatttctttgcttgtagattaatgctagtgatgaccggtcttcagcaacaatagaagcaaaaattattgatgttgttcagacgaactctgtcacagttgacactagacctaagtgcttggttagttataaatttctagttgtccattttattgtagtatgtctgcagaagaacaacaacgaatggttaatttcttttctataggtgattgatgaaatagatggagctcttggtgatgggaagggtgctgtggaggttattttaaagatggtaatccttttaattttatttggagaatgcaatagtgttaggagctggctcatgctaattataatctt

SEQ ID NO: 78523 - DNA, 786 bp, Cannabis sativa
attaatatttaaattgatatttgaactcatattaaatatcacaacccatttaaaaaaaaaacaacaaccggagatttgatacggagtcatccccgattgagagcttttttttttttttaacaaatctccgattgagagttggtaaaagagcttttccacgattaagggtggaagcttaaaaaaattcaattgaaactttcaatcgctgccaacgctaatgccgattgagggttggtttcgcagttcgccaaggccgatgatgatgataaagacgacaatttggggtttgatacctgccaaaataattcaagtagcaacttcgctgctattccggtgatgctttcatctcaatttctctttttcttttttcccgttcaaggactttaaattttcgatcattatttttctttaaatgtgaaacaaattagaggtggatataatcgatgaatatggatgggtgcagtatatgatgagcacttaaattgaaatacaattcttgattaagccagtgttagcatgaacaaaattggagaactccaagaaggagatgatgtcgccattcggtgtcgatctcagacattatcggttgtaccgaaaccaagatttttgagtgactcatccctaatattattaggtgtgaattcaacatatatcatcagttgtaacgaaaccaagtatgtacattgattggtttgaacttcgtaaaaggaaattcaaggatgttgtgtttgataaagataatacaatcactgccccttatcaattgaatctttgggctcctcttgc

SEQ ID NO: 78524 - DNA, 2968 bp, Cannabis sativa
  modified_base (2231)..(2257): a, c, t, g, unknown or other
  modified_base (2393)..(2409): a, c, t, g, unknown or other
ttttttttttttcttttcaaaaaatcttttttgttgtacaaaacacacaaacaccaacacactcatctttcacaaaaaaataaatcttaaattattttttacttttgcatataaaaatttactataaatttaatttggcaggtaataagttttgtaagacaatgtgattattatcgctaacttattgagcaaggtacaacaacgcatacgatttgagaactcgaattggtctacatcaaaatatttcgagccttccaaaaagaccaacacatccaaacaaccttgcccaacttccctttacttacccgtccactcaattgaaacaaccaatccgagaaatcaagcactttcaccaccaaatgacccacaaccatggagttccaacatagagcaaccacttgacaatccatcaaagcatgtaagattgtctcatcactcctcttacaaatgggacactctctttgaacaaacacatatttcaatggagttggaatatagttggtagacaacaagtagtcgcccgccaaactaaatccttagcttttggaggaatttttacattccaaaccttcttcctaaaacccgagttcgcatcaagagaccgatgacccttcataacttgagtgatcttgtaagcactctaaacttaataaaaacttgaggcctccttgtgccaatagaagcaatcttcatggacatttcactcaatgtacctatggtttgcaattgggtattgacctccttgaacagttttttaaattaccatctccatccccgtagattaattataccatactcaccctaataaccattagtgatggtgcgggtattaattactagactatttgaaaaacaatcatagttacttataaatgttaatagtaatcatttttctaaaaaaataattataataattttatttaattttgataaaatctaattaaacaacattttaaatactttttcaaattcaaagtccatccatatatatatataaatatttattattcaaaaatattagataaacattatcttaaaaaaattaggtatacacatcaaaatattaaaaaacaaaaatcaaacaataaccataatcataactataaatttaatgaagttctaaaatagtaaatcgggcagagtcagtctagaagttgttgcaaccattggacttaagaggttttaatctaagaaatgactaagttgtgcaagttggtgtcaaagcagttcgaaataatgtctcttccatggtttcattttttggtttacccattgataattgtcatcaattatttcataattcaagtaacattttcatgctttcattcaaatgatctcctaataatgttgtctaattttgctagaacttcttaatcttttccgctcaaatttttattaataatgacattcttccgaattataattttatttgctaactgatttatcaaattaacaaaattcttcttactataaaaagaaaacaatttaaataatattagtccatcataaaatttcaataaacataatccaacatgttcttataataatgctaaaacataaaatatgacattactcgtggcggtaaactttattctttatttttagttaacggtaagaaattaactatacgtaattttaaaaatttggaatttttaaaaaaatctttcaaaccaaactttaacttcctattctcaaatctttaacaagaatgacatttctaatgaattatatagtcttatttgctgttttagcaaattaataaaattatatttacttcaaaaagaaaataattaacataatattagtccatcataaaatttcgctaaacataatctaacacgctcttataataatacgtaaagcacaataattactcataatggtaaaatttattatttatttttagttaaggtaagtaattaattattaacataattttgaaaattcaaaatttttttaaagcaacacacacgctcttataataatgtgcaaaatacgatataattgttagcagtaaaatttattatctattttcaattaaagtaagtaaataattattaacacaatttaaatattcagaaaatttaaaaaaaaatctttcaaaatattttttccaaaacacaagttgaattatttcttcaaggctaattaggatttttacctcccgaactttgatatgtaccaaatcatgccctctgaattttcaaggtcgttaaaaatgcccctgaacnnnnnnnnnnnnnnnnnnnnnnnnnnnttatctaattttagtaaaaaaaagtctaacatagatgaaagttcaggaggcatgatctagtatatgtcaaagttcgagtgacatgatttggtagatatcaaagtctgggaccatgatttagtacataaacaatcannnnnnnnnnnnnnnnnaatgaaattaaacaaaagttcttaaatctaacattctcaatagttcaggggaaatttttaacggtcagaaaagttcaaagggcatgatttagtatatgttaaagtttaggggtaaaaattctaattagctttttttttttaaaaaaatttcactaaaataacgcgctcttataataatgtgcaaaacacaatattactagtgacggtaaaatttattatctatttttagtaaaggtaagtaagtaattatatcgaaatttcaaaaaaaacttttctcataccattttttttttctcaaaagacaagtcaaatcatatttaaacaatattagtctatcataaaatttcactaaaataacacgcgcttataataataggtaaaacaggacaattacttatggcggtaaaatttattatttattttcaattaaagtaagtaaataattattaaattaatttaaaaaattcaaatattataaaaaaaattaattcaaaatatttttcccaaaaacacaagtcaaatatttttcttccaaccaaattatgttcttgtcttaatt

SEQ ID NO: 78525 - DNA, 832 bp, Cannabis sativa
taacttcagaattgcgattggaatgtgagacatgccttgatagatcatagaaatagctttcaaatctaagtttaattgtgtcaatctaatccgtattaagtgagttatgcgggtcagttagtgaagatttttgtacagtctgtttagtccacaccatcatcctacgtgtgggtagaattttattggaggtgtgcctggcaatgatcacgacaaaattggcaacaggtctgcctatagcagcagggtttgggcggccctcgggcagagtgtcgaccatgtttggttggactatatacgtctagttagtaggaaggtaacacctccaccctttcttgagttcccagatgaaacgaacgtatccttcaccttgaatttggtcgaaatagaaatgatgttgtacctcgagctctagggagggtgtatgttcgttatttacctcctaatcgccaaagttagaatttgaaagattgttactggacaaagatgggctagcatggagacaagggtgatcctcgtataaaatttgaagtcgatcctggttaatatcggtgttcgcttcccaaaactcagcagggttcatctataaaaggtaggagataagaaagttagagttggtcggagcaacgaatgaaaaataggttgaatatactgaccaggttcaattgaggaatcaaaagcaaaagtttcacccagaaatagaatcttcaaccccagaagttcaaaactttgaattggagtatgattttcactaaaacgctaatggaagagtgaaaatggatattgtaaggttaaaatttgaagcacagttatgttgtggttgaatacatttaag

SEQ ID NO: 78526 - DNA, 692 bp, Cannabis sativa
gacactctaaaatctctctaaatggcactatctattatctccttaatactctcattttttaaattttttattaagtttataaatatcaattagttaattaattaaaaaaaatatatttatttacaattacatcctttcttaatatagctaaattcatagtaataataataataataattttaaaaaaaaaaaaaatctgaaattaactatgaagaaaccaactcttatactatatcccttatattataaaaaaaaatgaaactaactacgaagaaaccaactcttgtattatatataaattaaatttttttaatggtaagccatcatttattgatggtcactccttcttttatctcatttttaatggcaagtaatcattcactttaatattgaaggtcactcctctttttttttttttttatctcttctattttatgcacattatttctattgcttgtcacacacaaatataagaatttctatgctcaattctaaatatcttcataaaaccctttgtacattgtttcgatttttaagagtaactacatcacttttaaggtcatattataatttataattcattatacaatacttgctaagtaattaatttttttattattattttattggcagggactagagatatcaattattcaaataagaatattaatatggtacaagaagaattaaga

SEQ ID NO: 78527 - DNA, 1542 bp, Cannabis sativa
ttatttgtagatttttactgttctttgttttgtaccttagcgcttgttttttagctgtacctgaatcttcatgcacagatttatcaaatgtatgagcaatagtgcattgattgttgtcaattcatcattgatcattttctttttcttatgctttaattttgttcctttttctccctaccttgtttagggccatatagattaagttcagtaacattcgtttgtaaacatgatacttggctactggttcataaaaacagaaaataaggttgttgtgcatctgtaagagtactgttccaagtcatatcattttgaactaatattgtttccttttgtgttcttttatggtgaatttaggatttgaagtaagttgcaccctattaattgttgcaatagataaaaaactcattttctgttttactattatattatcaggtaatgattgtgtagaaacctaccttggagtcttcattatgcattcttctatttcatttaaaaatggtgttttctttatcattttcatggcatacaatgttgatattgtgatgcttatcctgaacatataattggatatttgatataagtatttttttctcactctctttcttatactggggcttctttcagtgacttggtcatctcctatggtcgtcaccttgagatgaagcatgatatgcttcttggcttgctatttgagcatggtacctacgaaaagctttatagctaccgacatcttataaacggcttttcagttcatgtttctcctgaacaggtgaaagaattgatagtttctaatttctagcaattttatgcagtccatttatcctattgtatcctaattcctttgcttggtcctcttgtaatgtaggcagaaaccttaagacgtgctccaggtgtaaaatctgtggaaagagactggaaggtaaggagacttacaacacacactccacagtttctggggcttccaactggagtatggccaacaggcggtggctttgatagggctggagaggatatagtgatagggtttgtggactcgggcatttacccacatcatcctagctttgctgcccaccatactgatccatatgggcctgttctgaagtacagaggaaagtgtgaaattgatccagacactaagaaaaatttttgcaacgggaaaataattggagcccaacattttgccaaagctgccaaagcagctggggcatttaacccttcaattgattttgcatctcccttggatggtgatgggcatggaaggttagtgctcatcattgtaaattttggaatcaataattaccttacattcttaaatttagtgaaagtaacttcaacgtttcgctactatacatcgataaatttgatcaacacttgttcaagacttcaactagtaagctcaacaatgaaaattaggttttattgtttttcgacgattagggtcttactgttaacataaataattaagttagcccacccctttcttgggagaaatggccaagataacacacaagtacttagaactaattcattcttagtggtgat

SEQ ID NO: 78528 - DNA, 818 bp, Cannabis sativa
taataataaaagtatttttgactataatatagagggttcaaacacttattttagaaaaaagtagaggatccaaacatttatgatcactatttttttaagagtgcttttacataatgtctatttatttgatttttttgcttctttgcctagtagtttgtaattgttaaatttttttttggcaaatatagtttatagagatagagagagaggagttgcaaggtacaatgagttcagaagaaacttactaatggttccaattaccaagtgggaagatttaacatgtgatgaggaagccattgaagcacttaatgaagtttatggagatgatgttgaaaagcttgatttgcttgttggtttacatgcagaaaagaaaataaaaggctttgcaataagtgaaacatctttctttatctttctactcattgcatcaaggtaagtaataataataaattatacggtaaatattattttgcaccctgtattttacaaaagttactaattggattatatgttttattaaatgacgaaatagatattgtattttctaaaattgtacaaataagaccctgaattgattttttatcaaaataaaacttaataataatctgatctagagatgttatgacaaaactgtttacattttctatatttgttcgtgttagaatttgtcttaaagttgtttatattattaaataattttttgaaaaaataaactcagggtcctatatttaaaattttaaaaaatacagagtccattttgtcatataacaaaacagaggatccaattaataacttttgcaaaacacaggatccaaaat

SEQ ID NO: 78529 - DNA, 531 bp, Cannabis sativa
atttattttatttttagctaaaattctttgcaggtatttgcttcattattttgcactacttatctacatacatcactttgtttgtctccgctgttttgttctgtttttagatgtgtgttgtgttttggctatcctagttttgattaagaaagcagtggctgatgtattctttttgtttaaggtgaaaaggtatatggacatttattctgcttcttctgttattggattctctggtgaagacctgttccatgttgcagaccttcatgctaaagcagtggagaaatggtcatatacgaagaatttttttgttaacaaaaatgaaagctgcaatacagtattgcctgctcttaagagtcagattgatgcatattctaatttcctatcaagtgttaaagagctagcacgctccaagtggactgaatttaatttaaagacaatggctgttggttttggaattatgctattatcgattttcattcatatgcttgctctcacagaggtgaaaaagaaaaatggcatttctttttcacc

SEQ ID NO: 78530 - DNA, 844 bp, Cannabis sativa
agtggtagaaggtggttatgtatattggtagcaagttcgaaaattcatcgtagttcttttgagttttttcttggttgagttttctctttgaaaatttaggcaagaatggcgagaagatgaaaaatgtcaagtgggttttctttctcttatttatatgaaaagttatgattcacgtattcatgatccaacaacttacatcaatcctgagaaagcatagatcacatgaatccagcggtctaggaatgccaaaagacatcattaatgtcattaatgacaacatttgcctcggatatcccactgacataactaaccatcagtccataacccgaggcatcatgtgcttccacgagtcgcaagacacacacaaaccaatgaatattgacacgtgtactccactcacaaaatacaaagggttggggtcaacaaacctctgcgactcaccccttctggaatttcaaagggttccaactgttcatggccctgcacattgttactgattcagatgaaggttgcaagcccccacgactctctagtctcgaaggcttgggggtaaatgttatttgcatttacgagagcatgacacatgtaaagcctatcatttcaaacctgcttgagggcccattcacaaggcccaagtaaggcaatgactcgatccaaaagcaaagcaaggttgggattcggatttgacccttactctgttacggataaaactggacaaatagatctagaggattgatacttaactaaattattgtgcatctgaggaatcataaacggatacccttaggggtatcctagaagaggagtcgaaggggtgtcatggagcgtcgaccgtctgggacta

SEQ ID NO: 78531 - DNA, 828 bp, Cannabis sativa
ttttctttttaaatttatttacgccccccctcactttaaattctgggtccgccactgtctatacataagtgtgtgaattcttaatagtgtctggatataaaatatcccaaaggtgtgagttatacaagtgtgtattaaatgtgtttaatgataaattaaaagagtgagtgcttggtgtattatctagtaaaaagattcaagtcttggtgtcactactatttcaataattaaattaattacatttttttacgtattgtgttgtcttcacacaatatctcaaatccaatctataaaagcgcgaattgataaattattttagattgattacttattaatattaaattatttaaatatttatgaaaaaaaatatttttttacataattagcaataaagtaaaataaattattgttattgtatgtctttaacaataaatcaaaataaataaaataataaataacaaattcaaaggaagaaaaaaattgtatgtatataaaaatgttctattttattttaaattgtatgcagaaaaatattatatataagaataaaatatacatttgatctattcagttttaaaatataattatattatatgtattaaatttttaaatgactattttctttattttaaatgttaattgtatatataattttttaatttttttttttataaatatgcgtggattggattgaattacttttacatgtcaatcaacatttactagtacatttgaatttttcaatctaatttacacaaatgtagatatttatattttgtaaattatattaaattaaatcgacccttttatacacacctctaatctatc

SEQ ID NO: 78532 - DNA, 635 bp, Cannabis sativa
aaaaatatctaatttattttttttaagatactacaatcaatattttactaagaaaaaaaaaacctaatcatattttcaaaattcatataaaaaaagttcaattaaattttttggcctaaggcctccaaataacttaagacgccatcagacagaatactgactattagaatatattttacacatggtaaattgtttagaatgttttagaaatagtgaaaaaaatacctattataactataatatacgttgtcatataaaaaaactactaaaaatcgaaaaaattcttacgaaaggaataaaagtggtgtctctacctaaaattttcgagaaaagatatattatgaatttacaaatccaaagcctcctaaaattggcattgtagctatttatgtgctgaaaatatgatagccgagtacgtccagcttttgttagagcattgctatgggacatcaatgtacctagtactgctatgagataagtgtgacctattattgaattgtaccaatagcgatagtacacctcataaagatgctaggcaccataagtagcatttcactttttgttatattattccatggttaatctaatgaaaaacagtattgtttagttgcttgagatttttcagtcttgatttt

SEQ ID NO: 78533 - DNA, 1289 bp, Cannabis sativa
aaaaaaaattggtggaaccaaacacattgaaaatataaatttggcttctccagatatacgcgcctacgcgggccgagattgggcagactatctccattaaacagcagtggacctcacgtgactaagggatccatcataaccgttaactattccgaaatggaagtttcgacggcacgatttaatcagaacacgtgactacaagagagataccaaagcactgacactgtatggtagctagcgccatgaaaatgaaagttgagcgaagcgttggtgcgaggtcctttcctcgatttaactttctattcagtgtaacaattagaccttactatctaataaattaacgattatgccactaaagctaaccaagctactaggttttgtttttgagtggggcccattgaaatgcaaatatttgggagatagtggtgcttatggtggagccccaccgctggattcaacggtcagcagcgcaacaagccccatgggccatgcccatcaagttgtggctgctatgttgtgcgttgtgcccttgcttcatggccatccttgatccagaattgtcgggctaattatgtaatttagccatgctgagatttttttttttttttattttatttcaaatggcttatattttataagaatgtgacaatgattcattgatttgttgtgagtaccaagactatattattagtacgctgtattattagtgcactgtacggaaaaaatatatatattttttggtgtttcgtgcaattctttagtatttttgacacactagatagttttattttatttttttttttaaaaaaaaagaatttatgtaattttattgataagcaattacctaaaataatggcatgtagctcatttaagatatctcacctattagaaacacgatgaagattaaaattagaaaaataagtcaactaatttatagtctaattcttggattctttgacaaaagaaaataaaattaaatcaaataaaaaaaaattgtagcatcacaactaatcttaagagcacttgtatttatttttctccaccgattagaaaatacagcagtaaattagcttaagcactcaactattgtgcaaagtatatgattgtactactatgaactccttcagtcgcatagacgtattattctcaaccactaacaataatttgatagcgagtcatcgaaaaacaaagaagacgaccaaacaacgaaacaaaacagaacaaaatcatattacagaagcaagactaatcgtatgttaattaacaaaagacactcaaaaccatgtcac

SEQ ID NO: 78534 - DNA, 771 bp, Cannabis sativa
ttaatttaaggggtataatagggatatcatctataaaagtgggtatatcttaaagaaaataaaaatagaagtaaaaaaacaaataaaataaagtgggtatcaatgtaattttctcctttagaaattggttgggctggggagtatatgggcctttcggcatgtgttaattttgaaaaaagaatctctcaatgaactaattcatgtgttcattacgaataaaaaagtcaaaaaaaaaaaaagtgaaattgcaaaaaattttaaatatttttactgagtataagtttttatttacaaaaaatataattttcatattatttttgtattgtaattttttttttttttttgttattcttttttgtttcgtatgttattttcatgtgattctcttgttatatttaagttatttttacaagatatcctaaaattataattataaaaaaagtaaaattaaaaaaaaaaaaaacattaaaattttgacaaaattagcaatttgtgtaaatttcctctcttaatactggttaaatcaaccggatttcatacatcagttaacaaaccactttgaaattaattattagataaaatgtaaaaataagtttattatcaatgtacaatgaaagtttattaaatgttctttcaattatataacacgttaaccacatttttattgtgtgtacgtatttgtcttgctcatatatatatatattagcaaaaagctacgtgcgacgcacgtatactaaattttatgctagtttttttctatgttatttgaaa

SEQ ID NO: 78535 - DNA, 722 bp, Cannabis sativa
acaacctgtacccgaggaccacctcgcatgtaactggggaccacatgcgtgtacccggggaccactctccagcaattgcggaccacctaacaccagacaagggtacaaggtgccagactgcccccagcacctgcaacacgcagcaggaaagcaacattttatccctgcgggaccactttttacacctggccattaaagcctataaatacccccccatctcagatgtgagggggttggaaaatcatttggtgtaactcaaatattgaattcaatagaaagaggaatattcaaacatcttttcacctttatctttatctttatcacgtttctgggtaactttacatttcccgaccactaacttagttgacgagttctcaccatttatagtttggcatcatttgtgggaacgaaaagctcaagacaagtcactcttttacacacaatcgttacaaaatgaccagacactctcgtcgtcatctgtacatggaaactcaccttgacgaagaactgctagttgcaccggagcaagacctaccgttgtccaccgccggaaagggagaggcgaacatcaacatggcatggacaaataaagaacactgacaaagagtgcccaatggagtccctaaagcagtggaagacgtcagaacagtcataggagggccttgtgtaggaggaaaaactcgaaggaggagagacaggtacgcccgtgaggcaagtcgaga

SEQ ID NO: 78536 - DNA, 2447 bp, Cannabis sativa
tttggtcgcaggtaacagaagaatgcttggagaaagggatagccgtttgcaaggatggtgctacctacaagaaaattggaaaacgaattaggtatttaatctagatctagagattgcaatcaggagtaagctattttttatgagcacatatatgtgaatatttatgatatttttttttatcgaaccatcttacatatacatttttgagttacacaagctgggatttcgatctcaggactctccccacacacgcacccccactaaccccctatggctagcctcaagtggttgaatgtgtatgatatttagtttcaaagttcactgagaaagattattcactaatccatcggagtcaagagacaggtaaattagaatggtgtactgctgatgaatgataacctgtgctagggcgtgttcgtacttacattataacatattatagtataattgtgctgacttgttcttgccctgtctttctcattttctctccttgcctgtagaagtttttgacattatttttttccttgttagtgagcatgctgaaaaatatggttatggtgtggtagaacgttttgttgggcacggcgtaggaaccgtgtttcattccgaaccacttatattacataaccgtaagtatctcattttggttttgtgttcctgttaaacaaagtggtatttcttttagatacaatggcctccatatgggaaacacagcaggaaaatattttaatgaggatatcaaaccaaaatctcagaattttggaatgtcacctaatatatcatttgctaagatcagagagtttgcttaattaattccaaaacaaattgaaagaaatcagctattattttcttaaatgaccaaagtgccatatactagagtttagggaacaataaaggtaattatactaaaggcaatgctgaatttaaatgtgaagatatattaactcttgctttagcattttggtccctaaaaaaattatcgtaactggtgatctatttcataaatttttttaggttgataggtcatgtagtaataatttgaaattgaataggcaaaaaatgttaattataccaactgcagcattctggtgtcatgtcaaaaccaagaaaatattagctttgttaactcttaaggcttgctctcatgcatcgtttactgttgtatttagttaaatctgttaattgcaattggattattttaatatttgacaggaaatgagagcactggctgtatggttgaaggtgaaacatttaccattggtgagtgcatgaccgtaattgatactctaaaattgcctttaatgtcacttattagtaagaaaataaaagttaacatctagcataagcattgatgaaattgtattttattcacaaccaataaggctagtagattttttgttttacttccctgattaatgattatacaaattgtcatctcgtttattgcagaaccaatccttacaatgggaagtaccgattgtgttacgtggccggacaactggacaacagtgactgccgatggtagccttgctgcccagtttgagcacaccattttgataacacgaaccggcgctgaaattttaacaaaatgttgaaaaggtaaatatatctatgcttgtatatagaatgaggaaaatcattttctttaattgtagatttgaatttgaacatgtttcaaaagttcttagataggaatgtatttacaaaaacaaaaaatgatgtattacacttcattaaaatgaaaattcgttgaggagcacttttggcttatagtttagttctgtgtaagcattttcatttgttaaaacctatcaattcaatttaattagacctggattttgcttgaggtcgttttcagacatgtagaccagtattttttgtttcattttcttggtagactaaaaagatttagaatattagttttttttttgttatcatctattgctgttcacgtggttttctcgaaaggacaaatgaataggttttggatattaataaatacttcgaagtaatccagaattatacgtgtttgtaaaataatgcttttttttgtttgtttgttcccttttttgtttaaaaaattgattttaaattgattgttggtagtaaaaattatgtgtttgtatatagaaaacaaattagttggtggcctcatgtgaataacgaaccttctttcccaccttctattcgtaatttggaccagcaaagtatataatagtctaatatgaacctttgtatttgattttcgacgaatatctaacctttataatagtcaattgggagtatgagtgggtcatgggatcgaattctagttatgtaactcaaaaaacgcttttagaaataaaaaaattaataaaaaaaaaaaccttaataatagtcaatggtctaacattttaatgtgttgaaattttattttttgtggcagtgatgtagttcgactcatgatt

SEQ ID NO: 78537 - DNA, 572 bp, Cannabis sativa
taataatactactactaatacttttattgacgtgcacgttaattaaatttgaagtttttgactttttttttttatcgtatttttaaaattaattttttagttactaatagtgttgatataataaattaattaattactcttatataaaataaatttatttttatatctgaaatatattttggtgatctccaatacttatttatatacattttaacaattaattagatatttttaagttatattatagtaagttatagtttaaaatacatttagataactttaaaaattattttcaaaactaatgagttgtcatgtaatataacaagttactattttcatataccaattattttatatattttttttgttattttaaaaactagttagttatcgtatagtataatataattcatttaataaattttaaaatgaatgttaactaagatttaagaaaaaaattataaatcagtaactaattattatatgggaaatttgaatttccatgcttaaataacccataaattattcccctaaactaatactatacataattaattatatatgacactttt

SEQ ID NO: 78538 - DNA, 588 bp, Cannabis sativa
gctgttttcctcatttgagtcctgactcgttgcagaacacaacaaagtaaggggtattcatcttgtatatgtattttattttccggttgtaatcatgttaaatgtttaaattgattgtttgtgaggaatggatcaagaacaacaaagtttaatttgtcactttgaaaggcctgttttatttcatgtttattaatttgtaggattactactcgtttgatgtgcaaatttattttgttacaatttatatgatttctatcttttcaggttgacacattggtgtgtttattgttaaattggtaatattgtagattgatcctgtattgataaactgatttaagtgcttgcataactgtctgaatcggcaaaatgtaggtgtaaaaagaggaattgattattagtttgtttgtagtttcatctatggggatcgtgttgcttttctcttccattctcttttgcatctgatttataaaccttttgtactttgctcattgttctccaatattatctgcatagaggatttgaacaacaatggttgtcaataacatatctcaaaggcaacattttttggcaatggccttgttgctattg

SEQ ID NO: 78539 - DNA, 947 bp, Cannabis sativa
atctgtttggatggactcggggtggaaacacgcgtacggggtggtcacctagatcatcagtaacgcatggatcggcatctcagggatcacctctgtctttggggaatacatcaccaccattttcaggagagggagcgactaagacagctaaaataggtaactctcctttacctataaagagattatctccaacggagttgaaagataagcgggaaaaggggctgtgttttacatgtgacgaaaagtttcaccatggtcacaagtgtaaaaataagatgctgttgtactgtggatatgacgatgaccttggtgaagaagagacaccactggaagaggtagatggaggagatggtgaggattctccagtcgatgaagttagtttgaactctttgtcaaactcagccaatccgaggatctttcgcttaatggcaaaacacaaggcagagtgtttggaggtgctcattgacacgggtagcaacaataatttcatacaggagtcattggcggggcgtttgggactgctatgtgaggatacaaagcgattcaaggtttacatgggaaatggtaattctcttctatgctctaaaatttgtagagatgtggaattaattttacagggacatcagtttgttgtggatctctatgtgttgcctatttggggtttggatgtggtattggggatgcagtggttacagacgttgggaccgtgtattcatgatcatcgagctttgacgatggagtttaattggcaagggaatgtggtgaaactggcaggatcttcaaactcgacccaacaaatcacttaccaccaattccatactattattcatgaaggaggagtccatgaattgtataagctctgtactgtgcttagtgacaaagcaacgcacagtgacgaaattagcaagattgaagaggaactaccaatggagggaaaaggaattgcc

SEQ ID NO: 78540 - DNA, 978 bp, Cannabis sativa
tgaaatgaattctgaggattctatgtggcggcttcattaggtacgacttttattgctgaccaaaaaacaaaaatatatatttattatactttaatttttatacattttacattttttttttgtaaaactccgcaaaagtttttttttttttttttttttaatttaagattttattttatttttataattatttaagacttcatttaaataccaagataactattgtacaaaagtaaaatttcaaattttgaagataatacagtaataattcagttgatatatttttttttttattttaaaaagattacgtgataaatatttcaaaataataaaaaatttacaaaaataaggttttacaatatttatcaatttaaatatttttttaaaaaatacataccatttttttcgttcttaaaaagaaattgattttgaaaaaaaaatacaaatacaaaatctgtaaaactatatataagaaaaattgaagtgtgtaattgtttttatttatatatataattgtgtttattttaactatttagaactttagaagatcatataaattttttaatctttttaaaactttgttttctgttttttttttaatggtttaaaactttattttgtcatcataaattgttaaattattcacaaaattgtattatatatcttttcattaatagcaatatacatataacaatatcaacattttttttgagtacaacaatatcaacatttaaaaggctgaaggtagattttgatagaagaatattgattgttttgaaattcaaaatacaaaaggacaatttgacacaattgtcaattacatctacttcaaaaagggtccaatatttaattacaaatggacttattctaccatgacttgaatgtcaaaaaagcaatacacccccattcttttgaatcacaacacatttttctacataactaaaatatacataaatactatttaacatgccaattgat

SEQ ID NO: 78541 - DNA, 687 bp, Cannabis sativa
atatatatttatatatttcagattctataacttgcatgtctttgccactaattaaaaacttctggatgtatgagttatataatgtagtaaattaaaaagttggtgctaaagtagagagataatgtaatacagggtctcaagatgtggttaaaatgggtgctagatggcgtgtgagttctggttcttcgatctctgttcttaaccagtcgtggctcccttccatggataatccctatgtggtgtcttctcatgaggctcttaaggattgtcatgtctctctaatcttcttcagactaatcgaatgtgttggaatgaggagctgttagaagatttatttgagccccgagatgtggatctcatttgtaaaatactgctgcctgcattgctgaaattggatacatggtattggacttttgaaacttttggtgaatattcagtaaggagtgcctatcgtactttacaagtgcgtcatggaagatggaatatgcaggataattctggtttttggagaaaattttagtatttgaatcttcctccaaaagttaagaatttgctttggagggctctcaccaactgtcttccaactctagtctctcttcagactaagcgggttcatgtttacagtatttgttctttgtgcaattttgaacccgaaaccacctatcatatcatggctggttgctcttt

SEQ ID NO: 78542 - DNA, 802 bp, Cannabis sativa
caaatcactactggtatctgccatgaataagcataagtatatagatatttagtaatacaaaaccataacattcaacagtaggtaatataaccagccatatgcgtaaaaataggtatgctcatatattgacattacctaattagacaagtctgtatcataatgtaatatcataaccataacagttgacattagataatataacccactatatgcatagaaatagatatgctcatatatttgcattgcctaatcaggtaagcccgtgtcataatgcaatatcatatacaatatcataaccataccattcgacagtagataatataactagccatatgcatagaaatagatatgctcatatatttgcattacctaatcaggcaagcccgtgtcataatgcaatattatatataatatcattgcaccacctaatcaggtgagcccgtgcacagacttagcaccaatatattgcatcatctaatcaaatgagcccgtatttactcctggtaagtacttattatatatcactaatgccagtacttacgcccgatacgtcgctaggaagaaacccaacaatagtttcaatctaagccataaccagacaatttcatatcactgatgcccgtacctacgcccgatatgtttctaggaatattgcatcacctaattaggtgagcccgtatctacgcccgatactcaaactacttatttaaaaattataattaattatcaaataaaattaccattcatattatttattaattagaccatacatcatatgtcactgacgcccgtacctacgtcc

SEQ ID NO: 78543 - DNA, 646 bp, Cannabis sativa
caacggtgcgcctttggctcccttcaatcctaaacgtggtctgcgccaaggagacccgctctcgccgtatctctttattctgtgtagtgaggtgctttcaaaactgatttgtagagccgaacaaagcggagatttgtctggtgtcaaggtgtctcgtgaagcaatgcctattacccatctgttttatgcggacgatgctattttcttttgtaaggctaatggttcaaatgctgaagcaattttacaatgtatcaatacttatgaactatggtctgggcagaaggttaacaaaggaaaaagtggagtggttttttcacctaatacccctcaaaggaataaagatgatctgaaatctatgctgggtatgaatgggctcgggcctcaagagaaatacttggggaacccgttcttcttttcgggtaataagcgcagtgactttaagttcttgaaggagaagattgtatctcggcttgaggggtggaaggctaaaaatctctctcaagcgggtcgaactactctggttaactcggtccttcaaagtatcccgggttacttcatgtcaactgctctggttccaaagtcagtttctgaggatcttgatagattagtggcaaagttctggtggataggaaactcggaaaaacaa

SEQ ID NO: 78544 - DNA, 1051 bp, Cannabis sativa
gagaaaatggggtttaatcgatagaaagtaatggtttgactttgatggtcttcaaaatagtgcaaaaaataataaacttcaatggagatgcgggggatcgaaccccgtgcctctcgcatgcaaagcgagcgctctaccatttgagctacatccccaattttggtagtcgtcacctttaaatttaaattataagtgttttgaaacatttaatatataatacatttttctacacaacttttccaccgatggaaatattatattcattattgaaagaaacttggaacaatatatagttataaactatagcattgtggatagacttcgaattttggtaaaatcaactcaattgggacaaagtaaatgtatatatatatatattaatggcacgtttattgtgaaatattttgaatcagaataaattaatagaaaaatttaataaaataaattagaataatcagaattaatatttataatatgttatgtactaaaattatttagaaatagaataataatgatttatcttacttattttatcaagaaatataatcgaaatacttaaattaactaaattatctttttgagttaaactatagtatatggtagttattttgtgtagatatattttagagaataaaattatcactatatattattttatattaataaataaataaaaataaataaaattcattacccttaatgatattttttaaaaaattgatagaaaaatattctttttcttttatctcttatttaattaaattctctcattcttaattttaataaaataagtaaatgtaaataaataaatatcttactattgatttccattacatgcggtaaattcagtactcataaattatggtaaaatcaactcaataagtaaatggagattcagaatacttgttagtaaacaaaatcaataatcacataatttattaatggtgaaatcaagtccactgaaaaattataagcaaatggagatgcgggggatcgaaccccgtgcctctcgcatgcaaagcgagcgctctaccatttgagctacatcccc

SEQ ID NO: 78545 - DNA, 1242 bp, Cannabis sativa
attattttatttaattattaaaaagtaaaataaaaaaaaaattagtgtagtgttgtcttgtctacagtgcccacctaaatatggtgagacattgtagacaaactcaaaattgaggttacatataccgtgcggttggacttgttttttgtgtaatataacactattattaggtttttgcaggcccattggagttggccttatagttagagcactctcaactagtgctttataatagctaaaatgtaaaatttttaaagcatgatgctaaatattagctccatcaagtgaggtaaactcatctttattttagctcaaaattttgaactaaatctttcttcacatttaactacatgaatagtggttctttaaaaaaattttaatattattttgacttttctaatcacatcatatacatattacccatatatataatattttatttacatatatataatattttatttataaatatattatttaaatgaaattaaaaaagaaaaataaacaagttgttgtatgatgtaatggaaaagttttaaataaaataaaaaaaagtgaaattttgatgattattttaaagaataaagtagagaaattgttctgagtactcttagcagtttctttggaaattaattaatataccttacctattttccagccgaactttttcagttgcaaaattcaaacataggtagcataagtacgtgttactgtgtaaaattttaacattttttttaaataaaaattgagataatataggtatagttaaaggtaaaagtataacatttataatgtatgtaactaataacggttaaatatttaccaacatgtagtaaaaagtcttcaaaatttacaaatatatcaggaaaggtatatctttaatcaaaagaaagttagttgaataatttaatgtagaatctaattctgtatgaaatcaataaactttggaagcaattctttgcctacaaattaatttaagaatacatttatgaggacgaataaacgaatacttttagttaagtcatcaactactgttgcagtctagtctagggttgctaaaacaatgtgaatgttatggtctcagcttcaaattaacctttgtgcagttgctacgtattaagaatgggaaagttgcaattagaaacccactagaaacctaagcggatcaggctcacattatttttggagacaagagatgggttggattgggccgtaaatgggtttcacaataagtattaacat

SEQ ID NO: 78546 - DNA, 810 bp, Cannabis sativa
gttacaaggatttaaaagctacaacatctgccaagtgcaaagagaacaaaatttgttcacggatatgttgggtaagctggcaataaatcctgagattattgaacacatggtagtcccagttggccatttgaagagacccagtattgatgtctaggaggtaaatgctatagtggataactctcattcctagattgcacccatttacaaattcttgagtatagaggagcttcctacggatagggctgctttcaggaaaatccagtctcaagctccccgttacataatcatggaggcaaagttatacccccgaggactatcgatgccgtatttgaggtgcattgccagggcagaaattagtgctataatccatgaggttcatggaggctttttacagagatcacacttttggacccagtctttccaagaaaatccttcaataggggtacttttggcccacactgaagaaggattgcatagagtatgtaaaaaattatgaacaatgccaaagatacactaagattctgagagcaccacccactaaaatcacgcttatgagtagcccgtggcctttcgtagttggggaattaacctagtaggatccctcctcacaggcaaaggaggagtcaagtacgcgatagtcgcggttgattacttgaccaagtgggttgaggccgaactaatgaacactgtcacctcataaaatggccttggattttgttattaagaacattgtgtgtcagtacagactttcgtataaaattttcttagacaatggaaaatagttttacagtgagcacttcaccgacttct

SEQ ID NO: 78547 - DNA, 1022 bp, Cannabis sativa
taggatcataatcccacttattatctaactatcccataatataattataaatcataattacttaccattaggcttatcgggatgttacacttactatctttgctgcccctgataactcttttcccataacccctgaaaacttgcattatgttcctttctgggttcaaatctatggtatcccttttcgttgcaaatcttatgagttggctaagctcattaccacgggtgtaggtgatttgattgaagtggatatcaccactgtcaaggatggatctaggccttatttgagggtccagtttctcatagatgttaatagacccattaggagaggcattcatatttattttcttaaaatggggagggaatttactaaatggttggatttcaagtaagaaaggctctctgatttctgtttctattgtgagaaacttgatcgtaccaagaaatattgccacccttaccttcagaagtgtgatgaatcaattaccccacctgtttgcccttatgattttctcctgcgtggaaaagagaagccctctgagaagccttttcctttccaatatcctcatcatccagccattaccatagctgacttggacctttctgacttctctcagggggccaaatggtaaatccctttctcaattaatctgttagtttcactcctttgctcgagtatggcatcgttttcatgtattagtgctcccaagaactcccaaagtctcatgattcctactcctattaaccccaacatctccatgggtcgtatgtattttggtacatcatgtactagctcttcccctatatctcactcatctcatctggcctcgatttccactgattttgttataattagtgacaacccaactttaaccaaccctgaaatactgcatgctacccactcccttgcagaagctttaccctctctggctctgagtcagagtcaagctgataacaaacctctaggatcgatgtgttggaagttattttaccaggaacatagatctactcacaagtatgtt

SEQ ID NO: 78548 - DNA, 539 bp, Cannabis sativa
  modified_base (178)..(181): a, c, t, g, unknown or other
aaaaaaaaaaaaaatctaaaaccctaaaaatcaacgagaacaagtaaagaacttacctcaaggcttgaacaactcctagagttggttattttagctagaagatggatgaattgagatggaattactcagattttttattgggttcctagggcttcgagaagagagagagagagagagnnnnagagagagagagagagatgaagattatgggttgtaaaattcttattttgtgatttatctctttaattaacgtacctaataataatttaatataacttaataatattaaatctcttacttcaacctaaggcttttctagaaaatcaaatgaaacaaaaaaaaattagggatattactattctacccttaattcaaccaacatccaactttaaaacttagggatattttggtcaaaattatctaccccaataacccgacaacttaagcataccaacatattttcgtataatccaaaactcattctattaccgtcagggatggagctactcattaagttggagtggccagccctccccccc

SEQ ID NO: 78549 - DNA, 1219 bp, Cannabis sativa
ttctaaaagtgttttaatataaaaaatcctaaatcataaatctataaaacctttactaaattaaagaagaaaataatgataaaagatgagcggaagcattaacctgttggagattgcatagaaagttttgatcttccaagaatacactattttcttaggtattttctctgatgaggaaagagagaatacagaaacttaatgtttcgtggggaccactacctataatttagactcatcttagaatgagttttggatatttataattttgcccctcaacaaattttaaattaacttatggtatctacacattatttctatgacaatttaataccatttgatacccataacataattggtcacttaattttgtatcacactttataataacatatacattatatatatgtgcccacaataggattttaatctaacatcgagctggtatttgaggaaaggttttcatatgaaaaacttaattaaactcaagatggatataacagagctacattagaagtaatttaatgttattcttagcaatatgatattctctggcctagtaattaccaaaaagtgtggtactcaatggtctggaacagattaagcaccccaaaacactaatttatattaaggctagctgcattaagaagctccaaaaataaagatagattatttagatttggagtgagcactgatgttaaatgtttgatttgtggggataaagttgaatccctttctcacttgttttttcaatgtcatttaagtaaggaacttacaactttaattctaagttgaattggcattggctctcatcatattagacttgaagatttctcaaaatgaatcaaaaattacaggcattagattcaaaggagtgcctatactgctgccttgaatgccatagtcaatatggtgtggtgagtcccaaatgaagtgttacagaatttcaatgtatatactatatacacagctgtacacaaagttaaaaatgttattagttgtagattttcttatattaaagttgagaaaattagtgatatagataggaagtggttaaggaaaataatagaaaaggaaaatttgcctaattctttgtaaggagtatacttgactcttgtaaatgattgagttatgaaataaaaattcatcttacttactaaaaatatgtatacaaaaattaaaggattatttgttagttttatttttcaacaaaggttaaagt

SEQ ID NO: 78550 - DNA, 1757 bp, Cannabis sativa
aatatggtaggattgatttttactaacaatacacaaagttctacaataaatcacatttacattaggtatgcacattttctttgtcggaattgaccttgtgaatatttgtccttaatagggtgggaatttttcgtctaattaagaaataggacatggatttcatatttacatttgccaattatcacatcagcgatacgtgtataatttaacattaaaaaaaaaaaattagatattttttttaaaaaaatcattaaactaaagatcatttaatgattaaaaaattacgtaaaattaaatttaaaaaaataaattaccttttcaaattaattacatatatgctgttgacatgacatgataattaattgggtaagcagacatgtcatcattttatttgtcacgtcaaaacttgataaaatgactaatttataatagtattgtgaatagttcaatgagcatttttaacgggctgaaaagttaaggagacacaataatgtataggtcataatttgaggacaaaaatcccgaatagccaataaataatatataatatttttaatttttatgtaatataataattttgtacatttaaatttttaaattaaattttatttttacgttaggagatttttcgtctcgtctccaataaaaaataagcgaaaatacatgggattaaaatccttaacaagaatagaaacagaaaaacactcccctcaattccttactccgtggacattcttacataccatataaataaataaacaataaacaaacattttcttacatatatatataattaatgttagattaataataatttactctaaaatttgtccttttcatagatcatataatcatataataatttgaaaaataacttttaaccaccaaacattttattttctattctaaatttcacaaagtacatagtttttgtaaggtaattattacattattatattaatctttgtctagcatagcatattaaatttaaacatatatataattgtgatttgcttgtgtaaaaaatggggtccacacatagagtaaaccaggctaaaagcaagcaaagcacatcacctaacatgtatataaatatatgtgtttgcaatttccagctagagctagctttttctagctcatatatcaaaataattattggtacatattttgacaaaaaaattacttaatatcaattacaagtttaacatttgttataattaataacattagattaggaaggaaaaaacaatgtcttttaataattatcacatattatgttatgattgatattcaaacctttttatgtttagttgttagtttttaataattgtactaacatgatcatgataatctaaacaactaatcaaaactcatatgattgtgattataatttctctaattaaagaagagaaaatgcacaaaaaggagataccattttggttaaagtgttacaatgtttgatatatcataattatggattagaactagtggtgttttgggtgtttgctagctttaattaggttataatatatatgggttaaagtcaagctaagacaaatgtgttcatgctcatatatatataaaatatacaaatatatatagaagatatgtggatgacctacaatttgtagctggttccaattacaaattaagcaatatatacttaggaattttattccttatattaggattctcagatcctttggcggctactccattaacatttaattcaagaaataaatacattatatatataa

SEQ ID NO: 78551 - DNA, 503 bp, Cannabis sativa
ataggatacacgtgtcaaatttcatgtgtaccctatgccgtcggttattttctaataaccgacggcataggcttctcaaaataaactccccattgtcaaatttcctaccgactctaaatggtattatccaattctatacctactgtttttataaaaaaaaaaatcgcctctaaagattaattttcaatatataggcgagcatttttacaccttttagcttccttattatgaaacttgttgaaaaagcagtctctaaagggttattttgtagtagtgttagctaaattaataaagaattattcgtgaattttttttatatagatataggcctggttctcgatatagacgagttagacttgtgtttgggctgacttaatttaggagccaaaaaaaaaaattctttttaaaaatatatatatattttttttactgatttcatatttttttttctagataaaactctatatttttttttattggctaaatatcattagtgtcaagtg

SEQ ID NO: 78552 - DNA, 1805 bp, Cannabis sativa
taacaaatgaaaatgaagtctaagctattcatatacacaaatgtttgaccaaaaatttaccttggaatgtcacaaccttgtggttgccatctccatttcatgtaacctttatctggtctcccattactctcacaattgaacccttcatctatgaaaggacaagaagtatttgtatataatggatagctttcatcgaaaacccattttcctcttctaacatcacaatctcttgcacttgaaattaaagccttccttaatacagtttctttactcttcttctcctccacgataatctcaacttttttggatgaagtttctgtaacattttcatctcttgaaacttcacttcgcactattggcggtggtgagttttcagttaaggattccttatcttcgtcttctttttctaccactttggattcgctgctctctttctctagaacaccaataactgaaatcccagaaaacccagaaacatttacaggtttactcaactgggtatcaatcaaaagagggtcttgaacaccacttactactgaagtatcttcattttcttcaccatcttccaccacttcggattcattattctcttcctctagaccaccaataactgaaatccctgaccagtcagaatcattttcatgtttactgaactgggtgtgaatcaaaattgaaccttgaacaccacttactactgaagaacttcgattgaaaccagtaagagattgagcagttaagagagaagaagcattgaactgaagatgggtctgctgaaaaactgaaggggtgagttggataacccaaatggaaaataataccatgaagataatagaagaacagattgtcaaagaaaaaactaataatcttttgggtttgaaggagaaacttctctgcctatccatacccaaaacttctttcattgggtttggaaaaaagaagagacacacagagacgaaaaagaaaagtcaaggagattggttgagaatcttattatactagtaaatggtatgcatgttaatgattgattgatgccagataatgaagaacaattcttaaagaagagtagaacatgtgaacttgtgatataaagcgtgtagtttgatttatttaccaaatatacccgtaagttgcaataatcgctgtggaatagtaaagtataaatgtgcatttacttttctgacctttattcatgaaacacagaatgcttggcttccttttatttatttattctgataaccaaaatgcttggcttccttcactagttcgtgtgtggttctattctgtgtcatatcctctttcacatccagttatcaaaaaatatatataaatataataattcaaattttaatttgaaaatgtatttataaccggatagtggttacaaatataaatttattagtaactatatccgtttttaatgttttttggtttaaaatttaaggtcccatttggccatttctattataccatctctttcacaccttaccagacctacatatagagaattagagtagtaatggtgcttagcacctttactagtgtcatactgctattggtgtaattaaatagcaagtcctatataacttaaaaaaataaattttaaagaatatcgctaactaataataaggtgacacctatggatggtgctggacaccattagaacccaataacaatgctctatatcataatatcctgagactgagactcccagccatatagttaactttagggataattgcggcaaaagtccccaaaaacttaaggttaatgcaggttagtccccaacctcgaaaattggcggtaat

SEQ ID NO: 78553 - DNA, 1109 bp, Cannabis sativa
  modified_base (49)..(69): a, c, t, g, unknown or other
tgcaacataaaatgatttctaatcttttattaattagtaaatatgattnnnnnnnnnnnnnnnnnnnnnagggcacaaaacccaacaagttcttggtctcaaaggatgcaggaaaagtttcaagctctaaaaggtttaaagtttgaaaagttaaaaaattaggaaatgagtgaaaagttgtaattggacttcgtcaagcatatttataccaacaagaagcaatccacgtgaaagagaacagagagtctatgattagacttctagaaacacaagttgcatttaacggtcaggaggttccacgatccacgcgtatcctcacaattaatgttcccctagattgaggcgcagagacccttttcaatttttgcgccaagaagtgaacagtcgtaaaaaaaatatagttgtttctagaaaacgactcctcgatggttgcgcccttccatcctcacgcgattaacacgtggatgtattatcatcacagaaggaagccaccttttgcagtcgagtagcattcaaaatgtcatgattttattcctcagcctccacatgtccatattaaaagagtgatgcaagcttcccccatacacaacattctagaagcttgggggtaaatgttatccgtatttctgccattggacacgtagaatccaggtcagcatccaaggcccatcagtgggaccctcaacaaaggtaaagtgggctaagcccacttagataagtccttcccggaacgtatcctagttccacaatcgcaaagcctttcgcccttagtatgtcatacctggaagcatgtctggtaccacgagactggaaggataagactacgcgttcccagaagacccttctaatttcccattttattcttgcatccaaataagaaaattccaattgccagatcgtaacagagtattgtatcaggattaatggagaaacttcctatagtgaatattatgcaattaagtcataggttaattgcccacaattagtgcacatagtgttgaccaaatcaatccaaatttgatttgcctagtcagtagatcatcttcttcatgggctggacttcatgagatagcctaagtgtattatttactgtaaactctccaatagag

SEQ ID NO: 78554 - DNA, 565 bp, Cannabis sativa
attttggttccaaagccctattttacaaaaataccacaaaaagttccaagttgggaacttgtaccttgttttgaaatattttatggattttactaaaaggcctagatatagttgcaaaatttaataaagaaaattacattgtaaatctaatttttttttatctatcttaatttttacattcatttctatattatttaagatatacctacttttgtagatgatgtcctcattataccctttaggttaatgtaaattatatgctagacttaaatagaggataatggtatattaggcaacctactcacaaaagtaagtgcattttaataaaatataatataagggtatttttttattaatggatacataaaaagtatttctcaacttatcccaatttaatacttcgtctagatttttacataattaacaagtgaggattatctcttaaaataataaattaatataaaaggaaattggtacaaggaatgatgttagacttttataaataatggaataaccttgcacttttaataaatggaacatgaaaattcctaaggttttgaacgta

SEQ ID NO: 78555 - DNA, 631 bp, Cannabis sativa
ataaatcttaatttttacttgtatattgaaaaaggtaaaaaaagaaaaacaagctaaagaaaaataaatttttttgtccgtaaaatacaaaagatcaattcgttcttgatgatgctgaagtgcttgcaccaccgaaaaaatatctatcttgacaattattgttggttgtggcagttttcacttaatctagctcaaaacttccttaagctcaataatttttacaacttttgggtgaacagagtttttagatttaaaaaaaataaaactcaactacataaaaatgattagagaatggagtttcctactttttttgcttttttttttttttttgaataaaaggttgaatttattaacacaaacgatcaaccattgcaattgtttgtaaattagcgggagcatcaaactcataaaaaatgcaatctaacataaacaagactctcgaacaattcaatgagcaaccttatttacagattgtttgacagaaaataatgaaacattattcaaaaacactattaattttttattattttataaaaattaattcatatttaataaatttaaattataaaaaatattaaaataatcaaatactaactaaaataaaaaccatgattagagtaataataataaa

SEQ ID NO: 78556 - DNA, 782 bp, Cannabis sativa
tctctctctccttcccttcgagccctagaagccagctgaagtattagggatttttaatctcaattcaaggttttgctagctggattaaccaagttaagagtttgatcaagcattaaggtaacttttcactagatatatttgatttcttaggttttaggttgagttttgatggggttttcatatgaattcgggttgtggatgatgtttgagttcagagtatatttataggtttaatttaaggttgtttaagtatatttgtgatattcttgtgagatgttatgtttaaatttggcaaaattgagtttatgaactcaaggttcactcaagcatggtgattttattatcttgatgtattactgcattttgatgcttggtacatgttatttttatgatattaaactattttggagctgttgattaggtttggaagagatttggttgggttttcgagcaacaaacctgagttttcccgtttctgcagcagggaaaaccggttaacccgtttcacaggcatagtgaaaccggtcaaccggttttggcagcagggggaaactctagttttaggcttcgaaactggttttgatcggggtgtttcccagagcttagaataggatatttaatgatatttaagttatttcgaaccagtggagagttagatatgtctggttacgaagttagggttattttaaagtttgtaataagttgtttattgagctttgttatcgtgacatatataggacccgggatcatcgagggtagttccactcagatcggcccgcaca

SEQ ID NO: 78557 - DNA, 1971 bp, Cannabis sativa
ataattgtttattatccttctttattttattttaatatgaatttagctgtcttttttaatttttatttttgagggagaaaaaaaaaacaattttagtaatcttttaggggtagaggttttggactttagcgaggcttaaaagcggtcccccagtgttgtgtatgtatatagggcccaccacgcacactgtacacgcgtcaaacgcacagcaacctatccctacttgctttgtgttttttttttcttgaactttaaattttattttgtatctacctttaacgaagattcgcaccctccgaagttggggcccacgcgcccgagcaatcaaacacaccataccctcctttttcgttttaggcatgtaattccacgaattgaaggggcccacgtgtcatcaaagtcaagaaagtagccaatcgatggagagccccgactatctccgcaaccgcctttttctttaaatgcggatatatctccgagcttgtcgctgtcggctaaaatgattggacacgtgtcgcactctcgttgcctttcccaaactgccccgctcggcccccggcccgactttgagccacatatatatagtaagtaattctccctacatccctttctgggaaaatgaccgttttgcccttctctttcttttccaagttcgtagttgaggagactctgttaacaacacaagcctgtcagttttgtactgggccaagagtatttttattacgtggcgtcttttaattggctttcagttatgaacgggcgtaatatgattggtctaaacggtgttattttttatttgtatacttttttggggttgcgtgcagtgatgaggaatgaggaaagtgacgtcagctttacgtagtgtccgcatcttcacaacgacaaaaatccagagtgatatcatagaaattttagacaatgatgacaaaaaaaagagaatggagagaattaccacgcgcaacatagcgcgtgtggtatgagtacttgcagtgccgtggtgtttatttatttatttatttgtttatatttcgatggcaattgagaatagagtcttgcggagttttttatctgcatggtacttatttaatgcctaatcgaaaattttcaagtccataactttttttacggaaatttattaaacacatgcaaaaatatgttaataaaggtgcataacttaattttgcatgcactcatgaactagtttaagatggaggattttctattttttccttttccatgtactcaacattaatattttttaataaaaaattattcattgttcaaaaaaattaataattaattcacgtattaaacacatataaaaaatatattattattctatttaaaactaaaaatactcatctcatttcaacttccacattctctttcatgttcctctcattctctataatctctctcataaactcaccagtcaccgctactcaccacctcacacttctcattctcttgctctctgtttgggcagttcctaaactatatgtatatagtttgtttttaacagatctacacaatagctttcgtatttcgttgatttttttgtccaaatattgaattttgaattttttgcatttttttagttttccagtttcttgagataatttgctatattaagcgatgtatttacaataatagaccaaatttgaggttagggatgaaatctagcaaaattttgcatatttatagcgatgtatttatgatataaggctaaaaaatataaagcacatcgttaaacatcactaatcatcgtaaaaaattgagtgtgatttagagatatttagaaatatgtttagcgatatcgcaaaaaatataaaattaaccagaaaaaaatatagaaaacgagcgatgggctgagaactttgatgatgggtagggattttggtggtttcgcagtggttaagctcgttgatttcgaggttttggggtgaagacatcgagagagagagagagaga

SEQ ID NO: 78558 - DNA, 874 bp, Cannabis sativa
acctttaagttggggtgagaggccacaccgtttgctacagagctcttggaccaagtggctgggaacgcctctaaactgcccatggagacctaggcatcttttagtagcgcagatgcttttgcactagcccattttgccaaccgacagaatggttgggtaagacttcgagatgattaccttcattttttctttttatttgtgtctgtttgccctttcccttgttctggcagttcagctttctaactaagcctattttgacaggtggccctattggcagttggctgttgaggagactattatgatggtgacggagttggaacaggtcaaggcaactaactgcgacctgtgtgccaccaaagagactttccgggccaagcttactgacaccaggtttcaaattgggggcctatagtaggccaactagtagctggaggaggagaatgcacgccaggcctacttcatacggagtatgaaggccgttcacgacctttatatggagactgtggtgcagatatccggcgcaggtttatcccctcggtcaggcagcatcaaatcttgaatctccaacaggcctcgtttgaaaaaaaaaaattctttgttgcttcttcttcttctttttttgtatccttacttttctgtctgcgaagacaattaatattttaccatggtcgcggggagcttttaatagtgaaataggttctttctttttgttgttcctttcttggagatttgttgtagcagactgtctaggggttggttgcgttactgaagcacctggttctaatggccagtgcttcaacctttttccctttagtagacagaaaagctatgcagatccaaagcatagagatgttgaattccagattggggattt

SEQ ID NO: 78559 - DNA, 661 bp, Cannabis sativa
aagcttctctatttaactccattagataaacagtttcttttcaaaaagatgaacaatttagtacatgttacatgattttagaattgtaccattccaaataacctcctcatatagccctaaagatatagaggccttaatactatgactgatatccaaaagagaagagtaatcactgcatgaaagtgttgatttcttaactaccccttctaaatcaatttccacctgcttaatatgaatcttaaccgttacacactaggttggtgagagttttaatgccaaagcttcaatagtaactgaatctacaaatcttggtattgggataacacaatcagcaataactcttactttgtcatttatagccacaacttcagcaccaatcttatctaggagtgtttgttggtcgattatgctatattttttcaacccaatgtagagagtgggtcacaaaaatttaagtgtgacccgcctaattaaagaaaaaaatgatttgcctaataggttagtctgtttggttagaccgcccaaaccgaccactaatacattatttttcaaattcaatttctatattttaattaattgtgataatgagacaaatatatatagtataaattcaaagtcaaattaactactgttgcccctgatttcgcccaaaatacgtgga

SEQ ID NO: 78560 - DNA, 592 bp, Cannabis sativa
caaaattatcaagatgctatggccatttctaaatgggcaggataccctgatttatttcttactttcacttgcaatacaaagtggccagaaataaatgatatgatcaatttataaagtttttgatatcatataaagtttttgatataaagtgagccaattaatgtacgatctcaaaatagaacaactgtttagaaaaataatctcacgtaagtttttatattggaattcacaacaaaatcaactgatattttcttataaaaatgtatttcgaaaaattatttcactgttggttccaacaattctcaattttaatatttcctcaatgatatatatacacaattgagttccaaaaaaaggatttccacatgcacatatactacttttcttgcattcaacattgaaaaagtctttaacagaacataaagaaaaataataagtgcaaaaatcttagactcaaatattgatcctgatggttgtaatgttgttaacaaattgattctgtcgtggtgataggagcacactcgagtcgttcaagttattagtaggtgttacttgaacatggggatccactgcgccattgggtcacattgct

SEQ ID NO: 78561 - DNA, 588 bp, Cannabis sativa
tcgtaagtccacctcgggttatagcatatttcttggtgctaatctgattagctcgtgttctaagaagcaattcgttgttgccaaatcgagcacagagtctgaatatcgtgccctcgctttggctacatctgagctaatatggatacaatccataatcacttagttgtctctgttcctgccatgttgtcatgtgctatggtgtgataatcttggagctggttctttagcctcaattccaatgttccacacacacaaaacatattaagatcgatcttcatttcattcgggatcgagttctagcaaaccaacatgatgtgcattatgcggaaactgagtttcaagtcgcgacatttttaccaaacctttaccagtttctaacttcacctattttagagacaagttgacacttggtgttcacctatgtcacttgaggggggctattggaaatagagaaataggtgattcaacacaattagaaaatcagttaagcattcaacaaacaaattgtaacggtttggactttgacagctcacattgagctgcatcatttttctgttgtaaaattctgcttataaataaagtttctct

SEQ ID NO: 78562 - DNA, 597 bp, Cannabis sativa
tgtgaaacgagagtattcacataatttatctgacttttagattattaatcgatgcaaattacatgctgttttatttgagagatacagtaattgatatataatttagaacttttatgatttgaaagagtttaaattatattataatctatcatcacttgagaagaaaaataatagttaaataacattaataatttgataattgaatcaactaaaattatattgttaatttcacatccataattaaatacatttaattaatttctttagttttctattatataactttacaaccaaataaaaatataggtctaatttagttagcaatcaatataaattttgtgggttcaatctcatctgtgtgagctaaattttgtaattatttcacctttctcttctctattttgaacaaatgagcattataactcatttcacgtgagcgctctaaataacaagtatgtaaaagacacaagaattatagtaattcaataaattttgatatgcttagtctactttagaaagatagattgtgattaatttattcttaattatctgatcatccctttatataatcacttagttatataaccgattagtcag

SEQ ID NO: 78563 - DNA, 1309 bp, Cannabis sativa
ttgagtgttcgtgcggatttgcttactttattacaattttctttttctctcttttttttttcttttaaaaaaaattatttactttttttagaatcttatttaattaagagaatctttggctggaaagattaagaattttggaaaatattaagaaaagagcagtggtcgacttgactccattacacttgttactgggaatttttattcctcttctattccttcttgaaagaaaaatgaaaaaaaaaaaaaaaatgaaaaaatgaccaactctagtctcaaatcagacaagacaaaacagatgtaaaaataatattaaaggtttgtgataaattaaatgggcagttcaaagctacatatactaagatgaagtccacgtacggtggaccaaggaatccactaaacaaacaacaccatgttaattaacataactttaggacttttgggcttattgaattatccgatttgtactaaatactaattttatattttggattaaatctaatttgcatatcggctcaaattcaattcaatccaatacacgaaattgtagattaaattggttattttaaattaattaccttttaatattaaattatttaatatttatttaaaaatatttttcttcacttaactaacaataaaataaaacaaattattattttatatctctaataaaaaattaaaataaataaaacaaaaaataaaaaaaaaattaaaacatttagattatattttccttataaataataataaaatatacatttgatctcctatattttgaaatatatttctatattatgtattagattttaaattattatttttgacattaaaatattaattgtgtatataatttatttttaaatatatatgtatatacaaatatgtgtagattagatttgatcggttacttttatatatcaattattaacattcaatccgcacaagtataaattttagaattttcaatccgcactttgcgaattagattggattagatcgcacggattagattgaattaagtattttatgaacacccctattctctttggtgtatgtagcatagactaaccacgtagaaatgtatagatattaattacaacatatatttattattaaatgtgacatttaccaaaataatgttagttttggtattattatgctacttacttaatagatgttaaggatctactatatttgtatttagtacgttagtcattaaatatagggtctttttcatttttacatttttaaatattttttttctttgcatttttacggaattttatatagaaacccctattgcaac

SEQ ID NO: 78564 - DNA, 1308 bp, Cannabis sativa
  modified_base (1248)..(1252): a, c, t, g, unknown or other
tgtatctctacttgtataaatagttatcggccaatgatcctaataaaattgactcgtggactaaggatagttaacgcttgaaccacgtaaaaaatctcttctttgttattttgctatttactccattattactttcttaagctcaaaaatatttagttgctgaaaaactcggtaaacattttggtactttcattgagagctgatgaaaaagatatgcacgacagttacgaatgcgagcccgttgaaaagagaactcgtgcaagaaaagaaggaagtcctccaaatcttttattgagtccagccgagggccagtatgtgtagatcggaggagttgcccagaaaaatacccgatgtcttcatccacatgagaaaaatagcaaagacaaatgcatgtgatccgaaaacacctattgtaccgatattcgtccttcaaagctcagatctggccagccaactccatgtaagggtcaccagccaccgctatcttcagacccgtgtttcttgccagtcactaaggcataaccacatagagacgatgaggtgaaacaggtgttggggccagacaaagaagttgcgacccaacgcagttacgacaactaactcaagaggggttgtcaggtgtaaggactctatccagctcaagactctgatgctggtgctaacacaagggccagatctgttgaccgagaactacctcccctacctttgtcttaggtggcaaagttgttcaaaaattgatcctctaatggcagtggctgagaggagaccatcagtaccatcgacgtctgctgggcaaccagtgaggcctggttatggtattgttggtggaagcgggccattttaggcacactttgctcaggaggtttcagttgcttgatgtgactacaaccccagagttacaccagagaaagtaacttgagacattataaaccattcaagaattccctaccggtccactacttatcttattgggagtccgagctttcacttcagaagccaattagatgctctccactaaattagaggaaagagactgctaggagatcttggggcgcatgcatacaacccctaaagcttcccgaagctcaggagatgcatgcgcatcgctatctgagcgttaaagattgctgggtgtactagacgtcaattgggttttgtaccctaaataaaacccatgtcaatataatcatatttactaattaatgtaagataagaaatcacttttatgtgcatggttcacatgatttnnnnnatgattatatttaatgtataaattctattatgtccagaacatatttatttgtacat

SEQ ID NO: 78565 - DNA, 879 bp, Cannabis sativa
actctttagctaaaataaggagtgaaacttgaaaaattgaactccaaccataaaaaaaaataactctttataatatagaatcgataaaaaaactttctaaatatagagagctccttattattttactaaattttcttaataatattttaatcaacaacactattacatttttattattttacaaaattaatttatatttgaaaaattaaaattataaaatattattaaaataatcaaatactaactatagtagagagcatggttagagcaacaacaataaaaataactctctattttaatttttgtagatattttagctaaacaaataaagaataatatcgatggtaatcaaacaatcaaataactttctaaaaaatggtatataatgagtgattattaactttggtaagacgactcacaagctgtaaaactttaaagaaccatactaaaaatacactacagtagatgctctaaactctttttctattttaaagtttctttaaagtttactattcacactctacacttatagaatattatttattgctctaaatatattttattaattgttttttttttaataataattttttgtgtggggatgtgtgtacatattaatattatatatttgaaataaataaaatataataaaaatttaaaaaagtaaggttttggtgatatattttaaagaagtcgatacataatgtagtgttaaagtgtactgtaaaataaaaaaattgatgtattctttagaatagagtagaaatgttgttcggagtgctctaagaggcatatattatttgactatagataatattaatggatttaaaatgcaagagaggcttacttcgaaaaaaaaaaaaagaaaaaaagtttttt

SEQ ID NO: 78566 - DNA, 4658 bp, Cannabis sativa
aatagcaatattacatatcacaatgagtgctaaataccataagtatcttctaacatttctataatataagggggtttttggaaatagactgaccaggaattaagcagggagaagtatattaatattttaattaatttgtcaactgtctctgtgttttgataatataaaataagactttttataaaatgaagtaatcgtttacgtttctcattaataaattttttggtgatgatcagaaaaagagacgttttatcatcatgattatatatctgatcatcgtctccattggttattcttttcttttctataagatatagggttggttgtttaaacatatacaaaactctataaccctacccaataagcaataactacgtacccttattctttaacgtaatataatttaatatttttgtgaaaaagaaacatgcaatgggattggaagaagactaaacaacaaattagttgaacaaagcggtgcactctcatgttgttctgtcttttgtatcgagtaattaattgtgtgcatattcatgttttagttttttgtttattttgtttctcgttttactttccaatgaataatgatgttttataaatgagaatggctaaagagcattatacatagtactctttttagggtattattattgctgttggtataattaagtaatgggtctatgtaacttaaaaatataaattttaaaaaataacattaacaaatcataaaacacacctatatagaaggtactgagtatactagtacctaataacaatgctctttatatatattacacttgtctgttgtgatgtttggtttttggtggtttttattgggattttcccattgatgtttggttcttgttgtttggtttacacctctttataattggtgcatgttctagttgtttggtaattttttactacaaaaaattttaattttactcatgataaaatttataattaaaaatgaaaaattataactaattataaatcattatttttatagctaaaaagtctgcatctaataatgtattagttacaaaattataatttattgtgactaaatgtaattttaatcacagtacttgttgtgactaaaactaaattagtgacatcttatatctaaatatactatattttagtaacaagtaacattttattgtgacaaataatatttagtcacaaaaaatttatgttgtaactaaaatattatcactaaaagtaattttttttgtactatttttatgagatttgtgccactctattttcgtgtgaccttagaacatgatccctttaccccttaaaatgaatttatttttttaaaataaaataaaaataattaatataaaatttgcataattagggatgataacaaaatactcaattcaatccaatccgcatagtgaggatttccatactcgtgcggattagattgaattgtaaaatctaaaatttgcatgtgcagattatattaattgacatataaaagtatctgatcgatccaattcacatatatttatgcatatatttttttaaaaaaattatatataaatttcatattttaatataaaagatatacaaatatatttcaaaatttagtagatcaaatataaagtaataatatttaacttttatcttcgctattgactatgtggaaactgattgcttgttgcttgttaatgcattgaaagggcgtacatcaccatattcggtttttcatgatctggttcaagatgtatcatatcatttatcctctctctctcatgcttgtttatcttatattaaacgggatgctatataactaagttgtttggctaaacaagctttacagttggatagtgattgtatttggttagaagagatacctattataccatcttctctgttgttgtaaatgattgtgtttgatttataataacagacttttttcaaaaaaaaaaaaggatagtgttttcattcaaaaaattaaatagtactttccttgaattttaaaactttattattattgctgttaatatattttgctaacattttgatattttttaatttttcttaaaattttaaatattattttttatttattttttccaaattattattatacttttttagaattttaaattaaacatcttacgtaacactaagctagtatataattaattaggataattacatattaatacactattttttgtaaattttttacatttttacattcaaagattttttttttaatatatttataatatttgacaaaaataacaccaaaacaacaagaacattacataaacgtaacagaaaaataacatcaaaacaacaaaaaataatatacaaataataaaaattcaacaacaaatgaataataatacaacataaaatatattaaaagaccgtattttttgaaaataaaatcataaaaatcgtaaaatattttaaaattttatataatcgtatttatgtctttattattattatttttgtgtatttgtaaaataatccttataaattaatatatgactagagagagagaggttatcatagtccttgcaaatgctaattaagctttgtcaatgtatgggccattttatattactaattattaaaattttaatatcgccattgaatccataaaaaacgattcagagaaatgacgcttacatgcttgtattatattcattgttgtatattttattaactagcatgaattaatataatttatatataatacttttaacaacaataaaaattataaatgtaatattttatttctttctattctattttttctaatatatgcatatataatatagggacacgattttgtcccgtgatgtactttcacggaatatactccgtggtatattagatgggtctcggggtacattaaataagtgtcagggtacgtttctactttttaaccccaattacccctagatcaatctcagccgtcagatcaaataattaatctctcatctgacggctgctgtacatcacggaatgcactccttgaaagtacaatcacgagacaaaattatattctatataatatataggataaatctagagtataaattttttggtagatacttatttatttccacaataactatttaatttaatttttttcattaacgtgtataaataatattataattatttaagatattatttataaatttttagaaaaattttatataatttacaatgccgaaaataagatttacatattttattattcgtatgattattttttcctgataaacatggtaagtaattatttaaattttatttttagtgtgcaaaattttttaagaatttacaaatactaagtaattataatatatatgataaaaaataaactaaatttgttttaaatgctaagtagtctacataaatttcctatattatagacaaatcattgatatatatatatatatttttaattggcatggttttattagaaagtaatagttgacgaaatggtgtacaatattgaattgaagagcattattgattgactaaataatatcaattaaaacacgtagcaattaggtactaaattaataaggcggcttcttcaataacaaaaatataataaggcggctgggatatatacataagattatattataatttaatgtaatttaatttatctcttatatgctcgggaatcgatcgtttgtttatgtattatatttttgtgtttgaatatgattttatttttttctaagttttgtgggaagcatatcggtggttgatatgataaaagagactagtaatatcattcttatttatgtaattaagtataggtactacataacttaatatagagaaatattaaaatgaattactgatatttaacattttcttcaatatcgtattattattgatataattaagtatcggattccatataacttaaaataataacttttaaagaatatcgctaagattggctggattgagattgtcaaaaattgtgggagctaacacgatacaaattgcagtgactctgtgttggttgttaatgaagtacttggggaataccaaaactcacagaaatgatggcttcttatatcacagttgcaagagaaatgctccaggaattcaagagttacaaaattgagcaaatcccgagggaaaagaatgcccatgtagattgcctagcaaagttagcttcaaacaaagaagttaagaaactgggggtgattcccattgagtatctcctgaagcccagtatcatggccaaggcaaaggttgcaatcaagagcctagttggatggactccattgtgaattacttgactaaaaagcacaagacagggtggcttcctggaaagttcaataccaggccccccaatacctcatgattgatggcattctataccagtggggtttaagtatgcctaacatgaggtgtgtttcaaatcccgaagctaaacaaataatggaagagattcataaaggattatgtggggacctcactaggagtccaagcttgtccaaaaagatcctgagacatggatatttctagcccactatgaagaaagaatgtactgattacatcagtaagtgtgacccttgtcaaagatttgaaaacattccaagtgccctctgaatgagatcacattgatgacaagctcatggccatttgca

SEQ ID NO: 78567 - DNA, 558 bp, Cannabis sativa
atatgttcaaaagtttaattctcgtgatttgtcagttcattaaatttagactaggactgaatatttcgagcgggttcgacccggacccgggcaacccgcaaagcctttttaagaaaaaatattcaaaccgactcggtcaacccgcaaattttttttaagaaaaaatattcggacgggtcgtgttcaacccggtacccttcgtgcgtgtttgcgggttaagtttttaggaccaccgggttttgggttgaacccgaacccgcccgccaacccgcatatttcatatattatatatatttttttattacatattatatattaattaaaaaataaaaagaattaaaaataaaactaaaaactaaaaaaccctaaacttccctttaccttttactatggatatggatgtattttgaaatattttagttttcacttttatcatgattcatacatgaagatgacatttgatttgatgaacaagttgtttgttggttggattgattaatgcttcttttctacaatagttgatttgatgaacaagttgttatattatatatgtttaat

SEQ ID NO: 78568 - DNA, 580 bp, Cannabis sativa
ataataatataattcctcaattatacataattatctagttagggttttgctaatccattcttaattccagggtattacaaagcaatcaacgattccaagtcgatccatagccttcatcacgtgaaaccgatccgacttacgatttttctctgggaggtactgtttaaaaagtttcgtagttgagggtctgttttgataagatcatacggcaatcttccgtgtacgacactaaaaaattccaaggaagaagaaaacaaaaatgttatgttacatgaaagggtatagggactaattagtaattgttagtattgtctagttagtataaatatgtaatactattacacaaatggaaaagaaatgaaaagagagaaaattaggattattcctattggagtttggcactgattcgaagcgtacaattcgatacaatcggtaattgtatcattggtgttttcattaagagcatctcagagagagatttcagtgagagatcggtactatgactgatgaagagcttgttgaattcgttagatccatgatgagttctatggaactacgtatggagcaacgtttcaaggct

SEQ ID NO: 78569 - DNA, 714 bp, Cannabis sativa
ggttgggatctcttttacactttagagagaaagaaaacctctgatatactgaaattgtacagccgaaaaagactttgactgattaggtttttacaaaaaaaaaaatgtatatgccatacaaaggcccaataataaaatgggttgagatgtattgggcctaaactaagtcttattacacccctcacaagatgacctatataaattttttaggttcatcttggttacaagtgtacaaaaataagtaggaaatagaagctttataaaaatgatagcgatgttgtttttggtggtgacatgagttagcttcagtgtgccttcttagtccttctcctagacaacatggcagtcaatctcaatatactttgttcattcatggaatatatggttctcaaaaatgtggatggcgtacaataaagaatggcggctatattatcacaataaaagatggcgagatctttgtggtggatgccaaagtcctcaaagagggctaagaaccaggtaatctcacatgtggcattggccatagcccagtattttgcttcagaggatgatgaatggtggactgctttttagatttctaagagattaaggatctgccaaggaagacacagcatacagaaatagaccttcgagtgtcactacaagaaccccaatcaacatccagaaaaatcttaaaatgaaagtttgtgctggacatattagttttagcttaag

SEQ ID NO: 78570 - DNA, 990 bp, Cannabis sativa
aaaattttgggcattttttttttttacccttttaaacttttttttttttttttttttttgagtaatagaggctgagaagataaaacaaccgaaaaaacagccagcctaggaggactgaaaaaaaaacagtccctaatcttcatctcgcaacctgagggcttgctttgctagggagtgcgcttgagcattgtgttggcgtggggtatgcagcaaagaagcttcagggaatctggagaggaaggttctgatctggtgaacaagagacgacagaggagaattgtcttgccaattcccatttacctttgtaacaaggttgaggcagtccgagaaaatataatcgggcttcaaatttaaggctagacaccactgtattccttcagcaagggcttgggcttcggcaaaaataggagatggtgtccctgacttagtgagacttgcagattgaaaaatgtgggagacaccattcatgaagactaagccaaaaccagtgattgaagcagtttgattgagggcagcatctacaaaaagagcagtggttgacggggccaaaatctgatctggagctgcagaaaaagagcttctagaggtagtggagacaatgggggaaagttgcgccgcttgataatcctgcagaaagcttgaaacatattcctggacatttgtacataagttttgcctttgaaaaatatgagcatttctggtattccatatttgccagatgattccaataagtaagggaagttggtctttaggaattgaatcaatgctaagaatgtaaaaatctctgatatcaagcctactattgtcagcaaagaattgtttaaactgagactgatgccagatggtcttcactctgggacagtgaataagagcatgggaaaccgtctcaattccacccccacaacgagagcaacaagcactgggaatagcatgcttatggaaaaggttgagagcacaagggagaaggtggttaaaagctttccaggtgaa

SEQ ID NO: 78571 - DNA, 763 bp, Cannabis sativa
tatttattctcccgccccgcctcaaacatgacatttaaactcatatcagtcctcgcctcacctccaaaatttgattcctgccccgccccattagagtcaagtatacccgaactgcgggtataattgttatctctatttatagtctcaaaaaaggagctcaattttcaattaaatactttttatgtcgttttattgtattttcatagcaaaacgacgccaataatagaggttggattgaaagttttgtttggacacaaagcagaaaacacgtgaaagtaaatatgtaatattgtttaaaacacgtgaaaattttgcatgcatgagttttcaccaaacatagtttttattttattttcttataatttcttacaaaaaataatactattttataaaaataaaaataaaaactattttttcgcctataatcaattttattaacgcctgtaattttgtccaataattctatatttcttaacaactactctaatttcttctatttgtatcataattaattattttaattattttttctcaatttaataaaaatgaaatggtgtcattttcaattaactaactaatcaaggaccttttacagtcacgaaaccttatcttattttatatatatattagctaaaaacaatattcaattattgttcacatgtgacctgtgaataataaacaattttttttaaggggaataaatgattttaatttttttaaaaattatttaatttagattaaatcagatttagaatgtgctcac

SEQ ID NO: 78572 - DNA, 861 bp, Cannabis sativa
attaatttaaatgaatttacaacttaggtactgtaattatattttttttgctttcatgtaaaaattaactgcactatattatatacagctttgggatctaaaacatgaccattcaaaagtcccagccagtgatgacgtcactgaagaacaggtactattagaagtggaaagatacgaagaaattcttggaaatagaaggcattttgcgttacatgcctttgtttcaatactgtcgtttctagttttcgggttagtgcctcctgtcgtttacggcttctcattccgcgatgagagaaacgacaacaataaggacctcaaactcgctgccgttgcagctgcctctgtcgtatgcatagctttgctgtcgtttgcaaaagcttacacccaaaagcggtcaaagtatataaaaacggtgtcgtattatgttgtcgttgggtttggagtgtcgggtgcttcttacttagctggattgtttataaacaagatgatgaagaagcttgggtggtttgagccaactactcatgctatcactatgtctcttgatgaaatgagttggagttcatggcaataaattaaattcaagttaggtaatataagtacgtacggccatggattttttttcttttaaaaaaattgtttactttcttatgtacaatatgtgtatgatgtgttgtgtagagttgatattttgcttaaacaatatgtttggtaggaattgtttgacaagaagaaggaggtcctctcaaatttaaaatatttaaaccttctaattttgggaggattgaaaaaaaaagacaaaataaaaaaattataaaattattttttacaaagtaaaatattaatatttaagggctcgttttt

SEQ ID NO: 78573 - DNA, 571 bp, Cannabis sativa
ctatatatttaaatatcaactaataattttttatatatatatatatatatatatatacagaaaagtatttgtataattaaaaagaaagtgcatttttattgtattgtatttttttctttaataaaatatgcaatacaattgatcttgagttctctcaaattatagagtttttttattgttgattataaaatatttatatatattaattattatgttacaaaataataatgaataaggaacattgttaaaaaaatggataaaccaattttttttgttgaaaagaatggttaaaataataataataataataataagatttttttaaaaaaacaaataaataaaaaaaaattattttctttttgttttttaaaaataaaataaattattttagaacttcatacgaaaaaattacatgacccacttatacaatttttaaaataatttcttttgaaaaaattaatttaaaatttaaatatatacattaaaaaggatcacttttcttttctcaaaagtataataaatagtgggcctcattattaatgtagtatttgaaaaagtctcatttttcatt

SEQ ID NO: 78574 - DNA, 934 bp, Cannabis sativa
ttcttagtgtagaagagagaatggatgataatgcgaacattacgaggatgacaacctttaaagaatgtataatttattgtatgttacaagatgtgagatattcgagatgtttttgttttacttggaataaaaagtaggggagtggagatagaatttactctaaacatgacagaactatggctaatcaagagaggttggatatattctctgcagtagaggttgtttttcttgcagagggccagtttgataactgcctaacaattctatctatctatctggagcttaaaacgaggaaaaagcaatttgagtactttagattttgttagaattatattggttttactaaagtacttatagatagttgaaaaactcaagtttaaggtactcccatgtatatgttgattagtaacttgaagagattgaaaggggcattaggggagtttaacaaacttagagtttgagatattcaaacttaggaagtacaagcattaaatgaacttaattggtgtcaagaggaattacacaagattctttccaattattaattaattgagaatgaaatggcagccaacgagcagtaccataaaacactcacaatgattacttatcatttttagctcaaaaagaaaaaattcattggactaaagaagggagtgcaaacacctcagtcttccttgcaagcattagagatagaaggcaagctaattgaatctatttgatcaaagatatggttgggcgataggtggaggatccaagcaaagtaaattctaccttttcacaattctacaatcaacttttgggtttgaaaatgatgaacaagaatttagttttgtagagtgtaatagatgttggcccaattttatggaatgatggatgctgctaaagaagaaatatttgttattccgagggtgaaggctcctagacgagattgttt

SEQ ID NO: 78575 - DNA, 500 bp, Cannabis sativa
cttatcaatacttttaaccataactaacaaatataaacataaattaaaggagattatcagagtgcagctataacctcttatcgtgcatactttgtccttatttatctttctcacttacattctttacaatattaattaatgtaaaattatcatgtttcaaatattattttgactttgtgattcccctactaatcatccattaaaatccaaatttccacttatatacattttcttcaatgaccaaccttttgaatttctttattctcatgaaaccaaaataacgaaaataaactattgtaagcctaaaaaatcaaagtcaagtgatgtagtcttgagattcatgtttcctagacctctaaaactcattgaaaaataagtactaaaaaaaacaatcttgggatgtatttacatgcagcctttatatatgaatttgaaattatataaacacataaacaaaagcaccatagaaataataactcttataaagatacaaactttct

SEQ ID NO: 78576 - DNA, 1952 bp, Cannabis sativa
aggcattcccaatctagcagctgacactgaaaaacctacaccaatcacccattttttttaagaaaaaaaataaaaaaaaaataaaaaccaacagttaaaagaaaaacattcgttctagtgtttgaacttaattaaacacttgtattactttacatcaacataataagaagaaaataaataatacacaccgctaacgaagcagcagtcaaatcctgctctctcgaccaacttggcactgagagcgtcgaaacagcaagggctctggtgaatccccggagaccctagaatccggcgaagtagcttagccggagactcggctacgcgatctttgtcgacagagtaatctgaaacgattcgaagagctttaatggtgcgtttggaggagtgtggtttggaaaatagtggaaataagctttggtaatggtggggtgttgatggggagcgaaaaatgagattggaaagaggaagtttggggtttgatgggttttcatggctatgggtgtactgaagagaaaagttgtaggtggtactatgtagcttcatttgaagctgcagacccattattctcactcactctttcacttcttgccttgtctttctcctttagtattcaatcaatcaacgttagtgttatttaaggacaaagtatgattatgctaattgctactgatgttataattaatattgagtctctcaaacattttggaaatgtttttagaagctgttttaaccattttttaagatttaagttttacgagaagccaaaaacacaaataggagctgccattttcgtgaaatttgaggctaaagtaacataattataaccttttttttcacttgactgtggaccttgttctaaacgttattttgaaagtgtttttacaaaaatattgaattttgagtaaaaatttataattttattgtaggacggaatttttttacaaaaatactgtctttttatgaaacaactataaaacaacaaaacgtaacaattaaaacaatagtgaaacaactaaaaactaatcgtgaaacaaccgtgaaaacttaacattatagatagtataaaagttacacaatatttttgaaaaaaaattctgccccacagtaaaaaacataaaaaaaaaattgaaaaatttcagtatgtggtgtaaaaatctcttatttttacttatatttgagtcagggccgtcctaagccattttagaactttgggcaaaaaattaaaattagactttttattaaaaaaaaaagggagtattttcataaatataaaaaaaattagtaaaatttacttttacataacataaataaataatataaaaatatataagattaaaatataatcaaagtttaaaatatgaagaattaaaaaaaaaagacaataaataaatttaacaacttttaaaaataagcatcgccagaaaagtcttcagaaagtcattggtgccgaaaaagtcaccgacactagaagtcgccgtaaaagttaccgaaaaactcatcggcgcccaaaaaattactgaaaaaatcatcattgtcaaaacagtcaccggaattagatgtcacagatataaattaaaatagatctggttcgaataaaagtaaataacacaaaataactcaaaccggttataattaaaataaaatcgactctataacataatgaataaaaacaaataacataaaataactcaaatcagatataattaaaatagaattggttctataacagtgttataatgaataaaaacaaataacacgaaataactcaagccatttataactaaaatagtactggttatataatataatgataatgaataaaaataagaaataagtaataagtaacacataacacataacacataataactcaaaccgattacaattaaaaaagtaaagagaaaattagttcctaaaaatgctaaaaaataaattaaaaataaaactagttt

SEQ ID NO: 78577 - DNA, 522 bp, Cannabis sativa
gtaaagtagcaactaaccaacttaaaaattaaaaattaaggctaataaatctttctctctttttgttagttttgaaaaattataaaacgacactatagttttaatgttgattttaattttgttgctaagggtagtaaccgagttacaaattcactataaaattttttacttttagttacaataaaagttgtaactaaatgtaaattataattcatatgttgtgactaaaggtttgtgactaaatgtattagtcaaatctataaattttgatattattagataaattaaaatatgtaaaatttaatattaagtataattaagtaaataacttaaccaaatgtataatttatcctaatttcattgacatgtttgttgaattttttaattgaatttttggcctcttcttttagggttacatatatatatatatatatatttttgttgaaatttaatagggttatatatatttatattgataatatagaacacagactatagagtacagagtatagaccaccaact

SEQ ID NO: 78578 - DNA, 580 bp, Cannabis sativa
aaagcagtgagctcttcgtccttgggtgccattttgatttggttgtacccagaaaatccatccatgaatgataaggcatcaaaaccagtggtagcatctatcaataacttagtcatggggagtgggaattcatctgttaggcaggcccgattaagatctcagtattccacgcatatgcagagttgcccatttttcttcatcacaatgacgatgtttgcaagccaaataggatactgaacctcctgaataaaccagcaatctcttaacgtgtcaatgtctgcctcgactttgggaagtaattctgagcgactccttctttgagcttgtttaacaggggtagcgtcttttgatactgccaaccgtgcacaacaacctttggattcaaccctggcatgtctcgatacacccaagcacatacatctctgttctcacaaagaacttgtttgtacagtggtaactcttctatagtttataaagcactaacaaacacaagctttggatcatcctcggtcccgaggttgatctctattaaatcatccatagtggcttgtcctccatcttcgaattcttgaggtgctgg

SEQ ID NO: 78579 - DNA, 892 bp, Cannabis sativa
taatccatttcttaattctagggtattacaaaatgccagcgagaatggagtatgtcctgttgctatcttctcagttgttttatgagcccaaagtacttgaggcagttcatcgacccatcgacctttagcagcgtccaacttatttttgatagtagccttcaaggttttattaactactcctacttgcccatttgccttaggtcgtgacactgacgagaagctttcaataatcttattcctctcgcagaactcagtgaataattcaccatcgaactgagttccgttatcagatactatcttaatgagtattccaaacctacaaattatgttcttgatgacaaagtcgagaacttttttgcaggttatggaaacgagaggttcagcctccgtccattttgtaaagatgtcaacagccaccattgcgtactttgctcctcctcgccctatggggagtgccccaatcaaatcgattccccatattgcaaacgggtaaggcgaggtcatcattcttagttccgtttgtggtacgcgaggtatatgtgagaatctctgacatttatcacatttcctgatgaattcatgagtgtccttatttatagtaggccaataatatccttgtcgaataatcttctttgacaagctttgccagcctgcatggtccccgcaaaagccttcatgaatttctctgatgatctcgtttgcttatgcaggaagaacacaccgtaggagaggcattgaatagccccttctatataattcgccctctactatcatgtagcgaggccctgaatacaagagctttcgtgccttgtttttgtcagttggaagttgtctgttgagaagatagttgactatgggtgtcatccatgtgggcaagctatctatcatctcg

SEQ ID NO: 78580 - DNA, 761 bp, Cannabis sativa
aaactgtgtgtatcttgagaatgtttattggtgggcctataaggcctcaatggagagtagctgatattggaaaaaaaatcgtagcaatgaaaaagaagttaaaagatgctattgagatggagaggttttcggaagacttagtatacttaagcataaatttataatttggcttggagttttgggaagaatcagcaccagttttaggtatatattatattgttatacctaattagaacattataagcataaatggatagagaattaatggttatgtgggagaaatcaatgtacatgtttttgtgggctctattgttgtaattaatacaatgattttaatttacccaaaaaaaaaaaaagtaaagaacaaagaagataaatatcaaatatatattgttcaatatgataataagaaaggccatacttccactttgttttcatagcaaaaccatatcaagttgtagccacaaagatatttgaggcaagcacacacataattaattaaagcaaagcatataattatagatcacaatatataagaaagttcatgtgattaattacaaaccttagagataattaattatctcgaatgtgaaacacaaaaacaaaccaaactacatatgaagctgctgggcacatatgtatgtggaagtggaattaaagtagcaactgcatcctcaaattgatagtggctagacattttttggaggatccttctgaaattattaaaagtaaataacattaaaaataataccaaactcaaa

SEQ ID NO: 78581 - DNA, 969 bp, Cannabis sativa
taaaaagaaaacaaaacaaagaaagaaaacgatagatagctaataaaattaattttccaacaaatagaaacacgcaagcaaattatatggttcccaaaagcctgtaatattgccttattatctttttatatggtatatataactcttttacctactaactattgctaactttcgatctaataatgattattaaaatttcagtaattaattaacatattaacatattaatatatatatgtatatattatgctgccagctttgaattaagtatcaggaaagtgaaaaatactaagtttccaatttaaatgactagtgacaaatcaaatttatcaataactattagctaaagataaaaaaaaattaccaatcctattattcaaacaaaaataaaaggaataaacacaatcgaccatgtcaaagatgattctaatgaaagatggaatcctagggccaataataaactaggaatccccgttgatcttactactgagataggaaatcattctagccaaacaaatgcaacataaaccaaatgaagtagcattgccgatccaccgaatggctaaaatcccgtacaacaaataaaaattactctactatataataacgatatcaataagaagtaacacaataaaatatgtaaagtccatgcagtagagataaagaactactccaagaaaaccacattgatgtcccaaaaaagcatccatcaatgttagtcgcacctcttttagcagtgaatagccaaaccccacatctatcaagaaatctcgcattatagtaccactgaacagaacgaaagggtaggaaaatcaccaagactaaaggcttagtagtactttcgttggagatgttgttagggtttatttcttgttattgtaaacggattaattagtcatgtgaggattaataaaacactcaagaaatatatatcatagatctaaacatattcctaaaagtgttttaata

SEQ ID NO: 78582 - DNA, 754 bp, Cannabis sativa
gtactgggggacatctactttcacaaatttccctgtatggatatggtcttttttttcatgttcattatgtcttatctatatttatgaacatagtaaattaatgaaaaatctttggttggtggtgatgctgttttaacagatatcagattatgaaaaggagattgagataatggtaactgtgaccaaagaggagtatttagccactttaagaaggtacttgtttgtatataggttatcttgttactcaaataactcaaatagttttggccatttttcttactaaaaagttacttcttttctggtgttgcagaaagagcagtggcttttcaagaggtgtatccaagtacaggggagtcgcaaggtgattatcacgactcgatgctatttaataaatgataaaaattattttgggctgtctgctttgcaaaaattactgatcatgtaaaatgacaaattgaattatatattttcaaaaatagtacaaaaaaaaaaatactttgaactcaattttaatcattattttttaatataactaagctaaagctagactttaacgaatacatacaaaaaaatgtaactagtatcagttcaaggtactattttgtaccatttcaaaaaatacaatctgaattatcatgtaacaaaacagaaagttcaattaataatgtttgtaaaacaaagaatccaaaatagtatcaaccatttaataaaacaaattctcaaatcatagttttgataattgttgtatgcaggc

SEQ ID NO: 78583 - DNA, 923 bp, Cannabis sativa
ttttgcaaaggctttgtggttgggtagtttgtatcctttgaggatagacagtattccaggggactcaatggtaagttttttggagaatttaatctcaataatccctagtatcaatagagatgaatttgttaaccactttggatgcatctgcactgagatttggaaccagagaaatgctctttgcattcgttctgtttcagcagacccttcaacagctctcctcaatgtaggaaaggctctaagggattttaaggtgctggttgctgagccacttgaggagactaataaattatttcctactcctgaggcaaatcaccaacagaacttagcttacaagttctgcaaagagaaagtccagtttgtattcttcactgatgcttcttgggataagggagaggccggccttgctgctataaggataaatctccttaatggaacctggtttgtcaaagctcgaagatcaaaagctgccacagttctagaggctgaggttagagcaattgaaatggctatgcaggggggaattgcagatagatgtcaagaagtccttattctctcagactccaaaacagccgtgactgctatagactctaatgttgggtgtcctgattggaagattgccaatctgtttttttcagttattaatttatctagaaggttgttagtgagtaagtttatcttgattaatcgtagtttaaatgttgaggcggatggtatagccaagaaggctagagtttctagtgttcatgatgttctgtatcaaggggagggagtaccccctgttattcccatccttttttctaattaatgaactttgagttctttcaaaaaaaaaatattgataaccagtgctagagaggagtgaggtagctgccccagagtcgagaccccctaatgccaagggctcacattttgtaaaaaag

SEQ ID NO: 78584 - DNA, 799 bp, Cannabis sativa
  modified_base (313)..(317): a, c, t, g, unknown or other
  modified_base (410)..(410): a, c, t, g, unknown or other
tacttaaagaatttactggagtagaagttcttattgctttgaacaccatgggtcctgataaaagtcatgatattgatggtatgtcgataatattttatcaacataattagaatattgttggaaatttagttacaaaaggtgtcctccatgtgcttaatgatggtggtaatcctgttgttattaacaagactttgatcacattgatttccaaagtcaaaaagcctcaaactatgaaagattttcgtcctatatataagcctttgtaatgtcgtctacaagatttcgatcatataaaaactcttattgcaactannnnngcaacctaaattgcaacaaaaattgtatagaaacccctattgcagctaaccactttaaaaattcaaaccgtaaatttaaaaaaaaaaagttanaaaaataatatatgagataattcctcaaaaaaataatataactaagcatacgtgtattgtacataatattaacctaatatatatatataaatataaatctatttaaaatctaaataggtcattgctgtagacactagaggtacttagtatacttattggtgacgccttatgattgattaatgatatttttaaaagttattaaattaaattacatgaaacataacatgatatttaattatactaataacgatataacatatataaaagtactaagcactacgagtctctttcgggatttttttttcttagcaaaaaaaactaaaaaaacacatgaaggacataaatgggtttggaaagggtcactctctctttattgtatggttttcatt

SEQ ID NO: 78585 - DNA, 726 bp, Cannabis sativa
tctcggttgtaaataaataccaaaatttaatttttgacgatattaatacttaaattatatttctgcaactccgtaagtacatggtcgttaaatgtcaagtcactatcacgtgtcattttcttattggtatatttaaactatttttttaaataaaaatttaatgacctggaccaatcagtgattgccacatgacaatttatttaacacttaacagtcagatacctacaaaagttttaaaattataacttaaatattattactgctaaaaattaaacttaggtatttatttgcaactaaaagttaaacttaggtatttatgccgtagattactcttttttttttctctttccctttttgagtatttatgccgtaaattaaacttaggtatttatttgcaaccaagagttaaacttaagtatttatgccgtaaattactcttttttttttctctttccctttttgagttagtgacagttaaaatgataatttattttttaaagttaaataaaaaattacattaataatagaaataataaaatcttatgatttcaaaatgcggtatataatatgagcatacctctcaatgaccctcgaatagctcatcctcttaagaggcgaagagaggatgatttgatggttctcgtactgatagcaatcggtaggattctaagaatcatcgagactcatgtgtgcctaaagctgccattccacctcatggaaatggag

SEQ ID NO: 78586 - DNA, 743 bp, Cannabis sativa
gggttccctcagtgatgggctctatcaacttaaaattccctcccagtcagcttcaagtcactcaagaactcagcagtcaaatactgaagttcaatacaatcctgcttttaattgcagtacctctagtaatattgttcttgataaatccaaaataaattctgtatggccttgtaggcttggtcatccagccaagccaattttatctcaagttttatctcaagttagtcctaaatctaagtgtaaagatgttcctttctgtgatgcttgccaattaggcaaaatgcatcaattcactttcaaatctactgtgaataaaatggtttccccttttgaaataatacacactgatgtttggggcccttcttttcacacatctcgagatggttataaatattaccttagttgtgttgatgattacacaagatttgattggatctatcccatgcaatccaagtctgaggttacagttttgtttacacacttcataactttgttgaaagaatgtttgaaactaagataaaaagtgtgcaaactgatctaggcaaagattatttacctttatacaaactgtttcatgatcttggcatcaaattgagacaatctcgtgcacacacacacatcaacaacaaggccgtgttgagagaaaacacagacatgctgttaatatgggtctcacattgttggctcaagctcaaatgcctttgagtttttggtgggaagcttatgttggaattattttacca

SEQ ID NO: 78587 - DNA, 558 bp, Cannabis sativa
cctcacaatgtacattcataacaagatttttatttgactttgctcgttatttttaatgttgtttacttaactatacccttaattgttaggcaaaatctcaatgaaattcagtagaaacaaggaaaagtagatatgagagtatgaaaattataacataataagtcgatttcttgttatttagagcctcacaatgtaaattcataacaacatttctcaacacaataacgatttttaatattacttattaaattaaaatatatgagacacgaacaatgacaaactcaaatgatagtaatacactatctataccgcaataaaattttattacttaaaatcataacagacaaagtaattaatagaaacaaggaaaagtagatatgagagtatgaaaattataatataataagtcactttcttgttaactagagtctcaaaatgaaacattcataataacatttcttgactagattaaaatatgtagaattcgatatgacaactcgcacagtgttaggcagtctattattcatcaaatcaaagaattgtttttacctggcaaac

SEQ ID NO: 78588 - DNA, 4500 bp, Cannabis sativa
gggggttgttattttgtgtatttgagtggttcttgtgtatgtttttaaatttaaatacatcaggatgtggatgttgaacttcgaacgacttcttgaatgttaattgtaattataattggtactctcacaagttctgaatagtgctaaaatttgaagaactgttctttgttggatttgtgtcgctgcttatccattcaaatggttctgaagaaatgcatagttttcttcaattttatggttctaacttgtcttcctttgctgtagattccaagaccttaaaagaagagaagagagaggagttgtttgaaaacttaaaggctgatgaatcaataggatgggacgtggacattatagatccaagggagctttcggctaaaatgctaaagaagttagtttgaatcatatgtttatgttttgtcattagctgttttacactatttatctaatttctcttatgctttcttgtcaacagagataagattaacttgaatgaaatttcacatgaatctgccattggccttatcacaaaggcactaaataagggagtccttctaactgaggtagaagtctttcctacattatagttaatacatttgaacgtatgctgaagaataatcatgagggtttaaaagaagagcctttgtgtgaaaactggaaaaagaactttgttacttagggatgttgggaaagtacacatgtctcgaagaatagacataaggatttatgcattttcttgaggagtcatattattgcatattttgaagctaccatcaacaaacagaatgaaaaagcttgttctgtatttatcataagaaaagtccaatgtcattaacctttttagttcaccttagttttgcctaaaaaaatttgttttgtacaagtaataatagattattggtgtatgggagtcgacttaaataaacatttaaaaatagctaaataaccagtttttgatttggacctgtagtaaaagtcccatgtttagaattatgaatgaattagtgtgaaactcccaacaaatttaaaaaataaataattcattttcttggtcaaattgaagtttttggtgatgtaatgaagggtggcagaattttacaagcaagtttgtttcaggtgtttttggacactgttggtgatgctgagaagtacagagtgaaattgtcagaaagatttcctgctatcaaatttgtcgttgcaaagaaggctgacagtctttatcctgttgttagtggagcaagtatagtagcgaaagtaattagccacccttttctttagtgttttcctctaaattcttaagggactgtgttaattccttttgtgcttgctcatccaggttacaagagatcggtctgtgaaagaatgggtgcttgatgaaacagctgaaaacattgacagaaactttggttctggataccctggaggtaaaaggctctagaccttcttagatgctgtattttggaagcttgactatagtgtgaggcacccggtaatgcttttgtctttacagatcctggaacaaaggcctggttgaaacataacaagcaccctgtatttggattcccaacattggttcgtttcagttggggtacctgcactcctttcatcaaagaatgtgttgaagtcttgtggttagtccttatttgcaagcacatgtaatgtatttattgttatggccatttggagtctaaatgtgtgttgcttgtgctttgatctagtctgttcatactgctatatcaactgaacttgttgaagctatgttcttgtagaaaactaattactcggttcttactagaaactcagggaaatagagactgcaaatttaggctatgttttcactttgtcaaagctaataattaagaaatgtagttgtagatcatcgattcccctaagcctcaataagtatgcatgaaggtggaaattcactgagcttcacctttaacccttctgatgaaaacagatctgggatcttacattcagatgctgatatgatatcattagttagaggtgttgtttacccttgttgttgcgaacttcatttagatcacttggtcatatttatttatgtatacaatttgtatgattctgtcacagggagtctgatgagatggatgaagatagcagctgcgggaagcagcaacaaaagctaagcaaatatggtgtcacaacatccaagagaaagagtgaagagactgaatcaagtggtaaagggcgctgcaaattcttccaggctcgtaaactggagcaactcacaaatttttaagagaacaagaactcagttttttcttgtcttcttatccatttttttgaacaagtattcttatttacttagtcaacattttcacaaaccaagttttaagcagtttgcttgagttcgctgcttctcaaaggttgtagaatttagcagaagagccagaagaacatgatatttataatagtttacagtgatatatatttacccttgtcttactacaattctttggtatttacattcttgatatagaaaatccaataagaggaaaaccttcatggagtacaaatttgatgataaatttattttaaaaggttttagcacaaatgtcccccaagtcttatcatgtttggcagtatagtctctacgaaaaaaaaaattggcaatcaagtcttgagtatatgcagtaacgattttaaatttgttggaaaaattcttaactgttgaatgaaatttttaaaaattaatacaatataatgtcaacaattttcattttcagaatttgaaaatatttccattttgaaattttctattggatattctataaataatatacgataaggaattataaaaataattcgagtaccaatgtacaatatttagaaagatatcaaaattattacagaataactaggacttagttgctgaagtttttagaactcaaaaacttgattgccaaaaattatattatcagaaactgaattgccagaaaacggataactcagggactatttgtgctaaaatatccttaagatgtgttatggctgtaaaacttggttgtacactctgccccaccacacatatacaagtactttccataattgtgtgcagtgtgtacctcttcatgatagagaagtttctgctctaatgcttcaactaccacattatcattctgggcctctgctgaattcttggaattttaattatgtgttaccaggtcctgacttatttgtctcacttcatagatccatatatgttatcatgttgtagagtagttatatgtaatctataaaaatgcagacaagctttctgcaattgcacagtaagaaagctaatttaagcactatcatatgcattagttgatggttccatgtacaacttgtttttagaaacggatcattctcagtatgtacaaggcagaatgataatttaagtattatcatatgcattggggtcaacataacaaataatccaggctgtatgacaggaaagctaactacatattgctagcagaaaagaaaacaatcacatgactgttttatataccagagaaagaacactcagtcactgaggctttcaattagtgttcaatccacatctgaacaccccatataattgtaggagagaagccattgttgcaacaataagggtgtgaacttgtattcggttgctgttggctgctccccggtgataaggatggcggttgtttgcagcgccagctgcatacacgggaatgtaatttcctcctccttgagtggatgttcctctcccaccattttcccctgggttagttggtctggcacctgtgctgctgccaccggcgccagtacttgcacgtctaattccatgagcaatcttgttgatgtgttctatagcaattttactagtgtcattcttactgtctgtacccttgatgttatgttcatatgtatttatccctcttgagtttttgtcctgcaaaaaaccttatgggggatataactttaagtacttgcaatatagcaatatagcgatgcagttactacttctgagaaatttatgttcttgatcaaactatgacacaaaacatccaacttgtaagggcacttttttcaatcttagttctgaccttagaattagacttaagtgggaaaacatattccaagtttcccttttctgataattgaaagtattccatgctttcttgccttaaaaataattcttaatcaacacatgtatacaccaataccagtcatgcttaaggaattttaataattgcaaaaacagataataataataggcactctgttgaaataaagaacctttacacatggaaaaaaaagctagctagttacaattatagcataattttagagattcagcatttggagctgggaccctactgctatttttttgaagcagtattcaggaaagtggcagacaataagattagactactattatattcatcttttgctttctatcttcactgtatggacattttcttttccacattaagacaaaataaacaactggtaggattatcccatgaa

SEQ ID NO: 78589 - DNA, 514 bp, Cannabis sativa
atttgaaagaatcactcacttccatgaatagacgaagatgaaggtgaggatcttcggtgggtgagccactaaactgtcccacagtttgaagaatctagaacataactgacttcaattcaaactgtggagcctgaatttctggcctcataatgtcgggattgagctcattgaaaaaaggtgttgcgtactgtcagatgacttgatctctaccatccgccatgatcactgcattttgaccattattaggggccatttccctttgagctcgttgtccagctccttggttatccatcatttctatttccccttgtgccctaagttgtgcttttcttctttctctgaatgtgcactcaatttcaggatcaataggaaatagatcaggataaataaattctcggtactcattcatataaaagattcaccagtcaatgcacaagagttaccaaaaatgagtacaaaataatagactaaattgcaagctaattgacttttacaacaaaatatatttacagtc

SEQ ID NO: 78590 - DNA, 503 bp, Cannabis sativa
cacccaacggcccatgggctcgcagaacaccccatggggtcggacaatagttagggggccgcacaacaacccgtcggctcacatgagagccgtcaactcgcataccaagttgtcacaattcggtagtcttagtatttggaccataaccttctcgatatacatcagaattggatgattcaagatacgttggaaagataagaaagagatctttaaatcttatgtttatggcaagatctaattctgaacatatcactatcaaaatcctccaacaattgtaacctagtaagttgatcttactaactctactcatgagttgttattgggttgaccttcgagtttcagggatataccttgagacttgtaagcatggatttccaagattaacgattcttaggccatatgcattgaataagtcattcttcaaccgactcttatagttgatgtctctcgactgttggggctaattgttgactaatcttgaaaatcaactctgtcgatttttg

SEQ ID NO: 78591 - DNA, 537 bp, Cannabis sativa
ttttttttttcattgaaatatacagtatttgttcatttctaaatggttaattattggcttatttttgtcctaaaatagtaaaatatattttcttgtatttttctctacgcatcatataattttttttgccaaacattatgtatgtctaatattttctcctagtaattttttttttctaaggcgattaattatgcgctaaattatgttgttatactcgtgtattactattcttttctaacatcttgtgaattctctctccaatcggatagtattattattaacgaagtcattttttcttgtttatttaattttttattgtaaccgaactaatagtactgatattgctctttttttttaaataatttccttgttctttacaatctctcaagtttgatgattgaatcttttgtccaacttagaaggattatctttgatctcaaaattctttgattttgtgccttcatttatttttttttaaaaaaataataatacctgcacacataatttacactcaaatttaatatatctattctatat

SEQ ID NO: 78592 - DNA, 747 bp, Cannabis sativa
attattttttgaatatgaaggtacgaggaagttgtacaaatggttgactaactattggttgataagcaattgtaattatttattcatacttaccacttcaacaatctaaatattaaaaaatttaagaaataaatattttatgttttttttaaactgagacacttacaaaagtaggaaggagaagttaaaacctccaaacctgatctttatcttgccttaaaatttctctagcattttgattgcaagcttcgatatctcaaaatggagtgcattttcacctctttttactgaagtccaagctcatttagaagacctactttagtgtaccgcatcaagcttcctcttgcatccattgaatctgattgtttacagttaatctcaaaggttaagagcacttagaaggataattcagctttgtccagtgttatagagttaattcgaaaattctcatctccattccccctaatgcttctctacatttcaaggaaaaatactttatatttttttatttcatatacactaatatattattttttttttccgatgaattacatatcatatgttagtttatcatttttgttactatcattccgttaaatacttattatgtctactaaaatactatgttactatataattcgttcacatctatttttaattaaaatttaaaataataaaaagataattaaaatatattttaatctattttcaaaaaaaaaataataagtaattaaattaatcataaaa

SEQ ID NO: 78593 - DNA, 948 bp, Cannabis sativa
tcttggcttggttgttatcttttttgttctgtatcgaggcctatatattggcttctctcctttgtattcattcattgattcaataataaagaacttctctcctctcttttctctactctgtaaatcaacttggtatcagagcaagtcggtcatggcgacctccgacgatacctcaactcagttttctggtgtccccactactatgcttttacctcagcttcagttggattgcaacaactatttttttttgcggtctcaagttcttcccgccattagagcacacgacctggaaggatacaaatattatatacattttcttgatgattacacaaagtatacatggatctttcccctcaaaaccaagtctgacacttctcttgttttttcacaatttaacttatatgttgaaaggtcgttttcaaccaaaataaagtctgtacaatcagactggggaggagaatatcgtcctcttgcacctgttttagccaagcttggcattgtttttagacacccgtgccctcatacccatcaacaacaaggacgggctgagcgaaaacacaggcacgttactgaaatgggccttactttactggcacaagctcaactccctcttgtttactggtgggatgcattcactgctgccactttattaataaacaggttgcctgtccaaaaggccaattatgtcacaccatttgaactcctattttctaagaaacctgattatacctttctcaaggtatttggctgtgcatgttttcctctacttagaccatatcacacacgaaagttcaattttaaaacaagcacttgtatcttcttgggctacagcccttcccacaaagggtacaagtgtcttcatccctcaggccaagtctacatcggcagaagtgtgtcattcgatgaaaataactttccttactccaagttattgttgggttttgtgcc

SEQ ID NO: 78594 - DNA, 1044 bp, Cannabis sativa
agcttttgctagtcttgaattgcaatctcatagattggattctgttagattcttagcatagataagctcttacatggtatcagattgctcctgattactgtctcctatggatcctcataatcttgaaactcaacctcgttactcaaatcacacagccaccactgctgctcaagctccggccaatcctccatggaatccgttccaaaattcccttcactcctctctcaccgtgaaattggatcgctccaatttcctcgcctggaaatctcaagttataccaactgttattggtcacggtctcgatgacatacttcttggaggtaactctccacctgaaagattggttaatggccaacccaaccctgaatgcactacctggaagagaaaggatcagcttctcctcagttggcttcgctcgtcgatgtctgaatctgttcttggatctcttgctcaattccaaagctcctactctgcatggcgcgcattagaacagagatacgccagtcaatccaaagcccgcattttacagatcaagtcacaactctctacaatccagaaaggtaatctttccatttcggactaccttgacaaggtaaggattcttgttgattctctttcagttgctggtactcctatggacgaaaatgatttaatcatgcacttgctcaatagattaggccctgaatttgatcctgttgttgttcatgttactagccttgttgatgatctttcctttgaatctattcaatctttattactaatgagagcagattggaaagacactacattatagctgattccagcaccaagatctcagcaaatcttgttgtcggtcctaccagatcagcaaatgggacactaaatcgatacaatacatcaagcagaagctcaaattctcaatataataatcgtgtccctcccagaaactttggccgaggtgcttcccccacaccaagattgatctgtcaagtttgtcacaaacttggacacacagctgttgtgtgtcattacaggtttgacttaccccaaaaattggtgattctc

SEQ ID NO: 78595 - DNA, 1147 bp, Cannabis sativa
  modified_base (47)..(59): a, c, t, g, unknown or other
tgttttagaattcatattaggctgttaatcaaacatacttgttagtnnnnnnnnnnnnnggtaaaataatttccaacagtggtgtacccatctcgcattactttccatagaagtgacatcatcactctcctttttgaacaactttgttggtctatcactcaagttgttcacgttggtcagtggtttctctttgacttcctttgcatattggtcttgagctttcttcgagtctccaccaacattgggtccaccgatgatggttaaaatattgtgaggagctctagagccactcgcctcctttattcggttcgctccatctacttgggtatttgcctctccatccttcttatactggccaaaatatcctcgacaaatcaaatcctcaatatcattctgcaaaaaccaacatcttaagatagtatggccaatatatttgtgatacttatagtatttttgtgggtcccttttggcgtggtttctcctgattggaggcagttaatgatcctcaatagtatatatgtggtcggtgggtacattcaactctgtataattaacaaattgagggccttccttacgctttggtgaactttcctttctagttggggcttcgctagttttgggcttcgacatctcgctgggctaagccttagcttaggttctctcgagcttttccatcgtggactctttgaccgcgcccttggctctggagatcatcgtttttccttggccttctcgagttttggtagcgagttctcgattctcttgtggggttcttccatggcaaaaaatttaactaacgtctcgggacatcgtgcttgtaattactttcaagaatcagtcctcgacaatacccttgtaataagcatacaaatcaacgaagactcgggggccttcattacttttgttatttcgacattgaaacgtttaaaataatcttgtaggtctcatcttgttcttgcttaatgtttgccaaagtcgtgtaaggcgatttataggtcattattgttagaagtgggttagaaatagatctacgaatgtttcccaagttgatatcgattcttccagcaactaattgaaccagtgatggtcattttcctccaaagttgtggcaaagattcgacatttagccagttgaggtacttggtca

SEQ ID NO: 78596 - DNA, 875 bp, Cannabis sativa
gtcctgtgaaaggctaacctgaactagaatcctgggatattgtaatctatccctgttatttgtgatgttgtcgacttgtaatggttcccctatttggcttacaatcttgaaaagagcagtctccccccaatatttgatgtccaaacccttcagttgaatccatgtaggaacattaataacctcttccttcgtaaaatcgtctatgggattccacggcttcatcaccatcggtttcctatcaaagaacacgtatccttgctgcatcaccttgtccctttgctccatattctgaaatcttattatgaatatccccttagcaagaagtccgaccttcaccactgaatctttccatatacgcctaacaaaaccatccagtatattaacaggaggatttgcaccaatgacataacaaacaatcgaaggttgccaataattgacttcatcctcaatatcagtaaaatcaatcttcaccttgctcttcgatccctgtaatttcacctcactcttcggtttggaactttcaaactcactatccaaattccgaactatgttagatctaagtattgggggagatggattcattccaatacttacctcctgagtaaccttgtttgcagcatcaatccacgctgaaaattcctgctgaaaatcgcttcgagttgcttcagtcgcaccaggtgaagagcaatgctcctggtactgttccattgaatctgataactctagtatttctagttcttgtactccaagaatggcatccatagatctggtcttgatgaccctatccgaggatgacggccctgttttcttcccttttgctttaactttcccagccagtttcgccctttttgccatggctccggtgaacaccgaaa

SEQ ID NO: 78597 - DNA, 544 bp, Cannabis sativa
gagttaatattttacgagcaatatgttagttaattgctgagtacttcttttgtttttagctattattcatctttatatatcacttttatctttttttaatatttttcactatctcacaatttttctgaaaaaaattacaaacacttattctatattttttttttcttttttacattttcttactactcactctcaaactagtttatattatttttctttaattaataacattattttataaaaaaatcttaattaatttcttttaacttttactaaaataagatttttttttaattacatactttttcttatattcttttaatactttttctctctgttacaaaaaaaaattaagagcatttttcttatatatttctctctcttacatgaataattaaagtagtattttttttttatgttttgtagtttattcagagttaatttatgaataattcacatattacaacgatgtcgatgtcttattattattatgttgatttgtaactgtttttttttttgctgttattttatatttattttcatg

SEQ ID NO: 78598 - DNA, 672 bp, Cannabis sativa
attattttttgctatagcaagtataaccttagctatatccattaatagtaagaactaattgtagttattatacttaccgtttactaatttatatattatgaattttattagataatattctactgcaacttttctttatatctatcgtcaatacatacatataatcaaatgcgtgtagggaaaattttaaagattttttttttccgtagttcacttatctcggcagttccaaatgtagagattgcatgcgacctatcttgacagttctaggtgttgaaattgcccaaatctataagaagatggtatgcctatctcaacggttcaagataaaaactactgagattgcttatcctatctcggcgtttctcaactgccgtgattggtcttgaccctatttcgtcggtcaaatcatctacaatcgataacctctgaaataggtctattacgggagttcttaattattgagatacagtaattttctgatagtgtagaataaacaaataaatcataaaaaacattctaaagctcataatggcaataagaatgtttatattgtatgtagtcagggccggccctaagcataggcgggctaggcccgggcttagggctcacttattttaggggcccaaataaaaaaaacactttttgaaaaatataaatattttttaataa

SEQ ID NO: 78599 - DNA, 646 bp, Cannabis sativa
agactttttcaatatgaggagaatcatggtcatcttcaaggattgagagttgctcggggtgccccatctgtttctcatttattcttcgcagatgacagtctcgttctgagccgtgcaaataaaagatccattgacgccattaagagatccttacatttttattgtcgtgcctcgggtcaaagattaaatgctgaaaaattggtactatccttttctcccaacacatctgagactattcaacacaacattcaacaaactctacaaatgccaattaagccatgccatgaacgttatcttggacttccgtcatactctgggagggacaagaaagttttgtttggagagataaaggaaaagctatggaacaatctttctgcctggcaagaaaaactgttctctattggtggaaaggaagttctactcaaagcggtagctcaagctataccaacatatgcgatgagttgttttcgtctatccaagtctttaattcaccaaatggaggtaatgatgaacaaattttggtggggatccaattcctcttcgtctgggattaactggaaaacttggaatgcgctttgtcgttcaaaagtggaaggcggtatgggattcaaaagctttgtccactttaaccaagctttattagcca

SEQ ID NO: 78600 - DNA, 1482 bp, Cannabis sativa
ctttctatcatttgctaaaagaaatgtataaaataaataatatagatgtataacaatattaaaaattatcaataatatatatatatttttttttttttgaaaatttctgtttagagttttgagctgagtgagtgggtcgtaggcacaagctgaatgatttatgttaacatatcacaagtacaattaaaattaaagccaacttgtactcacaaattgtaaacaaaactcttataaaatagatttatttatttgttcttttttttttttttggaaaaaacaaaatattttataaataattattaattgtgttggtagggatatggaatgactgaagctggaccagtattatcaatgtgtttggcctttgcaaaacaaccatttcctaccaaatccgggtcatgtggcaccgtcgtgagaaatgcacaactcaaggtcatcgaccctgaaaccggtgcctctctctcctacaatcagcccggtgaaatttgcattcgcggtcaccaaatcatgaagggttatttggacaattctgatgctactgctaataccatcgatgtcgatggctggcttcacactggtgacattggatatgttgatgacgatgatgagatcttcattgttgatagagttaaagagattatcaagttcaagggttttcaggtattgtttgttggtcgatcctgaaatttagtgagttggagaataaaaaaaatcattagacctttatttaaaaaatatgatatttttcaaaataaaagaaaaagtgggactatggaggagggtggatcctagacacagacttagcacgtcttagtatagattttaacacatttattacgataataataatttcaggtaccaccagcagaacttgaagccttacttattagccacccttctattgcagatgccgcagtagttccgtaagtataatctcatattttttaaaatttattgtaatttaattataaagatgtatattttatcaaatacacatcccaactaaaaattatatatcatgagtcagcaacatgatataatatgattggtcgatattgctacaaagcagtatcgactaatcttttctctcaaataaattatttattttaccaaatttgattttattatttatttatttgtatatatatgttttttttaaatgaaaaataggcaaaaagatgaggtggcaggagaagtaccagttgcatttgtggttaaatctaataataaagattttgatctaagtgaagatgcagtaaaagaattcatagcaaagcaggtaatttatatttatttagatataattattaattattaatatttatttattgattttaaataattaacaaaaaaaattacatgaatattataattatattaacaagtggtgttctacaagaaattattattattattttatgcatacatgaaaaatcagttccatatataaaattattgatataattttttattttgttaaat

SEQ ID NO: 78601 - DNA, 674 bp, Cannabis sativa
cacacaatgttgacttcttttaatctaaaaaattataaagtaagaagaacatggatctacagttcaagcagctccattgaatgtaaagaataacatgagagatgatacctgggagacagcaacatcttcaaaaattcttacacctggaagtaagaagaaaaatattattaaggccaagaaactcaaagtaatattaaattgcagaaagcatcttcattgtttgagactcaaaaagataaacaacttgatgatcaaaagtacttaatacttctcttttaaaatacccttgatcatgctattgtaatgattcttctagatttttgaggttattataaaatatatatatataatctgtgtttcccaaaatgaaactccaataacaccaaaaaaaaaaaaaagcttcaagtttcaagcacacatcctagtaccctttccgcatgctactttcagcaagagaaagatgaatctcagtaaaattcaggacattaattgcatcacaaaaatagtaaactatttttgacaatttaacctgctccctaactatctttacaattccataaaataattttagccacaaaattgaggttacaagataagaacaacttttaacaacttgaatgctctcgttattagcaatgagcagtaagctcggcaacctgtaggtaatctaaaag

SEQ ID NO: 78602 - DNA, 882 bp, Cannabis sativa
aataattaatgaaaatgaaggggtttattacttaattttttaaaaaagaaagggaaaaaaaaaacatgccgatggcttttatagtactaattaaagaacaatctttgtttagtacattggaagtgaagtttttaaatgtagggtccatccatggtattgattagtcttgtgttagagtggtaggaagattttaatgtaggaggatcccttttttatctcttccataaggatgtttattgtgatatttgcggcgaaacacttttaaaatagttgtaattattacatttatgactttaataaagaaaaaaaataacgacaaaaatactttattttacaattttgctataacggtatcatttttgttggtaagtgctaattaagcccgctaaataataatgatttaatagtcatgtatttctaagttaacatttaacgggtttagttgacacttaacagccaaaaagagtacgacagcaataaactataagataagatacttttgccgccaattttttttattagggtcatatgtgtaacaattgcaaatattaaaagagtttcgccgcaaatatcccttattcttttttttttttggtaattgggagaaattatgaatcaatttttctatattgtgtagtgttatctcatttttttggaaaattctaaataatttttttttttggaaagcaattctaaataatttaaggtgcttgactttttatatgtgtccaattgatgttttatatttaattttcaatattataaattattcaaattttctaaaatgaaaaaaaatgtctataataactataatattgtagaccgttttaatttctccaaatatcgtaaacatagatgtttctatttatagagataaaagta

SEQ ID NO: 78603 - DNA, 1315 bp, Cannabis sativa
tccgagccttagatggcttcattttcttcctgaaagcactcatatcttcattgttgacaaaaataagggaaatgtttaggagacttctctagaaaagtgtactagagtgtcctgggcgccgataatagcctaggagctgtcactgggtgactaggtggggggaaaagtctcttgaatttgtctagttgatgttcaatctttttttttttggtgaaaagtgctcaccaaattttagtttcgtctaattcgcatgggcgttactcggtgaagcaggatcaatgctcaggttgcattgtcaacttaggcgcccatagttttagatggcctcttttgggatgtcgttgatgaaaactcatgtactagcattgtaccttgttgggtttaaggaattggggtccaaagaagttcccaaaaatctaaacccttgtcgtcatgccgcccaaggtgactaaatgtcgaactgggcgctcatcgtgcacctagtgtctctaggcagagttttgtccagacttatctctaaggtttgaaacttagttgaggtgtctctcatgtattctagtgcaatggctataagcaaattgcacataagaagttgtgggaactaaaactgatgccagccagcatacgggttgtcaacctgcgcacctagtacttaacctgggcctaggtttctgggatgtccaggttacatcctcagtttcacagttcatcgttttgtggtcattgtgacttgtttgttgaatgatagtactcagaaatgattttgttggatcttgttgtttacctagttgcccccagtgtgcaggtaccactaccatatcctggaatgtggggttccaaaattgtttcttccgtgtcacgtatcaaaaacagtatccacgtcatcaagctaatttttttagtaaagaatatacattaattaatttagttaaatttctgtcaaagaaacgtatctaagactcaaatttaaaaaaaaaataaaggaaacaaaataaataacaaattccaacatcataaatacaaaataaatacactaaatgccaaaattattcttttaaagtaacaaatatttattaacactatgtttggtaggaaagaggaatgattaaatggagaaaaataaagggagagagttgagaggagagggaggagggtaaatacaaaattaaatacactaaatgtcaaaattattctttaaaagtaacaaatatttatactaataaaaatactatgataattttaagggtaaatactattttggaccctctgttttataaaaattaccaattggaccctgtgttttgttaaatgacaa

SEQ ID NO: 78604 - DNA, 616 bp, Cannabis sativa
tatagtatacatatcattgttaggacccggtcttaataaattcatttaatttgaccaatttttaattacaactgactactaaaacttagatatctaattataattatagattagattagatgttatttttgaatatccaattggatcggatcagatattgaattgagtatccaaaaatcaaatacatcaacatccaagcgaactaactaatatttttatttagtttgaatgagtaattaaattttatgatattatacgaaaaaaaatatatgtatatatgaatattaatattaattattttttaactggatgaatccaattcaatctaatagatacttatctaaaatattagataaactcaaattaatagatggctaaaattaattgaatcagatcaaatagtaaaatttaacatccattaatatataattgaatcatatttaaataagtctaaaaatattagatgtgatcaaataaatattttgtagcaaaaataaatcataatgtaaaacaattcctctagcaaacttgtaattaaagatatactttagaaaattagatataaactcaaagtttcaggataaatactattttagatcttgcgttttgtaaaagt

SEQ ID NO: 78605 - DNA, 991 bp, Cannabis sativa
  modified_base (598)..(607): a, c, t, g, unknown or other
tattagtaacaaagtggcctgttaggttatttttactagtaaatttagattaattttagtatatttttttttagttagtttaaatcatgtttagagtatttttacacttttttatcttttaaatttgcatatttaaaatagatgaagagtttgaaaatatcaatagaaaaagatagaatatcgcataaaaaatatcaaggtgaaaaaaatcaaattcaagcccagaaaaaagataaatcacgtggaaaaattggcagtggagcacacgggccgtggcccagcaatgggtgtgccgcagcatgcttatgtggaaaatcgaaaaatacctcagtaatgccacacaggccgcgacccagctttagtggcgccgcggtccgcctctctttctacagcaaaaatcgtgggtttctcggggtttcccgaattcaaatcggaataggaatttaaacatgtgtgttttatctatctttttaggccctgaatgcctatataaagggaagaagagagttgatttcgtcaagcaattcagagggaaataaacagagaatacagatacgaatttcagagatcaactacaatattggaggcattcttcagnnnnnnnnnnacattcttttcttctctatttttatctcttttcttaaagttaatatgtgattttactttcataaacatgagtagctaaacacttaattagggtctagatggagattgtttaacattattttatggttttaatatgatttattttcccctaatttttatgtattctatttcattctttcttaattacttttaattgtctggccatcaattaacttttttatgattttgatgcgagatctgagaagtgggtattgattgtgctatagtgaaataaaactgaatttcgatatacgacaagagtacctatatggtttagataggttataggggtcctgtgtttaatacctgttgcatgttaaatttatcacgagagtagaaagtttgc

SEQ ID NO: 78606 - DNA, 1151 bp, Cannabis sativa
atcgagcaatagaagctccagctgggatgcaaaccactacccatggtgtcaatagggtaaagttcgacaatctagcaactttggttaaaggaatcacgacttcaaagttgttggaatttgaactggatagagaacgacgctcaccactctcaaatcgaatcaaagctctatcgattcctcctaagttcaagaatccttcttggcatcagtacactaggacaatagactcgttgtcccacattcattacttcaaagtgtagaccaatttgtaatgagtaagggatgatgtttggtgtagaattttccatgacacactgacgggcttagctcagcgatggtatctcaagcttccccctagatctattgactcatggaaagatcttgtgcatgcctttggcaatcattttgctccttctcaacaacgccaaattgagcccaatgattttgtagatgttaaacagctagaataagaatccctcaaggaatacattcaataattcttggaggtagccactaagactaaaatgcttagcgaggatgcaagggtgatggcactcgcagtcaggctcaaagagatgagtcctctattgtctgagcttcatcttaagttagtctataccatgaacaacttccttgatagagtggatggatttatcaagctagaggaagttgtcacttaaattaagggctcaaagaacaagaagaagaaatttccagactccccaacctttgacactgcaacgcagggcaatgggggaaaaggttgatcaaacgagggaaaaaaactaacaatgaagggaaacaaggtaactctcctagtagaaagaaagccaaaattcagaatagacccattcgtgagtacgaacctcatttcaccacctactcaattctcttaaccttgagagaagaaatatatacgataactcagtcaacagtgttataccgtaaacctcttcccttcaaagagtcagggaagagagacataaacaaattttgttgttatcacaaatattttaatcatgacacaaatgagtgtaatcaattacaagatgagatagaatttttgatcaggcagaagcatgctgctcttcagacctgaggctctagctgggggtaatgcacctataatgccctaacccttagggatgcca

SEQ ID NO: 78607 - DNA, 2035 bp, Cannabis sativa
gatgggttcctcaatggaaccaaaccttgtccacttgagttttttcctacaggtaaaaacgaagaaggtgtcgaaatgattgctgtcaatccagaatttgagcattggatcattaatgatcagctccttatggggtggctctacaactccatgaccgaaaccattgctacagaggtcatgggttctactacagctgcagagctatggcgtgcccttgaaaatctgtatggtgcttactttaaggccaaaatggatgatacacgaactttgattcaaactcacaggaaaggatcttcaaccatgggagattatctgcgacagaagaagtgttgggccgattctcttgcccttgcaggggacccgtaccctgaatctcatcttatatctaacgttttatctagtttgggtgcagagtacttaactatcatagttcagattgaagccagatctaaaacaacctggcaagagttacaagatttgctcctcagctttgatagtaagatcgagaggatgcaaagtcttgaaggacccaaaaccatgtctccaccagtagctcatcaagctaacatggcaactaaaccaaatacccaaggaagaggtagagctttctactcccaaaaccaaaatagcagcaacaatggtggaagaggagcgggtagtcgtggcagatctaggggaagaggacgtttcaacaacaactctagaccaacctgtcaagtatgtggcaaatttggtcactcagccgctgtttgctacaatcgatacgatgaaaacttcatgggaagcgatcctcacactcagaatcagcaaaaacaaggtcacaatgccttcattgccacaccagagatgctggatagtgatgcatggtttgcggacagtggaaccagcaaccatgtcacatccgaaacctcctccatgagccagaaaagtgaatatggtggtaaggaaactctcaccgttggtgatggcagtaagctcactatctctcatattggtatcggtcacttaagaactaactctagtcattttcttatgctaaaacaaatgttacatgtacctaaaatagctaagaacttgattagtgtatctaaactcgctacagataacaatgttctgattgagttttactttgatttttgcttggtgaaggacaaaacaacaaagaaagtcttgctccacggggtgcctactagatccaacctcctcaatcccagccagccatttccctttctcgttctagtccaacaaagatcaacaattctgctagagtgtccttaagtcctactgtttttaatgtcaatgtaaatcgacctgtggttgatgggtctttaaattccaaactagatgtatggcataggagactaggccatccatctactcgcattttacatcatgttttagagtcaacaaatgtacaagttcccaaaaatggagtgagaaatttttgtgtgcttgtcaatatggaaaatcgcactctcttcctttcaaattatcctaaacccgtgccaaagctgtccttgatcttgtccacactgagctatggggtcctacccctatagcctccaatattaaccatcattactacatccactttgtggatgattttagtagatacacatggttgtatccactaaaacacaaatctgaagcccttcttgccgttcaacagtttaaaacactcgttgaaaacaaatttgagaaaaagatcaaagctcttagaactgatggtggaggagaataccaggccttttctaatcttgttcaagagcatggaattgaatttcatcactcttgtccccatacttcagctcaaaatggaagggctaaacgtaaacatcgacacattgtcaaaatggaacccactctcctggcacaagctgccatgcccttgaaatactggtgtgatgcttttcacacccctgtttacttgattaaccgcttgccaacacccatcctttctcacaaatctccacatgaagtgttgcacaactagaaacctgactacaatttccttaaaaccttcggttgtgcttgt

SEQ ID NO: 78608 - DNA, 732 bp, Cannabis sativa
  modified_base (30)..(49): a, c, t, g, unknown or other
  modified_base (698)..(699): a, c, t, g, unknown or other
ctcgtaggagatcatcctttacttactatnnnnnnnnnnnnnnnnnnnnattccatgtttatgttagctctcccactcatttgcactaccgtgttcccaaaatgtacgtattaccctgacctgttggaattgttgcaataacctgctccaaagctttggcattagatgctaaagcagtaaataaatccgtgaaataagcagaaatagttgcagtaagtccttccttttgaggttacttcattcccattgctgtcaacaagtgaagaaattttattgtttgttcttcgtgaggaggcatgagcataaaaaaacttggtgttttgatccccactttgtagccaatccacacgtgatcgctgctgccaatacatctcctcttgtgcacgaaggtcatcaagaattgtttctgagcattttagggcatttattactgctgcagtctggttagtctcattgttcagcaatattaccttcttttgtacctcgaaaatttcctttttaaagttgccaaacttggatctatgccattgttgtaaagaggatgcacatgagtctaaattactcaaaaaaccttcaattgcacttcgagtttgatcattctttcatttattttgaatgatatcagctgcttcctcttgttgtagccatagctttttgttgacttcgcttttagccaatgacaatgagtctttttgatnngcgataaacgatatgtcgtaataataatatgta

SEQ ID NO: 78609 - DNA, 690 bp, Cannabis sativa
ggttaataaccttagaccatttaacggctaagtttagggtaataaccctaatctcggttctcgcatagcatacacaaatagcatatatgagcgccaccactctaaactctaagtgctagtttattatcttacctgatatcccaagtatgtggagattctaaatccctgggtattcttgagcaagcatcggtaatcctagtctcacgatcccgagatttcacaaataaggttaatcccaaattcaattttacatattcacataatttgcattccaattatatattaacatttagagctcaaaacgagcttttcaacgatattaagaacgacccaaacggagtcccaagttaaaagttatggaaaaataagaaactgaaaaattcccgagaaaattagggcctcgcggcgtcgagcaaggccgtggccgcggcgacaacattcaggttgcccacgccgcagcgagcccagtcatggccgtggcgagggccctagaaacccccgaaaaatgccattttctcgtacttcgaaaatcaacccaaaatttcataccaaactcatccaaatcatgcataacctcaaattcaaatcaacatcaactcatcttaattttagaacccaaaagagtaccacatcaaactcaaaataaccaataaactcatcactaagcatgagatataaaaggatttatat

SEQ ID NO: 78610 - DNA, 1736 bp, Cannabis sativa
gaattctgcttggctacagtttcacaagttataagaacctggagctgtaccatcttgatagcctatattagccatgttcatttcaatgaatgttgttttaaactatgttttggtattgcttgatcaggctggtgttactggattttgcatgggtggtgctctctctattgccagttctgttttggtccctgaggttgatgctgttgtagcattttatggagttccttcatcagagcttgcagatcctacccaagctaaagctcctgttcaaggtcattttggggagcttgataatttcgttggtttttcagatgtgacggtatagcatttcctttcatttggtcttttctgctcttttattcctttttttatcctgaggtttgtgagcgtttctttagagatgagtgggaatgtcagcttttcctagttacaagaacaaggaagctgccaagtatgcagtaagaactctataaaagctgtgaaactattagcaatcttcaaacaaaagacagcaaaatgagtctttctaagtctctagcctcatcgcctatgcccacacacttttttcaggcaatagttccctgtcaatgcctacgcccacacacatttttcaagcaatatgttctctctcaatgccttattttaatttctgtaactatacttatttttatacaatgtgtgatgtccttggaatataagcaagccattctatattacatccgagccaatccccacggatcatatgtgagcgcttaagcaacaaatggttgcaatgaccttaatgcagttaagtgctgattgcatataatctaataatcacagtgaatgcaatctctaagatggcctaattttgagttttggaagatatagacaaatattctccaagtaaaagggaaagagacaagttttctcatttgttcatttaaatgaattctcaggctgctaaatctttggaggagaaactgaaagctgctggtgtcccacatgaggtacacatttatccaggcaatgcacatgctttcatgaataggtctccagaaggtgtgcagaggagaaagagcatgggaatggcagatgaagatgaagctgcggctcagctcgcttggtcccgtttccaatcatggatgacaaagtacttatcggcttaaatggtttgcaagttccatataataatttaatttttggttgcagcctaaaataagttgcttagaactctgaacagatgtttcttaatgcaactattagaactctgtcctgcgtgtagtaggtaatttgttatttggtgaatatatgaagctgctgttatgattctaatctcacgtgtgctcctgagtttgaattttcgggtactgcgacaaaacaatgggttgagattgcgagttgtgagtgattggtttggtcataatttgatgattagctccaggtgattgagagtgattatctctaagtgattgagagtgtgagtggtttagttcaaattctacgagtatagaattcctagtttacgtagttagtggtgaaataatggggcattatattggtcccatcaaacgaagtgattttcgacgttgcctcaaagaagaaaattttggatgtaagattggtgagagcactcacaagtcacaatggatgaaattgttggatataatgtaaaatagagatagctggtaaaaattatatcggtagatcatctctttccgctccagtagaagtgtcagctatttttttggtacatt

SEQ ID NO: 78611 - DNA, 508 bp, Cannabis sativa
gtgggagttgatatggacagttacaatgtttttaacggaaacttgctatccatttggtaatagtacattcttagggaatgggatagttgtgaaggtagaaaaacatgcaatattagagcacatgtggtgtgtagcaccactatcaattatccaaggtataggattagaattagagggtttacctgcaaggttggatgctacagcaggcatggtattgagatcagccgagggatgattgtttaactgttgactgaggagggaaatcaactgctgacattgagaagaaagatcagcagtggtagagggtccatccaagtcagatttggggttgctggaagaggcattattggccttagctttgcccttttcttgtttctttttatctccataaccgggtgaaaagtcgtggagaaagtaacacttatcaactaagtgtccaggtttgccacaattcgaacatgatggccttggtttcttggccctcgatggattcgaaggaccagcagca

SEQ ID NO: 78612 - DNA, 520 bp, Cannabis sativa
  modified_base (469)..(493): a, c, t, g, unknown or other
tatgagatttgttgaaaaccttaatttacatatattacatatatatcaaataccataaaaagacctaaaaataaaaaaataaccatataaatttgtcaaccttaaatatgccatatttattgtaagaacttttaaaatcgtatagtaggtgtaattattcctctattttattatatagattatagttagttcccaaacttttttatttttatttttgtgagaaccactttagtagattgaaaaacttattttcagcatgcaaagatcaaagatgcatttggaaaatcaacaataaaactttttaatgtctgtagtaaaaaatgtactcattttattttctccatcgcaccaacaaaatatttacacattacatgattataaatgaattagagaactgattcatgctttgagcggtatttaacaaaagttgtaatattttgtacaataagggttcgtttggaacgccgtnnnnnnnnnnnnnnnnnnnnnnnnnattatattgaattgtattttatgcaat

SEQ ID NO: 78613 - DNA, 608 bp, Cannabis sativa
  modified_base (291)..(293): a, c, t, g, unknown or other
  modified_base (574)..(583): a, c, t, g, unknown or other
ttttttttttttgagtgtagcataatgatattttacaatccttaatagcttaaaggtcccgaattcgaaccataacctctctttttttcccatccctcttttttgggttgatttttttctttagacatagtagtaaactgatttttttcacatatatgttacagctagtcagctagaagcccaacattaggagtactctctctctctttaatcaattacataattgtcttcattttttttgtcacagctattctcaaaccagctatcaaggcttcatactcagcctcggtnnntgaagtgtcaaattggaatcttaaggcatagtgaaacttaaagccttctggcgagattaatatcacccctgcacccgagcgatattcattagatgctccatccacgtacaatttccaagtgtctgtgtctcactgaacaagtggaatttcatctagaattattccttctatcaggaaatctgtcaaagcttggcccttgatggatgttcttgggtgataagttatgttgatcatttaacacctttatcggatgtgcttggaagtgttgggttttatgcccnnnnnnnnnntccatttcaatgtaatccattttat

SEQ ID NO: 78614 - DNA, 587 bp, Cannabis sativa
gatcttgttctaaaacctccatgggccagataggaaaatttaattttaaagctgggagaggtggaaggcttaatttagccttcacgattggaggaacctatgtggaagaagatttttattgttgagattgggggtcctgagcctaattcccagaagagaagtttcttcttgttattttcttagtctcctaagacccccttctttcttgcccaaacgtgttcgagctttgcctccagcctgttgccaattgttgaagcttctgtttagattttatcttgcttcttttactatttccaccataattagatctcttatgatttttaaaggtaagtccctcgtcttcatcttcctcttcctcctcatcgatgacaatttgcaattgttggaagggtgccacggcaagtgcaacttccataagttccccatgggatgggacatccacctcaactgttggaggttaaaattgaggagcttgagagttagagatagtttgcaaagctgaagcctaaaaaatgacctcttggcccttagcaaaggtaatggccgttttgcatcagctttggaagacttcccaactttccttttgc

SEQ ID NO: 78615 - DNA, 600 bp, Cannabis sativa
aaaatataaagcgaagaaactaattacgtaaagggaacaattaaaaaaccaattacatgacacacataaacaattgtttcttttaaaaaataaattataataaaataagacgtcacatagaaattctcaacaaaatgatttagacaagtaattaaaaatataagatattgcaacatttaagacttgtagacgcggacagctccaccggtatgaatgtccaaatctgccgatattgggtattattggttgaatttgccagtaataatctgtcggtatgaatgggtcgctaatacaattattaacgactaaaaaaggggctctaccggtaaaatattaatattgacggattaatagcggtatggttcgtcgatatagagtactttcatttatatgatgacatatcaataccgatggacccactatagtgttctgccgatattaatattttttaaataaaaaaatatttttcagtttctaaaacttatataataaaaataattataattataattatttataaattaatataattatttttaaataaatattttttacctatttatctacttaaatttgagaaatcaaacattaataataatt

SEQ ID NO: 78616 - DNA, 712 bp, Cannabis sativa
tatagaagaaccattgggaagctgcaatatctgactattataaggccagatatatcctttttagtcaacaaattaagccaattcttggttactcccaaagctaggcatatgaaggctacaaagagggtccttcaatatgtcaaaaactgtcctgggcagggtttgttcttccctgctgcatcaggaatttagcttaaagcctatactgatgcggattggggtgcatgtcccgatactagaagatccactacaggtttttgcattttccttggacaatccttgatttcttggaagagtaaaaagcaacatgtggtttttagatcctcagctgaagctgagtatagagctatggccaatacctcttgtgaacttgtttggttactttctgtccttaaggaattgaaaattgaacacaagggtcctgcttggctttagtgtgataacaaggcagctcaatacattgttgcaaacccagtttttcatgagagaacaaaacatatagagattcattgtcacttagtgagggaaaaggtgcaagaaggtgtgattaaaaccagtcatgttagcacaaaggatcaggttgcagacatatttactaaggccctcttccctacttcttttaatgctctcaaaaacaagatgggactaataagcattagctctccatcttgagggggagtattaagtgttgtgattactgctgattagtttt

SEQ ID NO: 78617 - DNA, 1030 bp, Cannabis sativa
ttttttttttttttggttaattagatttttttttttctaaatttccacatgtaataaattatgcctcaaaattttgtaggcctttaaaattatataaacgcggtgattattcatatactaaatcatgtcccaaaactataatatctaccaaattctgcccttgaattttgacatatacccagagctagtcctaaaatttagtgggttatagggaaaaaaatatttttaaacccttattttttttaaaaaaaaaatgcagtatttttaaaaaaagaaaaaaaaaattataattttaaaaaagaaaaaaatttgggccctaggcagaggcttagcctatctatacctaagttggaccatcatataatatcaaatcatgcccataaactttcatcaacatcatgtgttcgttaataaaaattttcaatgtcaaaatttggagacaaaaatacataattagttttttttattattattatacatggaactaactatttataattatgtttaacccacaataaattactcaaaattttcaaaaaaaaacaggtgtaatgtattacaaagtttacaactaaaatctattatgtctatatgaggattcaaaattgtataaactcatatatatttttttacaggttgtgcaacttgttgaataaaccatgatttgcaatctgcatgacaattagatttcaaactgtctttttgtgtaaaagaatttaaagaatcatatgtccaaacataacatgatagtgagatatatgcagttgcaacttgctaagtccatttagcctttcttttcttttctattaattgtacatccaataaagggcggtggtatcgagattgagacatttcctctaaaacaaataaggaaataaatatccacgcaatttcaaatataataacaaaaagaatggactttcatgcgaatcaaatagacatagaatatttcctcaaaataaataaataaataggcatagaaaatagaatagattttgattgaaaactaagatatgcggtctagctactt

SEQ ID NO: 78618 - DNA, 1234 bp, Cannabis sativa
cgtacatcacggattacaatttgtgaaagtataataacaggacaaaatcatatccctataatttatataattgtttgaattttattttagtctggtttttcacataatatttgagttagtttattaaacaacatttatttactatgtacatatttatgcatatcaacggaatgaaaaagtgagcctaatttatatttaattagtactttaagtatgaatattgtacatatcatagtttatatttttttgaattgaaatggatcaatttattaataagatgaatcattcttaacaatctttgcaaactcacaaggtgagctgtagtcataaaaatacgaactgacaaaaccgtcttattagcagaacgttttacaaaataaaacttaacattatttagatcagtggcattcataaaccagcaggccaaaagcagaaggtaaagaagtcgaacttgtgtattgcttgaacaacaactaagcaatcggattagagtgagactttttgccatcctttgctttttatattagttttgaattatttacatattttgtatattatttttattgttttgtttgaacatttttaattatgatttttgtaaatgaactatataatgtaattttattaatgttcatataattatcaaaattatttcgctattagtgcaaactgtccacactagggacagactacactacccattagggaggctctgccccttaacttttctttattcaatgttgttttttaatacaataattagtacttattctatattaacattttaggataatccgtccacagtacactttcttaaaaaaatattttagtagaactcttatctgttttgccatataaaagaatttttcagttaattttttatttataatcgtacacgttataattatttaggacaaattgtaaaattttacatttttttgagtattttcccatgtcgaaaataagatttatatatttagttgcacacacgactattttttcttatgcgcgttgtaagtaattatttgaacttaatttttgacacggtaaataattcagaattttttaaaaatttacaagtgatcttaaatagctacaacatacgtaatcataaaaaaaaattgaactaaaaagttttctgaacgccaaaacagatagaagttctacctaatcatctctttaggggtctacatttccaacattttattatattttaacttttcaaaatcaaata

SEQ ID NO: 78619 - DNA, 606 bp, Cannabis sativa
aattatgaaagtgaagattcaatttacttgattgataataggaattttggcttttgtaacaaattttcttctaaaggttagggttcgtgctttgttttgagttttttgtatttaattattactagttatcgctccacgtgctacgcacgtaaaatacaaattttatagtacgagtagtaaagtgcgttcattaaatttaaaatactaaatattttccttgaattataaaatttgtagaatcacattctattaattttttttgtacgacgaaaattcccttaaactatagcaactatagcaaatatgtcttttatattacattttgttcattttgaaaactatttattgatgtagtactgatgtgtcgttaatatggtgtgattcaaaattcttattagcaaaaaatacaagcataaattgtgctttaaagaaaaaatttaaaaatattttaagagttaatttttgtatgtttagcatcaataaattaaattttagataatgtcaattagataattaaattattgtaatgtaaatatatttgtgacacgtgactacatgaaaaaaattgatagaaggtaatagaaattacactaaattgtaattttt

SEQ ID NO: 78620 - DNA, 580 bp, Cannabis sativa
tctcgagtccaatgcacccttgtgatgttccatctctttttcgggtggttctcgtatggtggcgtgctttgtctcagtctttttgttaagaaatgggtgattttttcttgtgtaggttgggtgttgttatttatttttttacttttctattgtaataatagtgtttatctgctcttttaatatttttattttagtaaatagcaacataccttacctttgcatatttattttgttatttacttttttaatttagaaaaaaaatacataatttgttattttttatactttttacttttttttttttttacaatattctacaaaaacacacacaaaaaaaaattatatgaaaataataggaaaaaaaaaacaacaaaacaacataaaaacaatatataaataacaaaaaattaacaacaaaaacaagattacaacataaaaattcatcaaaaaattgtattttttaaaataaaaattttaaaattccgtacaacagcattttgtaatttttttattgcttttgtatatttataaaattatcccttcaatttatctttataaaacaaaattatttaatatatgg

SEQ ID NO: 78621 - DNA, 762 bp, Cannabis sativa
  modified_base (707)..(710): a, c, t, g, unknown or other
ccttgtttttccaagaaataaaagttcaatatacaaaaataaatatgtttaagtttgacctttgacatcctaatatgagtaatgatataacaaagttttagtttagataaatgtgatttgtcaaaaaatatttaggaaaataaaaattcaaagggggcattaaataaataaaaagatcatttctcaaatacacaaaactaataaaaaaaaattataaaaatacggttgaaaagaattttaaatatttttatgattttatttaaaaaaaaatatgtttttatgtatttttatgttgtattattgtttattttactaatttttttattatttgtattctattttttttattattgtttggatgttatttttttaattatttttatataattttttgattgtttttatgttacaccataaaaataatactttatatatttatcctttaaataaatttgtcaggaaacattacaaaaatataacttaaaaaattggaaaaaaaaattgacaggaggagggaaggacctcataatatatatctttgtctttgtgtgtaaattttataagtggacatatcattattcttaaaatacataaataatttaccttaaatttttatacattatattatttttttttttttttttgtaaaggtagagaaaatatattaattggagagagtaaatcatgaaataataataataataatnnnnataataataataataattatttaactcacatataaagtgtagttacatttag

SEQ ID NO: 78622 - DNA, 758 bp, Cannabis sativa
  modified_base (467)..(472): a, c, t, g, unknown or other
attttactattagacggaattttttacaaaaatactatttttttttataaaataactataaaatatcaaaatagaataattaaaataatagtagaacaattaaaaatcaacaatacaccgtataaaatttatacaatatttaaaaaaaaaatcctgtttgatagtataaaaagagtaaaaaaattggaaattttagcatgtgcggtaaaaattcctttaatgaatctttttcaacaaaactagtatttcaactattagactcttttcttcattaaacttcaaataaaacttaataatctccactcgcaactccaaatcacttaaaagaacacaacacaaaataactcaacaataaaataaaagacctaaaaataaaaaaaatacatacacaattaagctcgggctaggcctgtgcctagggcccacctagcccagagacccaaatttttttttcccttttaaaattnnnnnntttttttttactgactttgaaaaataccacatttttctagcataagggtccaaaaataattttttttcttgtggcccattttgtttcaggatcaaccctgtttattaataactcttttatacaagttattgatgtatatagcattattgttattttgtatttttcaatatattactattttgaattaattattagttttgtgataaatttaaatttaaggattaaaatgtaaaattaatttttaaaataaattaaaataagagttagaatgcaaaaaaaaaaaaaa

SEQ ID NO: 78623 - DNA, 794 bp, Cannabis sativa
aggacaccctgctgaaagagttgtccaccctgtattgaattcatgtaatatttctattagtaataaaaatgcaattcagtttgtcaagctcgttgtcttgggaaaattcataagatgccatttccaaaacagtccaaaactttatactgagccattgcagctcattgtttttgatctttgggggccttcccatgttacttcttacaatgggtataaatattatatgagctttgtggataccttatactaggttcacctggatatatctcctctaaaacaaatctgaggctctaaaaacttttcaaaatttcaaagctgaaacagagctgtaactaggaaagaaaataaaggttttacaaaccgactggggtggggaatatagagctttcactgaaccattaaaacaggcaggcattgtgcatagacatccttgtcctaccactcatgaacagaatggccttgttgagagaaaacataggcaaattgttgagcatggcttaagtcttcttgctcaagcctccttacctctaaaattttgggatgaggctttcaaatctgcagtttatctgcataatagattaccaactcctgtcctacaacaacagtctttaattgagctgttgtttcacataaaacaagagtatagtaatctaagaatttttgggtgtctttgttatcctaatatcaggccatacaataggcacaaactagactttagatcctctccttgcacctttgtggaatacagcttaaatcacaaaggatacaaatgtctagatgcctcagggagatta

SEQ ID NO: 78624 - DNA, 721 bp, Cannabis sativa
  modified_base (430)..(449): a, c, t, g, unknown or other
acgtgatcatcttctgatcgtggcagttgatcaaacggcctacgatcgttgccagttcttgaggcttaattgctttagattagaaacggacggtgtggatttcaggggcgaaaagctctttatgtctcgagaattcatagatgatgtggagacgaactttgtttctcttgaatgttcttaaacgcggttatagcttcgtctttacggtacgtattattattaaacttctcttaatctcaattaataatcttataattaattagttacttaattacctatacaatagattaatatattacagcttttcacatgagaggcagtttttcttagagatggaatttaaattaaccatgtgaaaactggatatgcatatggttattttattttcttatttcgttgaatagatagttacattacagtattactatannnnnnnnnnnnnnnnnnnntatatatataacgtcataattactggtataaatgaaaatgaagagctagctgatcaaattttttaacaatttataggcataatacatgaaattactttttctagaaaacgaataaaataaaaagaaatctgtaacttgttgaatctgtcccagatttctcctagggcccgtttggtacccaggactggattggattagacagattaatttgtccaatcatttgggcatgttagaagtctgaataactaatccagttaacctcatctgtctag

SEQ ID NO: 78625 - DNA, 988 bp, Cannabis sativa
tccatgatattcaaataaacttaaagatggtgatgtgtaaaaattgagacgtctaatcctacacagtaacatcttaatgtaacaaaaactaataattgtctaaatcaaataaattaaatgaacaagtttgggaaatctgatcatacaccagcataatggcatgactaaaactaaaatagtgtggaaaagaaaaattcatatgataaacttgaagcagcatctgcttcttcaaaagctctagttctataagataagtgaagataagtatttgagcaagagataaaagtttgaaactttgaattataggtacatgcaattatactataaaagagctctccacatcttacatggaggtgccatgacaggtgggaaagtgcccaacgatccagcaccataatccacaagctgcctctgagcttccaactctttctgaactagttttccatagccccctctacgtattacatattaaggaaactaaacagtagaaagtttcaactcaaaatttagatatgcaatttttcaaacacaaacattagaacattaagcaaataaaagtaataataaattagaacaaggccacattttcaaatattgccaaacacagaagaaccaaacaatttttataatttaattaagatataactaatcaggcacaaaagatcgaaattggttctgctttaaaagcccaccaaagtactattggcaggatgaaagatggattatacataatgcctttcaactgtgtacctaatctatatccttatcattttccttttacttaaatttaggcatattagttagcacggttaattaataaaacttattatatcccacctattccgtaaagtccaaaacaaaccaatccacccatctgtcatcaaaatcgagcatacctccttaacaaactgtgagctatgaagcttacttcaacaatacataatgttttttttcggtagcaatactatggttaactgtacctacttct

SEQ ID NO: 78626 - DNA, 864 bp, Cannabis sativa
caaaataatttgtagagtccaaccaacttatcaaaaattaagtaaaaattggaacaaaatctttggacagtgatcttagaatagtttcgagagtatttcgggctcacccggctttcccacaaaatgtagggctgtaattgtagatgagattgtcaagaactttttgagtaggtggtctgtttagggacttcctcgcctcgctgcatagcaaatatatggtttgagtaagttgaagagaatgtatctatctatctttactttccttctttttgaacttataactttacatattgttagtttaagtaactatgctcaaatttgttcctatgtacatattggtttagtaagaaaagactaaggtggcgtttgattggagagaatgaaatggaaaggaaacacttttcattccattcttttatttcgtttcagttttaagtattgaaatgtcattctaaataaaatgactcttccatcattttagtggaatgactattctattttaaatttgattccattctattcttattcttattctcattcccgtttctattcttatgtttttattcctctcaacaaaaccacgcctaagttaaatggagcagaaaagtggaatgagggaatggaattaggagatttgtgggtggatttgattacagaatgataattgtccataaacatgagtttggataccttcatgttttttttcctttctttccaaccaaatataaaattctcttcttagtttcacacttatcttaaaatgggtttcttctttctacccttttcgattttctattcctctgtctgaacatggctttctattctatgattttgaaaatgatagcctggaaacaagcatcgagc

SEQ ID NO: 78627 - DNA, 518 bp, Cannabis sativa
gggtcggacagagacggaagaagtatgccaccttcatcaagtacgagtgcaaaggcagtaattccccttgtttggaatgagcatccgaccagccacacatctccttcttcgcgtttctggctcgattgttggaggagggaacataacattccagctcgcccaaatagccgaactggtccagatcccttaggcgtgcctcagtgaccttggacggaggactcaccgacctagcacccaaggaactttgcctcctttgaggaactgcagcagtaagctccttagtgacgtagtctactccttcaaccaggacatcaccgtccgtgtctactagctccccgacctcgttgtatcctccaaaatttagaggtgcagcctcctcctcttcctctgcctcggaaggactgcaaggactgacatcaccttgttcctttatctcctggacttcagcgtccccttcatgatccccctcctcctggacgggtggatcctgttcggcactaggtaaggaagcgtgttgg

SEQ ID NO: 78628 - DNA, 791 bp, Cannabis sativa
tttttttttcctttttaaagaatgaaaatatagattttgttactctgagggaaatagaaaatatgttattttctcaaccctttaaaatctttttttttttttttgctggaactttaaaaatctatttaagtatatattttattaagtaaaactaaaattattataatataaaaacaaacatattcatccacatctaaatatatatttgataaattaatacatttcaacatcttatactcaaatttatatacctttcatttttattgatataatatataaaagggaaaacatacacaatcccattttttttttatttctactagtgatacatagagattgtacttaaatacacttaacaatagaattaaataggtttagcctttagatatggcaatcaatggaaattggtggcttgttaaccaatttgaggagtcctagtaacaattccattttcattaacacgaacacgaacccggtcacaacgaaattgagtgtcaccttgggcatcctctgccacaacaatggcattcactgtagaattttctcgctcaatagtctctttagcaacctcaccttccactcccaccagctcaggccatgatgtcttccctgcaaaatatataaaattatataattgtaattaatatttattatatacttttgtaaattatataatgacttgaccaaataataaaaagagttgttgtgattaagttgtggaggagtattatagttagcaaaaaatagctaacattttgttcacagattattagagagtcacacattgttaa

SEQ ID NO: 78629 - DNA, 550 bp, Cannabis sativa
tgcctaccaaatatcgaagaagcccttttgaagcaagccagtgatcatttgtgggactcttgagatactgggacaatttattaactgcaaaggagatatctggtcgtgtgagggtcagatattgaagggcaccaataacactgcgataaagagttgggttgtccattggagtgccttgggtggcacttaacttcgtgtttggacacatgggagtaggggttaaggctgctgcatccatgttggtgcgagctagtaagtcagatgcatatttagcttgagtgagatagatgctagactgatttcttgtgacttcaaaacccaaaaaatacctcactggaccgagattctttaaggcaaattgctgatgtaattgagaaataagttgattaataaactgaacatcttctcccgttaataggatatcatcaacatagattaagaggagagtaagtttgccattcttttgtagaaaaaatagagaattaccggcctttgaattatagaatccccattgttgaagtgagtgtttgagcttatcaaaccaagctcg

SEQ ID NO: 78630 - DNA, 565 bp, Cannabis sativa
ttcacaagtccaaagagcatgggagagagattcttcaaattggccacagttagtacaagttgggttaattctcatacctctatgaataagattggactttgacggaagccaatttcgacacattttccatccaaagagcttcattcggggaggcaaattcagattccaccacatcttccaccaagcatgagtttgatccatattagagcatcgggtaggagtaattatctccctagctactctatacccactcttcacaatatagttcccatccttagtaaaaggccaaactagcatgtcctccgattgagtatttatagggatcccaaatatccatggaacatcctccttatgaaagagattgttgagagtatctacattccactcttccttattatttagcaggctgcttactgtgatattgggatttgcatctctaggtcggtttacaattgtaccattagaccttggtagccatttatcttgccaaactcgaatggttctaccattcccaactctccaccgggcactttcatatataatctcccttccccaaacaattcct

SEQ ID NO: 78631 - DNA, 853 bp, Cannabis sativa
agtcatctttcccatcattttaggttattatgctaattgaataagcgttgtaggattcgttaatgtagtggtggtttaacacaaaatgcaagtgagtttataaattcatctttggtgactttattttgatcttactaggtggagctgagagattgattgttgacgcggctgttgaacttgcatcacatgggcataaagttcatgtcttcacttcacaccatgacaagaatcgatgttttgaggaaacaatatctggtaagtgtcttaaatttctgatttctgtttgtgatctaatctcttggctttagtgtgaagtttgatttttttgaagaaaatgtctataatatcgaattacttaatcttgctctatgctaatcattcatctttagatgcaagcccaaagccaatgcaaaagaaaagcaaaatcattttctgccacttatttattgcatgcatacattagatgtagttaaaaagagaaaaaggtttaaaaagaaaatatagaattggaatgaagaattatgaaatctgaattttttcaataagacgtaatacgtatagtgattcctagaagttatgagaaggtatacgaataataaagatgtactacgtggggcatctgttcttaggctgcagtttcaccagtcaattatggatcaagttgatagaggaatttaagttgtcatgtgttatgccaagatgtgtaccacaactgttagttagcaagttaaatggcagcaaacgcaaaataaagatttggagaacggcagtattagcaataatttgggctgtgtggttggaaaggaatgctagaatcttcgaaggggttgggtgttcagtagaggacttgtgg

SEQ ID NO: 78632 - DNA, 632 bp, Cannabis sativa
aaatgatgttggagttgatgttatttatattggcacatttattcttaaattacagtttatagttaagattgtcttgaacagttttgctcccgcttttggttaaacaaggatattcttttctttttgtcaataataatattgacattatgcttgacttccaaattattagaaattatttttattctgatagtctttacaaattgccattggctcccttagctttctcttttaatgtcgtcaatattgtgagtaagagatcttatattaaggaaatatccttattgttttgtcacaaagattggggcatatttctaaagaaaggattgatcacttagttaaagctgaaattattcctcttcttgatgcttttggttgggatacttgtgttgattgtactagtgaaaaattgactaatataagaaagaagactgccaaccatattcaatctttattagaaattatccactgacattagtggaccttattccaccaagttgtgtagaaacaaatattttataactttcatcgatgatttttctcgttatggttttacctacttgattaaagaaaaatctgacactcttgaaaaatcgaagtctttcaaaatgaggttgagaaacaattaggaagag

SEQ ID NO: 78633 - DNA, 536 bp, Cannabis sativa
aagtcaaatctctaataaacttcataacaacttgagaaggttagtattcaaatttttcaataggaagcaatttgtctttaatgcataatcatagttgtcagagattgtaactaacattggtagttacttagtgttacaatgagttaattattttcagagaaagttttgtgaaagtgaaagagtcttccttttagatagaggagtgaagaaggaaattgtaagggcacatttggttgggaagaatgaaaacacacgaatagaaatgtagctattatttttagttttattttttaattttaccacctcgaggacaaagtgattttgaagggtgggatgagaagatagaacttttagttcaattaagagatttgtcatgtttcgaagaagacccgttacctatcaaaatgggaatagccaataggaatggtaatgaaacgaaataaaatttaatgcattggaatggtctttcattccgtttcaaaatagaagaagtcattccaccaaattggcagaaaagtcattttattggaatgaca

SEQ ID NO: 78634 - DNA, 2013 bp, Cannabis sativa
  modified_base (35)..(40): a, c, t, g, unknown or other
tttctgatctatactaataagtaaatctgattatnnnnnnatgagttttatttaggatataaaatccaacagcctggccattagctagatgaactcccggtctctcgagaaaatcttccagactgtttgtttggtacgagctacttttcttgaactgaatgaatagctcgataaagggtggtttgcgacagtaatgatgatttctaccttgaccctaggtcaaagtgaaggtttgggatccgcttctggaaaagtgtttgggacacctgcgcgaacaacgtacgtccagttagagggtaaaaatcaccttaagcctctattgtactcccagacaaacctcccgtacacgctgcctccaatccagtctagataaaagagatgatgaacgagtggtatcatcggcttaaaattgtcgcttgatacttctcactcttcgaagctagaggaagaattatcatttgaaagagtagattttgcacgggcctttagttgatcctcaaagagtaattgtaaaacatcttcgtcaatatgattattaccttcccaatagtcgtctgaattcatcaacaaaagaagaaagggaggtaagtaccgaacaaaagtgaagagttcaaattgaaataacttgtttattttgacagacaaatccctggatcaatagaaataactccatccaaatgacgaagaacttgacaaagattgagaaaaacccaaaaattgccaaagtatcgtacgagcctaagttcaacaagttttctcagagaaaaaatgtatatgatcgataattcagcaattaaatccccgggcaagaatatttaacaacaataattaggataaattcaagtttaaacttgaataatgaagaacattggcataaacataaattttttgcgaaaaaatgtgtaatgttaaatgcaagaaaatgaggtaaaaatgtacataaattaagatacttattcactattagagttgctgattgaaatgtccaaagccgaaatcgaagattgaatgcttgaagtctccaaatgtattcttaaaaattgaaaggaatgtggtgttctcttgtacttaaaaggcttaaaaaggtgtaaaagtgcaaaatgagtctttctttttcttttttacgacacattaaattattttaaaaattttaaaaatttatagaataattttaataactaagataaagttttatatatatataaattaaaattgaaattttctagatatcaaaaatacaaaaagtgtattaagatatctatgtgtttgggaagtgcacactatcaaattttccatatatatatatgtgtgtgatattttataagggtattagcacaaatgggtcttgcatttttatcaaaattgcagtctaaaacctaaaattttgaattgtggcactcataatcgaataaataagtggagtaataagtctcatctcataagtcacaaaaataaataaataaaaaacagggaccccattcatgtcactttaatttttaaaaagttcaattcaatagacatttgtactattccaaaataataagttgaggagaatttgtgctaattctttattctttcataaaaagaaaaaaattaataaacttattaggcagcaggcaccaccaattgacgattatataaatctagcataatcaaataagcattattactatagttcataagccataaattttgtgcatggttttattggctatatatactagcaataaataaattgcttaaaagcttatatatcaagcaataaataaggtcatatgtaagttgatactctagaataatcctcttgattgtaatatttgggtgtgctgaaatttaatggtagcttatagtagggttttaggaaagagtaccaaaaaaagaaccttaataataatttaacaaagcacatatatttcaaatataagtcaatatcaattttgatattgctatttgctacaatttttgtgtgtacatattataaaagaatgtaagtactttttttttttaaaaaaa

SEQ ID NO: 78635 - DNA, 1839 bp, Cannabis sativa
cagttttaagttatgaagctaaacaacctcctaattttcttcaaattttttatacttgaacactagaggcttattgaatcttttttgtggttgtggttagaattttattatttttttttgttataaatgatttgataattattattgattttgctttatgatctataacttttattgaactttatctaatttacctatttatgaaatttttcattttttcaaaaaaaatatttccaaaatttttttttaaaaaaaaatatatatttccgcgcaacgaaaaaatgtataaataattatttttttttagaacaatacgtaaataatggtttgtaagaaaaatattgtaaaaatataaaaaaaaattaaaatttcataaaattgtacatttttaattatttaagtatttataaaataatccctattcttatattaattaattgagcaatgctaaagagcaccagtgttgcctagcaccttcctatgtgtcaatatcactattagtacaacttagtattgtgtcccatataatttaatataatatatattatggagtatagctagcaaatcgcaatgcgacatgttcagaaggtgctaggcgtgcctaatagcaatgctctaattaattgataatacccaaacaaaacggtaattaattaagatgggagggtataagaattatgagaaatgttaaaggagtattaacggagtctagtatgtaatatcgctattggtccaaataaaaatatttttaattaaatcgcaagacgtcatatctagaaaactaccactcgtacctaatagcaatacccaagaattattagttactccagcggcaagcgcaacgtatgtgtggataggagtggacctttccatacatgcccaccatctcaggcggcctacattaattaataagttaaacttttgtgtcatataataataataacaataggccctttcacactactcctcctacacctatctatctatctctgtatatatatgtccattacatatgatatgccatcatctctctatatctctgtataataccatcatcatataatggagggcaaaagtaatatgtatgagggtgtagaagtagggagagaagttaaggtggctaacaagagaggagcaggaggttgtgaagggcttcttagggttttggggtttgtgttttgcttatcggctgctgttattcttggagttgataaacaaaccaagattgtttctttacagcttgttccaactctcccacccatcaatgttcctgctcatgccaagtggtattatttgtctgcttttaagtaagttctccttcttcttctctcaatttttttactcaaaatttaaaaatatattttctgtttttctaaactaaaatccatttggacaataataatgtgtgaaaatattaaattttttaaaaaaattgtaattttattatcatataattttttttatataaaataattgtaagacaataaaataaaacaattaaaacaatactgaaacaatgaaaaataatcgtataaatttaacacaatatacaatatttttttaaaaaaatccgcttttcaataaaaaaaaaattaatttaatatataaaaaatccgcctaaaatagaaaaaaataataaaaaaattgaaaattataaaaatcctattttgtaggagtaatacttgagatgctagaaaattctattagacatttttttttatatatttatgggttaaaaaagaaattgtacttgtactactaattatctaatatataatataataaaagtcaaataattatatttttaatctcaatatatgtggtaatactaaacactaa

SEQ ID NO: 78636 - DNA, 2961 bp, Cannabis sativa
ttagcttctgcttggcataaaaggacagagaaacctttcgcacaaaaaaaaaagaggtaaggtgaaaggggatctccttgacgtaaccctcgtgtttgtacaaccttccctttaacttcaccattaatattaaaagaataactaaccgaacgcacacattgcataagtagatgcacccaaggaaaggcaaaccccaacttcagcataatggcttctacgaactcccattcaattctgtcatatgctttactcatatcagtttcataacagaaaaacacctccttctcctagtcgatgcccgtaaattatgcaacagttcataagctaccatggcattatccgtaattcgtcgacctttaatgaaagcactctggggaaaatggatcagttcattcaaccacggttgaaggcatcgtacaagaacagttgaaacaattttgtacaatacattacataagcttattgggcgaaaatcctgcaccttctttgcagagttgacctttggtatcgaagtgacgatggtggaattaataagtgataactctgcttcccctcgtaaaaattccaacactggctttgctaccaactcaccaacattgtcctaatgcttatgatagaacatggcattgaaaccatcgtctcctgggcttttatctgccggcattgaaaaaatagctaacttaacctcttcaacagtaaaggggagcaaaaggtttctatgtattctatttcattcgtacttaattactttaattacataataactaattaaatattaagtattttcatacgagatatgagaagtaagtgtccattatgctatagtgaaataggaacaaatttcgatctaggatgagagtacttatgtggtttggatagcttataggatttttgtgtttaatatcttttacatgtttaatttatcacgaaagtagaaaatttgcatgtaattcagacttatatatatttgagaagactataaattacttgagtaaacctgctattacatagaattaagtataagaattgaatcgtgttagaccataatagatagatacaattgaaatcaataaccctaacttttaatcatcgttaattttcatatatcaatttacttgcatcttgtttccttattctattgtctttattgcttttcgttctagtgttaatcttttcttaatttcgaacaaccaaatagaattataaattttattttaaagtacttaactacaatccttgtgggatcgatttcactctttgtgagtctataacttgttaacgatacgtatacttgcattaaaaaatatcacatcaagtttttgttctacctaataacttaacaggggctagatcatgtataaggcaatctgcaattgaagccaataattttgagatcaagccagccatattgtaggtggttcaatcgacaatctagtttaggggactgccattagaagatcccaatatgtatcttgcatattttgaagacttatgctagacatttatgatgaatggggatactgatgatgcagtgcgattgaggttgttcccattctcattaagggatcaagccaagagctggttgacatctttgccaccaaattctatccacacttgggaggaattggccctgaaatttctctccaagttcttttatcctgctaaggaagcaagattgagatcagagatcaataatttcatgcaacatgacaacgagtctatatatgatgcctgggagagatacaaggacttaatcagaaagtgtcctcgtcatggaatagagaaatggatacaacttcacaacttctataatggattgaccaacaccaatcgtacccttgttgatgttgcatctggtggagctttcatgaggaagagtgaaaatgaggcatatgctttgctagaggagatggcctgaacaatcaaaagtagccacctgaaagaagtcaagcaaagaatgtagctggtatgtaagaagtggatgccatcaccaaactaacaacccaagtggaagcattgacaaagatgatgacaacccaagttaattagattcaagtggtttgtgaactatgtggtgggcctcacacctatgaaacttgccaagtagatgtcaacaatcttccaatggagctagctcaggccattggatattcaaaagatgatccctatccctaccttgatggacgtcatcagtatcatggtccatagctatcgagttataatcatcaaggcttcatcaactacagatataggccaccattccaaaagagtactcaacaacctgcccaacaacagaacaatagtggaggatctaacattcaagcaaatctattgctccaattcatgatggagactagagcttccattaaaaccttagagaatcaagtgggacagttaactgctcatatggccaaccaaaattaataagataatttgcctagtactacaaaggttaaaccaaaagaacagtgtcaaaaaattttcttgagaagtggaaaagaatatgaggggacgacaagggctgagcaacaagtagttaaagagaagtaggatcgacagacataggctgaaatagataagaagcaagttgaagagaaagttactgatgacatgtcgggtattgaagatacattgcctataagcactgagcaccatataaaaattacttatcctcaaaggctccgcgagaataagctggacaagtagtttttcaaaattcttgaaatattgaagaagatggacatcaatgttccattcacggaggccttggaacaaatggcaacttatttaatgttcatgaaagatattttatccaagaaaaagaatttggaagaatttgaaatggtgccacttattgaggagtgcagtgcaatcctgcaaaagaaactaccacccaagcttaaagatctaggtagtttttatattccatgcttaatgggggttcggtgaaaatgaaaactc

SEQ ID NO: 78637 - DNA, 978 bp, Cannabis sativa
atttataagacaaaatatcaacttatcacacttatacctatagtgttggttcaatgaactgacacatgtaccactgagacataaagtatattctttgatgttggttttggaccgatacacttggtcattggtgtcggttgtaaaccgtcacctacgggtgcgaaattcatttttgcatcgtaagtctcgatttagaactgacaccaaaaagaaaaaaaaactctcatatttggccacgaattactctaagcaaaatttgagatccaaacaaacaaataaacattatcaaatctaaaataacaacgtctactttaaaatttaaacagcaaaagatatattatcaaacataatacagtaaatagataagaaaaaacatgagcacatccattaaaataaacataaaaaatgctagaaccaaacacatcctttagattggaaaaaaaaaatatagagtgagtaagagagagtaagccacaatggaccaccctcattgctggcaccgttcggtgggattttagggtaagacttcagcttatggggttcgatctccaagtttagctttgaaaacttggcctacttgggctagagacggcaatgacatcatatagatgagagggatcgtggtcttactttttcaacaccgcatgaacgagaggaagcgagagctgagagaatgagcaagcgaaaacactgttgtgttggtcccctttgtatgaccttttctagcgtcgcgtgacgagggagcaagagagagagtgagaaagatgagattacggtttttagttcagtgtccataattttctattcaaatctcatttttttgttgctgatttttttttttgtattttttttattaaataaaaatttctttcattaagcaaaagagaattttttttttcaatttttatttaataaaatatatcagatagctaaattcaaaatacttctccaataatattttaggaccttgttatttcg

SEQ ID NO: 78638 - DNA, 1393 bp, Cannabis sativa
ataaggagaaagtgggtctccttgacgtaaacctcattaaggtgtgactgaaccagaaacaacaccatatacaaggaacgaaaactgattagagcttaataaggtcaaaatcagagagatccatcgaatatattaaaacttattttctccataacaacagctatgaatgaccattcaacccaatcgaaggccttactcatgtctaaatttaatgcaacatacccctttcgacctcttgttcgttgtttcagactatggatcaattcaaaagccacaagaacattgtctgagatcggcctttggaagaaaagcgcttattgggttttgaaaattacatgaggaagaattgttttaaaacaagcaaccaacattttagagcaaagcttgtacatgacattacataagcttattggacgaaaatatttcgtagttttgggcttcttaacttttggaatcaaggtaatgatagtttttttaaaagcagcaggattggccccctcattcagtactgataaaaccaccttagttaccagagatcccataatattccaattatgttggtaaagccatatttgaaataatatggctttaccaacataatattccaattaccagagatcccataccatctaaattcggactactatcaactgccatattttttaaagcatatatatcattaacttcatttgaaataaaatctcttaacagataatcattatgttccagagtaattgtagtgggaatggtggataaaacatatgaaagagcccaataatcctcttgagatgctgtaatttttttttttgaaaataattggagacaatctaaaaaataccatcttttgaagtaataatattactatcatcatcttggagagagcaaattttgttgttggaatatcctaaatcgttgctttcagtattgttcttcctttgctaaaagttcatccaataaagtctcgatagggagaactttttgagaacgattcaaagttggaggtttatttgtatgcagaggatctacgctttgttataatttggaagtgtgatagaagtgagatacaaaaattaagatgaaggtaattgtatggtaaatgtatgagattttatttaaaaatcaattaacaatgaaagtatagcccatacatcttatatatggtactatctttcccggtatcagtaaagtgagacttacatcgatcaaacttcttgagtttttataacaaaagaaatcaataaacactacaaaaatatatattttcttagtgataattttttagtcacaacataaatttttgtgactaaatgtgactcttagtaacaaaaaaaagttgtgactaaaccatagtaaaagttatcactaatttagttttagtcacaacaagtattgt

SEQ ID NO: 78639 - DNA, 1079 bp, Cannabis sativa
aaaaaaaaaaagaaaaagaaagtaactttactgcattttttacattaaaaaagtaaaagaaaattcaatggtccttctctttcatatcaactaacacctttctactactaattgatatcatccttttactttgtctagagcaaagttcttatctttattttcaaagaaatactgtaaaaaagaataaaaattcatttgacggttcttaatttgaaatcactagcttgctttcatctactatcctcctcttccatgatgacactaatagtactgatatgaggatatatgttataaaataattttatagtagtgacattagttttgtctctatactatggagacatttttttaaccattcatttatgtgacttttgaaggtccacattatataatatgtagcacattatattttctatttcaatattttttaaaaagtaaatatactcacatcaaaatgttaaacttcttaatggttattgaaaaaaatgagaatagcttctataaagagaaaaaaattctttaacctcaacaaaagcctctctcttctacttttttttttgagatttttgttttttttttgaaaaagaaacaaagcttgttgaagtgaattaaacaaaagttgaattgcaaataaaaactatcatttgcagatatcaccacagttgaaagataaaagccaaaatattgaagaacatttttacaagtttagagaaaaaaatatctaacaaatttgcataaaattagtctacaattgttagaatttacatagcatattagtaatagccagtggcaatcaaaattatttaggttagaacttagaacaaagatatgttctatacaattattcacaatcattttagcagtgttggactgaaattctcaaactttatgccttttatggtagtttttgacagttttctctatagcttcaaaggtgcagatgacactgatgaagacaatctggatacacgactcttttgaaatgtttggatttagtggtgtctctacaattgcattatttcttcaatataaattcaaatattttagccttttttaagcattaatttttctattttaat

SEQ ID NO: 78640 - DNA, 518 bp, Cannabis sativa
atcgtccttcaacttcaacgagtcttatcctgatataatagaccgaatgctgaacatttttttcttccctgattagcatgacactcacagcatattctgtcacagctaggtatattccgaattcttcaccgtttacaagttgtctttttagttcttgaaagacattcttgcattcctctgtccattcaaatttcttatttcctcgaaggatgttgaagaaagggacacacttgtctgttgattttgaaacaaatctactgagtgcggctatccgactagttaagctttggacttctttagtttttgttggcaatttcatatctaggaggggttgaattttccctggattggcttcaatacctcgggcattaacaataaaaccaagaaacttacccgaactgactctaaaggagcattttaagggatcaagtttcatgttttattttctgaggactttgaaacattcgtccaggtcatctatacgcccccaaccttcttggatttgacgagcatgtcat

SEQ ID NO: 78641 - DNA, 621 bp, Cannabis sativa
ttttttttctttcactatggatcttttaaattatgattttgcagtttgttcaagagtttttatgtagattgttaaactaattggataacatggaatgtcattttgaagttttactgtcataactctaaacctttcaggcaaccaaaaataaataaacatgaaacactcatttgtaaccttaaaaatgtacatgaatatttgttcagaattatttgacgatccctggaagctaatttttcatgtagcttctcttttcttgttttcagttatgctgttttctcttattggcatgagttacagcaagtcctcttacttaaattttacagcactgcaacctatccatattcattctgtaagcttgacaggagatttatttaaacaattatttttaaattttaagtatggtaagacattaagaactttattttagtttctagaaaagaagttcacgctggacacattatttgtgggaggctaagttgataactttccatctcaccttttggctatttcataccattgagaaatttggctatcttgtatcgttagctgttttattggcattattggtgcattgtcaaactctatagctgtttaatatcattgcaaaatcattttatc

SEQ ID NO: 78642 - DNA, 954 bp, Cannabis sativa
ttgtttatttagtgtcagttgtaaggccatttattcttatctgttgttgctttgtctagctttgctcgtaaaaaaaattgtatttaagtgtgtgtttggtttaattgttttagagttcaatttaaatgatttgtggaaaatttttaatatgttttgaaaatgcaacattgtgaattttatgtatttgcttgactaaggtttgtggtttgataatttgaatttcatacaagaacttgcattatttggcatttgaggcaaaattctcgataacatgtgttttgaaagtgattaaggcaatttttggatcgtttgaacctttcaagtcaactttgatctgtttttttctaattacccattctaagtctaaatagtcgactattttttgttaaacacttgttttgagcttaactgaacactttaatatttattcattcctaatttttcaccatgagcatttaaaatattaaaggggattgatttttattgtgtgtaatttcttttgaattggtgttcgcaatagaaaaattcaagaaaaagattgagaaaattgaaaaaaaaaaaaaaaagttgagattgaaaaaaaattacatttttcttggttgttcccattgaaaagcataaatttaggagaaatgtagtggtaaaaaaataaaatttctagtgccatttttttttctcaatctttggaatctaagacaattttggaattgtgttaaattgtgttgtgattatcaagtttgggtgtaaggtatgctaattatggtaatttttagcctaaatgacaatgtcatctactattacctaagcataatgctataacctgtgaaagtttttttgatttcaaaagacgtgttattgatattttttttttatttaagcgtttatatattacaaccatgttttacttgagactcgaactcaggacctccaacacacacacatccacctatggcc

SEQ ID NO: 78643 - DNA, 1482 bp, Cannabis sativa
  modified_base (1441)..(1451): a, c, t, g, unknown or other
caaaaagatgaacagagctgaaagtacaacttaccagagaaaggtcttgaagactggtagactagagcctgtctagctcatcgttgccaagctcattcagatcctcatccacgaaggggagatctctctctatgtgcctgttggttgtgcgtcagtagtcctctacccagtaattgaccccgctcctctaccgggcctctaagtaccttggcctgcaggccatatcatagactgcccagctagtgcaagccctggcagagggggaggcaatgacgacccgataacatctccaccacgagaagtcttggacatcatggccatcactcatcctgtgggctcatctgaaggtctcccagtaagacctctcagcttggaagacatatctacaaaaaagaaagtagcaaagttagaaagcaatcataaacattcaatacaagataagggtatggtgttatcaactaacaataacatcatcatcaaaagaggaactatcagagaccttggaaaccactttgcccttgcctctaaatacaggcacgaggcgagtaggtcctttagaagcttggcctctaggcccgacatggagagaagcatcacaattggacccccgctggccatgcgccgacagaaggccctctccttgctctccagattctgtacaatgtaagataaaggaatctcatcatccaagtcaggagcttgcccatctccaagccaggccccatctacagctagtgctcctgcaactccaggaataggaggatacaagccatacttcaagaagttgaccacactagccaaccagattatatttctttgctctatcaaaagagacaggatgttgtttaccctatcccttatttgcaaagtagtgataaagcgtttgaagaattacactggtaagaattcgtagtgcccgatcctacggaggcaatagacgattaagtacttatcggcgtacccactgaccttcgacatggatgtgcaattagtgtcacccaaccattggtgaccgatctcactgcgataaaaatacctagtcctatactactttagggaatacttcagatcaaagtagtatccgatcttacaagggaaaggctgaggccagtctagctccctatataagaaaacatcactgaaagatacttgatgcttttcagcgtgagttgtgttggacacatcctaaagtaatcagcgatgtccaggaaatactaatgaagcggtaacaccgccccatcctcaatgtggcgctcagaccatgccaacaaacccaaagggagccagtgtgcctgatagttcctaaggggaatctcacaatggatacccctcactaagccactagcaagaatctcgctaaaggcccataaaaaaaaagtagaagcaggagagacgcaactgtctccttgtgatctcgcatccagtatctccagctcaagannnnnnnnnnngacatgatctagtccaagctctaagggccaa

SEQ ID NO: 78644 - DNA, 1397 bp, Cannabis sativa
  modified_base (363)..(366): a, c, t, g, unknown or other
  modified_base (1258)..(1258): a, c, t, g, unknown or other
ccacttgatatatcctgaacttgttgattagatcctcttgcttcagacaaagctgtttgcgaaggtcaggtttcttcagattcaagtgatctcgcagatctggttaggagtaattactggcagaccttgtcttagtcacaaatgtcgtcctactcatagactttgtaaagactgcttagctttaatttgggaattaacagataattaggggttaattatggaaattatttactaattctaaattattaatttatagtgacttatttgaattcaaaatgcattttatatgtcacatatagaaatttcataattttgcatattcagtgcccagcaatattagaacgcggtgtttggctattagannnncatcttagtatttttagtataacggggcgatatagtttagacattgggaatgttgggaatttagaatttaccaaaacacccttagtcacctttagtggctattagtatggaagggcaaaattgtcatttttccaatctttagtttgtctttttgtgagaatggagtttagtattaaatctgattttaaagttgattaagtcgatttatttgaataaaacaaaggtattatctcactttcaaagaaaaatcaattgaaggaaggaaactcattttctctctcaaactctctctctcattttcaaaacccatagaaccagctatggttgggttttcttcagcaattctaggtgattttcagctagtttcaagtgaatccaagccaaggtatagttcttgcaaccttctctttgttttcttgaagtgtaagaaaaggaatttacgcatgtttttgggatttagttgttgttcttgctggtggagtataattgtgttttctgtagttaaattatgtttggttatgttgaagtgagcttgttttagtgattgttgattagtgtaaccatgttttgagttttagaactcaaacttggagctttaatggcatttcttgtttctgaggtttgggtacttgttttgttgcttggaaaatgatctttaggatgtttagaacgggtctggaaggtttcatgtagtttggggttgttttggttgagatttggaatttttggtaattcatactctaaactggaattctagttcagggggacctgtaggaaccggaatttcggttgggaaccggtctaccgattggggcagttttgggaaccctagtttttcccatttctgtgttgtttagggtattgccatgttatccatcgatagggaaacttntagtttcaagtttaagtccccagaaattgatttagcgtgtcacttacttatgttatgactgatgtgatttatgagcttgtaattcgccgagtagttgttccactcaggttggccaacacacctgaattcagaatcaagg

SEQ ID NO: 78645 - DNA, 579 bp, Cannabis sativa
  modified_base (173)..(177): a, c, t, g, unknown or other
  modified_base (357)..(358): a, c, t, g, unknown or other
  modified_base (500)..(501): a, c, t, g, unknown or other
tacctttttacagaatattacatatatactttgaattaattttgatatttagtattttaattatcatggtgcataaatttagtaatcgcgtgctacaattcctattactaaaataaaactatacgattttgttcagatcaaataactacctcatctaacggctgtcgtacatnnnnnaatacattccgtgaaagtacaatcacggaacaaaatcatatcccctaaaatatatttgattgttttttatataatgtatgattagtccatatgattttcagttttttaagtttattttcttttgaactataacacataacaaatgaagagaaatattcatatactattttttaacttttnnttttttaaaaaaaaattaaagtttgagtttctctggtgatttttctaatattttctatgtggattgttatgtgaattttagctgcgatttagattgttccgttagttgctatagaaacttttattaaaaaaaaaattatttnnaagtgtaaaaataaaaaaattctaaaaattaataaaaaaaacttactaatttgtttatatattgcccaaaattagatt

SEQ ID NO: 78646 - DNA, 851 bp, Cannabis sativa
tattctactccttttactctgccacctcggctttatgatcaatgcctttctatcttaataccatatgtttggtgtagctactactacgcctcgtactcctcttgatttttattgtattctatatcattggtttcatcttcttctgcttctacatccactcacgaagccacttcttctttgtgtagcaccctcgggccttgacctgaatgtggtttacgtgcttggtttctagtctccaccattatatcgagaatttatttttgatattcttcttacgtaaaaccttccacagctctcaataaaagcactaaagtatttaccagaattttgacaactaactaatgagagctatttaaatgattcgaaaaaatttaatgcgaatagtttttacatggttggggcataaatgagtcttagtccacaagtcactgctactgtaatggttttccatacagaggatgtttacactatttttttcgacccctttcccagactatgatttggggtatttatagcttcataaagaaagcaaaattaaggtcactattgtatcattgaaccattgcttgcacaagttcctaggcttgaataaaattgtatgtatgtctatatagtaggttgcataggttttatcaagatgttaggtaagataagctctttgccttccttgattgatgtgatagttcattatgcagtcgtcataaagctcatagattagagtgtgattgccgaagaatgaatttaatgcctcttacatgtattttcaaatctattcgcaagtgcttcctctatgtcgcatttaacgtgcttatataagtcatgttcgggacctgatggctggccttggaggc

SEQ ID NO: 78647 - DNA, 3612 bp, Cannabis sativa
aaatctggttctcaccttgtaagatccttcaataataatccatgcaccatatgtatatttggaattttcttcattgagtttttaaagatttaagttcttagtttctcccatttattgttaattttgtaatgttggatatatatgtgaatgtgaatttcggtagttcagacagctacttttggtagccactcgtgcttttgcactagttctccacatggctattgtcaaacttataattgataagttcttatgttactgattgcttagcttccaaagattaaactgggggcaaccatttgtgtatgtttttagctaataggggtgttgctctctatgatttcatcactcttggtatattttgttgaactagagcattgcaaacaaacagtgaaaatacttctattgacaatttaggtgttatgagttcatttttcttataaaacaagtttttatacagattacaattgctgataagcctaatgaacccggcacatcaaaagtcagtgagctgcaacatatttcttccaatgaccaattagatggaaataataatgatagcataaagttcatgaagttgagcaatgacacagagggtattgggcttaggcatttacttcaatctcaacatgaggaaacgaatggtttgttccggaaaatgaaacaggaggaagtcccaccagtgggagaggctggaaatacatatctatcaagtcttaatcagggatccaatggatcatctgaagctgccaaagcagaacttcgcaaagcaagtataggcacaaatgatatatatgacgcactaccccaaacaaacttgactatgactcttggtggtcctttaggaaattcaaattcatcccctggtgctattgttgatgagagggagcaaagtaaaacatcttccttgttcttacaaggggctaggtctaggcatcttttgccaaaaccaccaaggtcaaccgttggtacaagtttggaaggaaacactaatatggctcctcaggtacgggttgcacggccacctgctgaaggacgaggaaggaaccagttacttcctcgctattggcctagaattactgatcaggagttgcaacaaatatctggagagtatccttttctttcttttcataaagatataatcccactagaatcataaactgacaagtttttgttgagtttaatcattattcttgcacttaaaaatggaattccttaaccataattttaataaagctcaaattccaccattgtgccactgtttgaaaagatgctcagtgctagtgacgctggtcgaattggtcggttggttcttccaaaagcatgtgctgaagtaagtactgtcctttggtcattcagtcatttcaactgttattcaatgtaggtcatcgtcatacttattattgcagtcaatctactttactaaaaaatatcatgcaggcgtattttcctcctatttctcaacctgaaggtcttcccttaaagattcaagatgtaaaagggaaagagtgggtgttccagttcagattttggcccaataataacagcaggatgtacgttttagaaggtgtgaccccatgcatccagtccatgcagttgcaagcaggagatactggtattttcccatgactttattgcttatataattccttgtacctagtttgtatcgtaaacatgatgtaataatttggtataagctacttgatgtttgcttacgtaatgggtttgtgtgtgtgggtgtacagagtttaagtcttcatagtgtatcttatcaaagaaaattgaagtaatttgttataaatgaaggatgaggttatgatttgctttcatggcactgaaaacttgtatattatggcaatatatttacttgggttttgttacactgagaatgcaaattgactcacgctacaatctgcggtccaagaccccagcgccaatttctgatatattttaacaatgtgaatagaagaattgcaagcactagcctttgcctgtttctagccatgaattattattttcaaatgaatgcttctgctgcaaatcattgtgttaggcaacgttttttttttctaaaagaagatcttattattagaagactttacttttccattaaatactttaacatggattgtgtttggttttgatatattccccttttataatagtgactttcagtcgtatggatcctgagggaaaacttattatgggatttcggaaagcatcaaattctgttgcaatgcaggtaaaaaatcgtcagctattatgttagtatcctgggtcatataatattgatgtgtataaattattaaaataaacaggacactcatccatctgccattcacaatggtggtcattcaagtgaacctttcatttcgggtgttttcgagaacctacctataataagtggttactctggtcttcttcagtcactgaagggaagcgcggatacccacttacatgcactatccaaacaattgtcttcagctagtgctgatattagctggaataaaattgataagcatgaaggcaggtcaagggagaacttgttgttgccttcgttgatggttccagaaagaaaaagagctagaaatctcggttcaaaaaataagaggttgcacattgatagccaggaagctctggagttaaaacttacatgggaagaggctcaagatttgcttcgtccgcctccttctgccaaaccaagcaccgtcatgattgaggatcacgaatttgaagaatatgaagtaagtacgcttagctgcccatttaaagcattgcttctgaattgaattttattagctattctttattttgattcaagtatgttggcctttatgttctgtaacctgactcaatcatcagcattagcaatgataaattttcacagataataatctaaagcccacaatattttgactagctttttcgttggtgttttctctctgtctaatcatagtccacttgatgttttccatgtaaagtggatgaaattagcattcaccaaatcgttctactttctttgatacacatagttgagttaattatcgcctttctaatattagtccacttgatgttttttgagaaaattgcacggccttagcttacttcccgttgtttcgaaacactcttgggcccttggcttcatgtacttttgggggaaaagtttgttaattgcacaattttccttttcaagcatagcatatactgctctgcagaggttgatatatttcttcgtgtatgtaaatgtaataagaattcctttccaacatacttttccttgtgaattcgatcctacttaggcttcgagatgtattaaacttaactttcttggctgtcaacaaactttgttattgacttgtgtagtaatatgaatgtatgtttcttctccaggaacctccagttttggggaagagaagtattttcctactccgttcaactgggtaagactaagtataatcttttctgctaaaattttagtttagtttgtaattatatcgacttctgatatcttacagataacatgctcttcttttattcacacaatttatcataccctgattcaatcgaacgtttccttccttctgttttaaagcatgtaatgtttaccatgcatat

SEQ ID NO: 78648 - DNA, 1589 bp, Cannabis sativa
gtgtcaacattttcttctttatcgggcgcggagggtagcgatcccttcttctagcagtaaggaaaaaaaatcagttgaatttcaaatgatcccttctaaacacagtgaggaaaaaatatcacttatcaagtgtgtggatgatgagcatgagccggaaaatgtttgaagcttttgtagttgaataataataataagtaaatccaacttttttaaacattcaaatactaggctattctgtagtaatgcttgtatatttgaaattttttcatagttgaagaaacactgaggattggattaccaataatatacatccatatatagttttttaaatatcaatttttgctaggttattgtagcttctaatacttattttgtttttgtttgattattttgtatgtaaaaatcaattatattcctttattgggtaattttatatgaaacttattgtatctaccgattattgtgaaattacgatagtctatggcttcctctcaaattatgtttgttactacggttttctttatataatctaagtatcatattattaatcattaggtatgaaatgacatttttatcaacacaacttacaaaaaaaaataaaaaaaaaaaaacagaaacacaagataaatataggtacaaagtgtttctcttccaagatcaagaaaaagacagttacaaaaatcagttagttacgactttaatcactagggttcaaccagttataactctagatcaatattgtcactgaacctattgagagagctttccagtaaagagccattgtgagaaagagataacacattgttgtgttgctatcctcaatgtgtatttgcaaaagagagaaaaagagagttagtaactttgtaaaaggagagagttagtagagttgtaacctttactagctgatatgttgatgaatgaagataagactactctgaggagagcttgacagagaattagttattgttgggtgaacttcgagaacatttttgggtgttgtctttgcactgtttgttttctcataaccctaacttttgatttctatgatattgtgtttgaatattattgttctttgttcggtgtggtgagtttttgggccaagagattttttggatttgttcttaagttttgaccgagagagtagtgagttttcttggttggtttttcacgtttgagtaactcggttttttggaggaatatttaccatgagaaagccataatttttctgggtttagagaagagtagaaccctaaccaccattgttgttttaggtaaaaaaaaattagaacattaacccattagaaccctagttttgttttcagcagtaagaagagagaaagaacaaaaacccactactctgacatccactcttcacgaacggcgatgcatgcccagttgtcatcatcaaatggtacgatcctaacggacaacagtcacaatccgagatgggcctcacctacccaacccaatagttaatattcaattgtactttgccaatcagtgaacttatttccatttagaaaaccctagcaagtctggaccagcccgagaatccgactactcacctataaaaagaccaagaacccttc

SEQ ID NO: 78649 - DNA, 898 bp, Cannabis sativa
gtaatatagtggtattcctagttccttatgttgataatattctacttattggaaacagtgtagaaaggtaatcggatgtaaagtggtggttacccaaacaattccaaatgaaagattgggagaagcaagctatgttttcgacatcaaaatctatagagatggaaagaggagaatattagaattttctcaagaaacttatatcaataaggttctagaaagattctcaatggagaactccatgaaaggatagttgccatccaaaaatggaatttcactatgcaaggatatgtccaaagactcctcaggagatggaggagaaagtacccttatgcattagcagttgggagcttaatgtatggaatgttatgtagaaggcctgacatatgcaatgcagtaggaattgtgaatcgttactaattgaatccaggtttggaaccctggatagctatttagaacattctcaagaatctttagagaacggtagatctcatacttgtatatttcaaaatagagttaaatcctattagatataatgattctaattttcaatcagagaaagatattcaaaagtggacatttgggtcagtattaactctttgtggtggagctatagtatggaggagtattaagcgaaccagtattgcagattgaaccatcaaagatgattatataagcatctttaaaagtaagtaaggaagcggtttggttgaagaatttctacactaatctggaagtagtctagaagtagaaaaaccattagttatatactgtgacaatagtggaacagtaaccaactccaaggaatcaagaagccacaagagatgcaagaaccttgagaggaagtaccatatacaaaaagatatagtagaaagagttgatgtgatggtcttgaagattt

SEQ ID NO: 78650 - DNA, 531 bp, Cannabis sativa
aagcttggtcttgacatgacttctctctaactatacaaaggacaactaaaaaaaaagagtatttgattcaaaaattgttctttaatatttttttgttacacttcaaacaatggttccatgattctttattaattagtatgaaaaaaaaaattatttctttatttttggatcctgagttactcttacaggcaaaaatggaggtggagtgaaggtactgttgctacgaaatcctgtagaaatataatggaaagtaaaggttatcatggattggatccaatagaaatcaactagattaatggagctttttattactcaatcctattattctagtcagcgtgagccaccacaataccaccaacttcaggatcattaccacctttgttgtttcattttcttatttttcgtaggtaataacaaaaagatcaaaacttactaaaaaaaaaagaggaagaaagaacacgcatgggagggtgaataggaaaagtagagaagagctatttttgaagtatatggaaataaagtgaaggggag

SEQ ID NO: 78651 - DNA, 1218 bp, Cannabis sativa
ccggtgtatcattgttaatggagtcaaaaatggaaaatttcatttcatactttatagcttcgatccttcatgttaaaactgatatttggggtcccataaacttaaacacaacctcctttgatctctgaaacaacttaaacacgttcaaatccgagtccgtttcaagaaccgtattttcgaacgtaaacaatggtgtctgtcgaaaggtgcgattacagaccttctaatcgcatttaaaaatcctcttggatgaaataaaactcaatgaaataatctacggcagtccaaaaactttcaaactcaacaacccaaaatctcacttttttcacggctcgatttcgttcgtcccacggcctctctctatcgttgtctcaccaccgtttctaaaccctctcaaccctaaacaattatataaacatcttatatatagtcctaaccctaacataaccctaaatcaacaacttaaaattttaatatataaaatatatatgtatatatacatactgcacgataatactaattctaataataataataatatcaaaaataataataacagtaatatactaataataataataaattaataataataaataataataataataataataataaattaaacaatatgctataatatatttacctatattattattaatatacctataataatatacacaaaaataattaaatattaaattatctccaatattttaattatttatctagcattatacataccctcaaaataaaataataataataaattttattgtcactaaaaaaaaattgtatactccactaaactcataaatattcaaaataataaattatccccattaacaaacaaaataaactaaatgtataaaaaaaaattaattacccaagaagactgatattacagcctcaggtgaggatctatagaaatagtgtgttgtttcttgctcttccatgacaccagagacttgcctagaaacacacaaaaactagttgttaatcttctagtgtcaacacaagctgcccaattagcatctgtgtaggcttcaagtctgatttcagattctgcaaaataaaacaagtcttgtcttggaatgtctgcacatattgcaagaatatttgtgcagcgtggagatgattaactcttggtgaagtcaagaatcggctgagtttattgtaatacccggtaaaaatatacatatattttaaatttta

SEQ ID NO: 78652 - DNA, 501 bp, Cannabis sativa
gaaaatattgttcaaatattttataattaagtatttaaattttactttttttaagaaaattttttaagttaccttaaaaaagtataacacacacactattataaaaaaattaaatttaaaaactcctaaatgtcaaacccataaagtgcatgtactagaataatcattttaattaccagtgtattatatatagatcaacattctatattaattttaattaaaagagacaaatttactgattttctttatttataacaaatatttaacttcttactggatcaaataatagaattttttcacgtggttattattatttttttgaaagcaaatatagaagtttttattaatttgtcaaatcagtcaaaaaacaagattgtacctcaaccactcgatctagaaaaaaaaataagatgctccatcaagactatgaacaaccatattagcaattcgtttagtaaaaaattaaataagaaaatcttatttaaagatgcaagaagttta

SEQ ID NO: 78653 - DNA, 559 bp, Cannabis sativa
  modified_base (45)..(47): a, c, t, g, unknown or other
tcggtgtctggatttgggacccagccctggacccgaaccctgacnnngacccgaacccacacctggacctaaacccagtcccgaatccaaaactagacacgaacttgtaccatgggacccaaaatcggaaccaaaatgggaagttgatagggactggaactaggacttggactttgaatcataactgaaattggacctagatctagaaccgtaaccggaccaggacccggaccaagacctaaacccgaattgggagccagaccgggatcaaaacccaaacctggactcgtgacccgaacccaaaccagaaatcagacccaaacatggaaccaaactatggacacaaaacacgggtcgggaactagaaccgcaccccagtctcgatcttgaacccaaacttagaaatgggactttggacatgagctagaaccagaccgcgacccctaaccgtgatctagataatgactcgggattcgggtaacgaggcctggaacagaccagtagtcggtgtctagatctaggactcaaactaggaccaaaacccagacaaagaaccaaa

SEQ ID NO: 78654 - DNA, 1209 bp, Cannabis sativa
cccaaggtaatcaagtacaagaccaccatgtttgtattatacacacaacaaggatggagaatgtttatcccaatttatgtcctcatgacgtggcatgcttacgtggataaaatttgtgccacatggcagtacaactcactaaaaggaaggccaagtcagcacccgagccaacaaagacctcggcactcaaacggggatcaagtgacagaccaactccctctctggaggtggcctgcccaggggacagcaccatggtcggccaacctggctggcataggagcctggccagccaaggatgctttgcaagcctcgctggacactcatacacgtggccaggggtaatgggttgcgaattgggccccaaaaccccaacataatggctggagaatatctagaatcaaggtcattttggtcttttgtaaatatctaactaattatacgattgttaagggatttaatttgtaaacttagggtttaaggcttcctatataaaggccttaaactctgactgaaaacctaagttccctaagttttctttaagctagaaatccaaactctaagtgtctgatatagtctctctcttccttagtctctcccacatgcctaccttaggctgtccagcaccctaggttgtccaacactcgagttttaccaagcattgattcatacattgtaatcctaagggtattatagcagatccctcttacagcgatcttgatagtaattccctcggtataatacaactaaaatgggagtatgtcattacgctatcacaagggggacaaacctctataaaaaatcctatggtctattgctttttcattcttatttgtgcacacacgtggcaagcattacatttggataacctcgccgtcggttgatcattttttgtggtcaaccgtttggtgctttcattgagagcgtggatatcgtgatctgatcaaacatcatggtggacataagaagaactcttgtcgcaccatctgcatagttgggtcttcctcaagacccacagattgcagatccagacacgtgggttccattcacaattagaatccccatgaataccgcaaatgttgcgaatctcgtcaccataataggtgcaacaagtctagccaccatagctagccaacttgacgcaagcatcctagtggatccaagtggcaggcccacacctccagaagcagatcctgttgggaattattttac

SEQ ID NO: 78655 - DNA, 785 bp, Cannabis sativa
gttgtatatgtcatagagatatcatgtatcttttatatatatattgattgaaaatgaataaaacacactgtaacaatttctttcatggtatcagagctatcggagagactggtggtaattggatatagatcacccaagctattacatcttcgttgaatggcttgactctcaatcccaaaaccagtccactaaagttctcttttgctagcttgttcccacttcttcaacaataatatagtatataatttctcaccatacaataggacatttaaaaaaaatgttcaaaacaatataaataaaaaaagtttcatatcacggtaaaataaaatagtttgtaggaaataatatattgtgtaaatatcaaaataaaaaaataataataataataaataaagactctttaacttttagtcttatgttaattaggttgaataaaacaactttttatggtactatagtatactattaattaacatgagacaacatatataacaaaactaattttttttcttcattataaatttaaacaaacaaataaaaagtgattactgtgcaagtgatcaaaacaaataaaaagtccaaatctatctaatctgtataatgagactaattatctactgtgcaagtgataattatttcaaaaggaccatgataatttaaatatttttcattttggcacatcattaaaatactataatatcatgtggaaaagaaaaagaagaaattttgaaaaaagaaatataataagagacctttattacgatgtaatatgttttgatatgtac

SEQ ID NO: 78656 - DNA, 698 bp, Cannabis sativa
ttaacatagtatgaaataccaattttcaaaaggggatcttaattaggcaataatgtgacacattgtaaatattaacactttctgttaggactttttgtcatattgtgtatagttagttagattgtccttaacatttattcttaattaatagtgtgaattaatattttcattattctttctccttatgtatattttgttatatataaataattgaccacttcacacgctctatcaaataataatattaaggacttatttcataaatatatatagaataattttatggtatatatacccttattttattctcatagtataggaatatttttttaattattaatgtgtatgacttttgagtgtgcacattaactaatatagacttacatatagacttacatatacccaataaaaatattaaatttttaaaatagtattgagcctaacaaaaaattcttacacctataacctattatttataggtatcaaataatatattttaaaataatgctaaatcaattaatattaagcatattgtatctatctttatatttgttatattttatttttttatactaattaatatataattaattaactataactaagctaacagaactttttttttcttttaaaatagaaataaatttataacatcatactactaataaattttatatttaataatataaataaaaact

SEQ ID NO: 78657 - DNA, 1263 bp, Cannabis sativa
tcactcaacaaaatttatataaaacttgctaattaatgtttatataattaacactttaatattaacgttactttttttgacgaggagggaagatatggttttagtggggttatgtacgggatcacagtgatcgaggttgtggctgtaatttctaagttgtggtatgggcgatcgagttgtgccagaaattgttgaacttatggctctcaaggaaatacttttgtggtggaagtgtgatttctagaaattggtattatcaaatttgattgtttggggccggcattttgaatgattctatcttattttagtgatgtttctttattttttgttaaatgatatgctaattaagtcgctcacattgtggctaaagcgtcttgattgcatgacgattatgtttttttcgaagtataatcttcattgtgatattgctgtcattgttaaggccgagttattttaattaaatgaaattttaattaaaaaaaaaccacacacatgtgctacactacattagtatatttttagaatctttttatttatttgttataattaaaggtgatatttattaatataatattaacttttatataataatataaataagaatttaaattccaattaaagtatacttaaatttttattaaagattattttttaaattactactaataagacttgtatttaatatagaataacatcacgtaattatatcatgcagaaaataaataaagtacgcccttctcaactggatcttaactaatagataatagtagatccaatctaattaactctaatcaaaattattaatcaataaccaatgaataaaattcaataattaaccaaaaattatacattctttaaaaccacgtggcatctttaatgttttaataacaataataatgttgagattttcactttaataagtgacatgttgttgaatttttttaatagtcaactatagtcacatggtttagcttttgaaagaagagtttcactttaattatcttatcattaattatagaagtcacatggtgtaattctaatcttactattattatttttttaatgctgggaatttagtataaataccatatttttgtatcattgtttacaaaataaaaaccattctatacataattacttgagaagaaatggccaccgatttcaagtccatccccataatcggtactacttatttactttgaatttctataaatatatatatactattactttctaataatagttaattataaataaataaaa

SEQ ID NO: 78658 - DNA, 552 bp, Cannabis sativa
gtcctacattctatgcttgtataggtagatggggatggcaagtttgagcgagtaagtggaaccaatgttggtggtggcaccttctggggtttgggaaggctcttaacaaagtgcgagaggtaaatgtctctagtttcgtagaacagttattatcatttgaattgctgccattttaaggacactattatgtatggttgatcacaaacttaatgtctcagttttgatgagttgctggagttaagccatcaaggaaataacagagttatagacatgcttgttggagacatctatggcggaatggaatataataaggtatgcgaattttctttaaacataaccttatttagacacatatcctagttttctcattttatgcctgtggctgtgagctgcaatgtaacttttccaatttttgcagattggtctttcatcaacagctattgcttctagctttggtaaggcaatttctgacaataaggagctggcagattacaaacctgaagatgttgctcggtccttactaagaatgatttcaaataatgttggacaggt

SEQ ID NO: 78659 - DNA, 2052 bp, Cannabis sativa
  modified_base (26)..(35): a, c, t, g, unknown or other
ataaaatggattacattgaaatggannnnnnnnnngggcataaaacccaacagttcgatcctccttttgaccgtttgttgttcttgacaatgtgactcaacagtgccttgcaccaaaaagttgttaattggcataaatcaatgattaattgttaatatactaagttaaaaacttataacatttaagctttgacgattaggttgcgcaatgtcttcagacattgcttttattaagtagatccaaaaaaattcatcctttatgaggtcagttggataagaacaaccatttagtgctcgccacacataatcaaacattctcaatcaaattcaatattaaatatatacaaatagttacatatgatgaccaggtaggacttgttcgtcggcattgagcggtcgattgttgttgttgttaacaatagccctgttggaggggtggcttctaaccctctcttagttccttggacgttcctcaagcccgtagaccaccctctcccattagtttctctgggtatgcacttcttgtggataggttcggtggtcctgaggtacttgttggttgtgggcgtaagcacccaacccttgagtattttggttgagatagctttgtattaagtcgacagcttcttgagcatgaagatcttagtcgtcttggcgccttcttaccccacaaacatgctcttccaacaaggattagagctcccttttagttagggagacttttaattaagatcgcttgagtttgagttttctcctaatgcacagtttggacatgaccctgcatctgacctattgctttctgcaattgatcgatctctaggtcaaatccttcaatgtccacatggggctctcatcttcgcctaaagattctggggcccctcaaggcgtctgcttggcttgtgtcttcattagttgggaaaaaatttccagtattgcaccatctgatggcaccatcagtagcgcctcctccagtgtggcagtgttggtggtacacccagcagtggcagtttggccggttgtcccatgactagcagtagtctaggtaatggcttgagtagtggttgcaccaccgttactaggacacaggggttgttctctattcttttcggcgagtttgcttgttgatggaacttgctgggtattgtccacttcttcatcgggtcgttcttgagataatctagtaagtactattttttccagctaaaaacttcaagattttggtttaagctcccaatgaaagcaccaaaattgttgactgaatttttagccaaccgaaatggagtcgtaaaaaaatgagatttaatccaaaaaaacgaacaataaatgtaaattatgacaccaaaatttaaagatattcggtcccagatgtcagtaatagcctactcctcttgtgttttattactcagagttgcaaaatcaagaacaagctcttgaatgcaaaagttaacaatggacgagttctttttttctctaagtactcaaatttttaaatcctcttcccaagtcatgggtgaccccttatatagggaaagggtcggtgcttctcgctttaggagaaccaaccattggagagatatctcaaccatctccttagttttcaaaggtgtagatttgtaaccgtcattgagcttcttacaggatttgaatatttaaattagttactgacgatgagggtccccttagagtacggtatgaacaattgacttcctctgggggtattagccattacttgggggtgacatccccaaggcccattgtgaaggggtgatagttatcatctcagtgtggtatctctaagaccccttccacttgatcttcaatgttgtgggtagccttggcgtcctgaagatacataatataaaccatgtcttacgtgggtggaatgcgtgacttggaccatgaaggtgtaggggtaaggggtatactcctagactaaccctttaaggggtaaggggtgtacccctagactaactccttagggggtaaggtgtaatgaccgctctagtaatgtggattagtaaaggcaatttgcactaatttttattattttatt

SEQ ID NO: 78660 - DNA, 620 bp, Cannabis sativa
cggcagactagtcccgacggggtacgccgctaatattattaataccggcgggcttattattaccgacgggcccccaccggtaatagtttttctataaataagagcaatgaaccgattcccccaatttttcccttcttcagtttttttcatctttcattttttttttcactttctcttccttttcaccattgatttaccaccattttgcactgattctccgccaattcaccatcattttgcaccgattcaccaccgattcaacatcgcgtctcttctaaccggttagtttttttttaaatatattattctttgttttaatataaattaatctaatatttgattgttttgtatttatatgcgtgtgcgctaatataaatgtaatatattttaatttttgttcagattttaaaagtgggaaacaattttgggtggaccttacatcatatatttcgtttatattaggtatgtttttatttttagaatttttattttcggtgtgtaattaaaaactgagttatatattatttttagggttttttcatatacactttaatataaactatatacagtaaaacctctatttaagaatactctattcaagaataacttctaatttgtta

SEQ ID NO: 78661 - DNA, 997 bp, Cannabis sativa
aaaatgatgaaaagatctattaaaataacattccatagtgtcctatattcatgctcataaacatttatctactcaatgtttcatttagagcactttgagtttttcttcggtcccgatcttttttaactcgtttctcgcaatttaaaaagtatcaatttttaatctttacgtttttaaattaaaaaaaaaaaccttgcgaaattcatgcagagtttaactaatagcatattaaatagcttttattaactgcatttcaactacttttcaaatattagctttttaaaatcaatttctttaaatttttgcttacaatgaaaagatattaattcataactacgactatataaacacagaacacatagcaccaaaatttcttcaagtgattcaatttgttgaaaagaaaagagcaatatcataacaattaccaattacttggtggtaagtgtaaaatatgtacataaaaatataattaaatcccaaaaataaaaataaaaataattcttagattttcttttcttctgtttttttctcatctaaaaattactttctaataacatattcttctcccgactgtcgatcgacatgcttaatccatctccgacgatctcccatcaccggactcgaactccctccggcaccggcgccgacgtgggcaatatcaagtccatccccaaccggcaaaaacacagaacgaaccagccgccgcgacccacaaccaccttcttccaccgcgctccgccacctgaacccggcggcgtttttcgccgacgcgttcttacaaaccagaacggcccctctctggctaatcttcgccactctcagaactctagcgaagtcctttctcagaccatcgaccaccagaaaatcgaccccgaccaaatcctccataacctcctccgccgcatcgccggccacgattacctcatcggccgaaaccccagcttcgcttagggcttcaacgtactcggtactcgacctctcgtccgggactatgcac

SEQ ID NO: 78662 - DNA, 635 bp, Cannabis sativa
ttggtcccaagtgtattattgaatagaggttctactgtataatattatttttattgaggatataagtgttacaaattctaaaatttaaagtaagtccttaaaggggtgttttagtactgtaaattcgtgtgttatgctattttggtctatattttttcgtatttttcaaaatatgagaagtattgttattagagaacattttctcacatagattaaatgtaaaagtattgagtcatatataagaatatgagatgctccggatcactatcagtaattggttttgagatggaacccataattctcaacatggtatcagagtcatatcgtttgcgggctttcgattcacacatatccaaatggttagccaattgcatgagatccagatggtgcaaagacgtttgagatccgaacaaaataagatccaaatgatgcaaagaatgcttaagatccatacaaaaataaagcgaggaaaatgacacatcctgtgataaagcgattcaagattagtgagtaaaaataactaccatcctgagggagaatattggagaatattatccctattgagtcatatataacaacatgagctactctactcatcaccaattagtttgagatgaaactcatgattctcaaca

SEQ ID NO: 78663 - DNA, 503 bp, Cannabis sativa
tccgtctcgagttcccaggttgcctcttctacttttctgtttctccgtaatacttttatcaatgcaattctcttgttctcaagacttttttattctatccagtacttacactggttgctcttcgtatgatagatctggctgaagttccaatgcttcataacacaaaatatgggacgggtttgagacatgcttccaaagcatcaaaatgtggaacacattatgtacagttgccagcgctgggggcatagccaacctgtacgctacttgccctatcctctcaaggatctcgaaaggtctaatgaacctcgagctaaacttttctttcacccacttcatcccaatgaataggtgatctgcattttcttccatattaaagttcataaagactcatcccgactgtcgcctaatagctgtcatggtacgagaactcgatcaggggaaggtactttacccatgatcccaccgggatcagtacccctacccgtgttgggttttatgcccta

SEQ ID NO: 78664 - DNA, 1043 bp, Cannabis sativa
cgcctgaacactaaattctttcatcagaaagcaaccatcaggaaaaagaataaaaagattaccaagttactcgatgaccaaggtgaagagcacacaacacaaccgggaatcgccaatgtggttcaaagttattttcaaagaatttataccactgatggtatagatacagaggcaatgcagtatattatgtccaaaattccttgtacagtctcagctgaagacaacaatacactcacacggccatacactgctgctgagatattcgaaactctctcaaccatgaatgcagatggaagtccaggaattgatggtatgactgtgcgtttttacctgaattattgggatattgttggagatttagtcacgacatcagttcttaaagtgctaaacgaaggtgcagatccttcaatcttcaataataccttaattacactcattgcaaaagttaaaaaaccaagtagcatgtcacaactgagaccaataagcctttgcaatgttctctataagctagtgtccaaatcaattgttttgaggttgaagccattccttcctcaagtcatatctgactcacaaagtgcttttttatcttcaaggctaataactgacaatgtgcttgtggcatttgagttaatacactctcttatgcacttaaagagaggtaaagaaggctttgctgctatgaatcttgacacgagtaaagcattcgatagagtcgaatggcatttcatccaaggactgctgtatgctatggagtttcatcaatatgtagtggaacttattcttcgatgtttatccagtgtgtcttactctttccttgtcaatggttcagctcatggacgattgattccaaactatggcttaaggcaaggtgaccccttatcaccatatttgttcattatatgtgcggaagcactcttgagactgtttcagtatgaagaaatgaatgggatgcttactagtctacgtgtttcaagaggagcaccagcaatttctcatctttattttgtggacaatagcttgttactatgtcgagcaaattcaca

SEQ ID NO: 78665 - DNA, 928 bp, Cannabis sativa
  modified_base (42)..(48): a, c, t, g, unknown or other
aaacctcttttcttcagaattaagccctagcttagtgaaaannnnnnnataagacatagtctaatttagaataataattggttaattaattaagtgagtcttactaataataccatcactaggcctgactagaaacctagctggggctgatgacattagaggaaaacttccaatcgttgccatcgtagggtcccgcaatgttagcctctgacccacttcacagctttgctaaaaggcagtggaagtagtcatcgacgatggatttggcactggcgtcagcactgacgccaggattgaaggttgagggatcgaggttgtgagctagatgaggtcgttatacttggtagcccttcataagttattcatcgtcgacacaacaggtcatagcttctccacctagccccaacatctcttgcacctcgtcacttctgcatggtcatgccttagtggatagcgggggacccaggtttgaggatactggtggctagccgattcttcagagagttggccgactagatctaagcttttcaaaggtgcatggatgccatgggaactttaagaccatgtgcgttcaccttcttcattttcttcgtctagacaggggagcagaccttcactttggacgctttcgatgacacccttgacaagcatgcctctaatcttttgccgatcccaatggataatcaggcgacatctctccttcttttcttgggtaagctctcctctttccagatttgtgacggtgaacatcatgaatgtttctatctttcttcaactctcaatgaaagcaccaaaatgttttcttagatttttagaaactgaataaaagcttaagaaaggaataataggttaaacaacgaatgcgaaatttttacgtggttcaggcattaactatccttagtccacgagtccattttattaggcactt

SEQ ID NO: 78666 - DNA, 1412 bp, Cannabis sativa
tagactaaaaaattcttctggatgccgaaacaaagtgcatcagtacatcccttctaagaggtgcattgtagaatcaccttaaattattgatggagtaatatatataacgttttattttaaaattaccaaataattacattaaatattcatcgcgcgatttcaaaaatatatatatatatattcatcgcgcaatattgtccaaattaatatatagttaagatatgtgtattgtgtcacataataataatttgtaactaataacatacgttaatacgtattgagacttacgtcatttcagtatagtataatataataattaaagttaaaaccatattggtacttgtaacataataattataaattatatatagtaatattcatctattgggttactcgaaaggtcattggcttatagatcacttgtccacaaatcttagtggatggatatacatataaatgtcggtgtgtgttttgtacgatgtatagttgtttttttctttatcatactttaattaataataacactagctactactaacttctgtaattactttttttttataaaccgattttatccaccaaacttattaatattttattatcaaaatttgattatgtggtaaaaatttagtagctgtgaaatgtaatataggacacacaaataagccggccgcaccaaaacacaatatttattcaattaatatacattcctttccttaattacttgttgtttattatatttgacatgcatccaataaacggcaccgttttggcatattgaagaaattttgatgaaatatgtgtgacagtctttggatctagtctctggatctgtaagggaaaatactggataagttgtgcaactctgagattattttgagattgtgtaggtacgagactctacagtttaagagtgcttaaatggattgattggtactaatactacctatatcaacaatgtgcatcttgtttttcggtagcgcccatcacgaaagaactttacggttaaacgtatttgatctaaggtaatttcaggatgaatgacgagagtgacgtagaatcattattctgtgagtgtaagagcctaatagaggcttgaagcgaagattatatgggtcctgagatgaggcatgcaatctaagaagaaaaagaaagaaagatgtttaggtgatgagattgattaataaacttttgagaaattaggtcagcaactctttttgcagtataggtgtgggttatgttgtctctcggtctcccactttgaccaaaagaaaaattacattaattttagtatatatatatatatgtgtttagagagagaaggaaccaaaagattaatattgtgaatgatgatgatggtgatgataatattggctttttctttttcatttttgatgagcaaaaggaaaaaa

SEQ ID NO: 78667 - DNA, 637 bp, Cannabis sativa
atggtctaacacttctagcacatgcttcatgcccttaaaaattttgagataaggcatttagaactgttgtttatatacataacaggcttccaacacttgtcctacaaaataggtttccaatagaagcgttattcaatattaaacctgactacaccactttcaaaacctttggatgtcaatgctttcccaacattaggccatataataaacacaaacttcaattcgatcctcaccatgcacctttcttggatacaacattaatcacaaagggtttaagtggttaaattcatctgggagaatctacatatccagggatgtcatatttgatttaaagaagttctcccaatggttagctcaaacacacaaagtgctttcttgccaaatcgtttgatcacggacaatgtccttgttgcctttgagttgatcaatgccataaaaaaaacagcaggccaaaaaggaattgcttctttaaaactggatatgagcaaagctttcgatcgcattgaaaggcatttcattgaaaaagtcatgcagaaaatgggtttagatgatagatggatatctcttattatgggttgcttgactacaaacagattctcatttctcttgaatcgagaggtcacaggctcactaattc

SEQ ID NO: 78668 - DNA, 614 bp, Cannabis sativa
ctgccacgctctcaaaagccgcccagcaatggtatttcaagttgatgcctggaaggttcaactcttggaaggctttctattgggaattccatgcacaattctcttcttcttcccaactcccattgcacttagaagacctggtcgaagtgaagcaaaggccaggaggcgacaaaagttgcacggttaaccgaagaagggaaattgaccgcgatactgggaggcattgaagttctcggagagcttcggaaggatatcaaaagagacggagtagtagcttttatgagtgacttactcgatcgtgcagatggcttcatcaagcttgaagaggccattcagcgagtagaagtcgagcttaaaccgaaccagccacaagctccctctgctggaacatctgtccagcacactcagtacccaagcaattcaggctcgggcagtaaaaggtctaacaaaaacaacagacaaggcaatggggaaaagggaaagtgtgctggcaaagctgcacaggcccctagagaaatgttgggttttgtgccctaaataaaaccctttacaatctgattagttatcaatataagaaatttgaagtgatctatgtttgcatgaattttacatgc

SEQ ID NO: 78669 - DNA, 1172 bp, Cannabis sativa
gcacaatttaattagccaacgtaaataagtgtattaacaataaatctatatatatataagagagatatgagacggcgacatggcactctataattactctaaatgctcatatctattctactcttaattgtctcatattttaatttttaattaaatttataaacattaattaattaattaatccatctatttgtatatgtcacttagttattagttttatataagacgacgactactactacaaataataacaataataaaaatatcaaccgtataattaaatctttatcattaattaataattaaacaacatatctaaaatatctatcacaaaatgatgcctaataaataactttgtgtactattaatactaaatcacaataacaagccttaaccctaaatttaaaagcacaaccatatcctcctaatcattcctctcttaaatattgctttctctctccctctacgtctctctattctgttgctattcatgcatggtttgtatattttgcaatataattctgttactattgaattaattatgcaatgtctttgatgatacaaagtagtacatctaaagtaatactaccaatctcatatatatgtgacataatatatattttgttcttttttcaatacagaataatcatcatctactacacttgattcaacacaaacattgacgatttttgaagccaattgtcaacacaaacattttgaggatttctgaagctaattgatcaaattgttaataattataattatgtggtaaggtatgttttattttattttttaaacattaattatctcagtctccttattttaatatacttgtcttcatatcgtttttttgtttttttgttttgtacttttgataattttatatgatatatttagccaataattgtattttattttttttgtgatgatagagcactggattttttagattggatcattcttgtaactaataccattatgtgttgaaagcattaaagcaggatttatattcatggtcaatatgctaataattaagatgtgtcgttgtaatttatctaaactataattattatagagtgattctacaatgcacctccttaaaatggatgtattgatacattctctactcgtttcggcatccaggaaatattttttagtctaatttttttcat

SEQ ID NO: 78670 - DNA, 724 bp, Cannabis sativa
gtgtgttacttagtgaaatgaaatcagttcccaagttgatatgtcaacctaggcgcccatagttgggaatgggctctttttggctgtcgttgatgaaatatcatgtcttggcatagttccttcatggatttgaggaatcggggtccaaggagttccctggaaacctaaaccctagctgttgtgtgcccatatcaactagatgtcaaccagggcgcccattagggcttcaaagttctcgggtgtcatttcttgtagacttatctccaaagtctgaaacttttcttgggcatatctctcatgtatcatagggaaatggctaatcatatcgcccataagaagttgctaagaaccaaaactgatgcgagatggtgcacattatgtcaacctgggcgcctagcatgagcactgaacctaggttaagctatagtatttccacgtgacatcctcaaattcatggcttatcaaaatcgtggcttatcagaaacaacttcgctagatgttggtggctacctaggaaccccctgatgtcaaccagggcgtaccgacacagtttcatttagccaagttgaccatcctagtattaggaggtaaggccccagggttgtttccttcgtgccacatgtgaaaagtggtttttatgtaaccgggccaaattaacgagtaaacatttgccacccccccaagttagtaaaacacaagtgtcatgctgactttccaacacaaa

SEQ ID NO: 78671 - DNA, 507 bp, Cannabis sativa
ggactatggaggaggaggagggtcggggtggggtgaaatttagcgggagaaagaatgaaaaatatcttctgagttaagggttgggattatatagaattttattaccggttggacctgccggtattaataggggttccgccggtattaataaaacggtcagaattaattgactaataccgtcggttctcgccgatattagtcatttcaaattttgggcggtcaatatctcgcccaaagtattagaggcagattttctgccggtaatactaaatttctgccggcaatactataatttaataaatatttttttaattattaaaaagtaataccggcgaaataccttttccgccggtaatagccccattaataccggcggtttggctccgccggtaatgctcccgtcggtattgaatcaaaatgttgtagtgatacttgtataagtaaatgtgtgttttttattaaataaaataataaataaattatttctaggattgaaataaattttta

SEQ ID NO: 78672 - DNA, 654 bp, Cannabis sativa
gaaccgtaattattaaatttaaaactgtaaattgcacaacaccatgcagtttggtaaaattgcaaactataactgcaccgcaaagaatttcaaaccctatttttttctgcggtgcaggctgttgtgcggtgtggacggtttgatgaacacttttaaaccttaatcacattattaatatggataatttaaaaaaaaatacaaaaacaacaaaaaaaaaataataaaaaaaagtaaggttgtcaggattttaaatattcttgcgatttttaagattttatttacagaaaatacagacttttgatgtatgtttatgttgtactcttattaatttattattaattttttattatttatatgttatttttttgttgtcgttttaatattattttcgtgttacttttatataatttttttattatttttataaaacaccttaaaaatatatataaaaaaaaatcttgcagtaaaaatatagacaattgacaaaaagaataatactatatctaattatctccaaatcggactaatgaaaatgaaaattgtccaccattttttttttttttttgttattctactattatggcatgtttactaataagtaatgtgaatcaatagtaaggtaatcattcccttatatttgtttacttgcattat

SEQ ID NO: 78673 - DNA, 925 bp, Cannabis sativa
tctattctgagatcaaattgaagcattggttcatctattttatttggggacacactatgttatctgagctttctgtgatcaaaaaaattccaagtagtttatgtctgaattaatcatgtagattacctactttacactagtttgcttctttaacttttagtttttggtcaaatagatttgaataaaattcagcccatgacagatacctactttacatatttttaacttttagtttttggtcaaatataaattcattttcctattatatccaataaagccgaatccattcataacatggatcacttgattgattcttgtgaagtaagagtcacgttgttgctgaaattgccacaacatttggcgtccaacttcgaaacttgatcgaattccatagctcgaggaaggcaaacaacttgctcataaatatttggaaaacaagaatagttgttcaggtacatttttggaataaaataatgagtcttaaacaattacatgtattaaataagcataataatatctatgtcaatatacatacccatcttaatctggatattgaatatatttgacatttttgacgtagtatcaaatattgtatgcaaatagatttttgagtgattttaggatggttttcatggttttattttctgtcatgtgagtattggttaaatacaatatatgatataataacattagtaatgcatacttttcttgaaataagaatatatcttgctaggttttcattatgtaacttttcaactttttttttttttgaaatataatccactttcttgcaaagattttttctaatttaatagaaactttaatttgtgtaacttgtgtttgtctaccgtccaccatccaccgcccttctctttctctgttccatcatccactaccacaaccctttgctctctctctctctctc

SEQ ID NO: 78674 - DNA, 698 bp, Cannabis sativa
gctaagcattgggtcgaggttccattccaacatcgtttgttcttggtggctgttccatatttggtgtcgggtttcatcacaagttggtgtggttcgtatcacctggccgacaatccccaagtatagagttggcctaggctggacaggtttatgcccagatattgtgcttggccggccagacctacattgagtagtatctagccgcccagtactcctccatggctggccaaacctataaggggcagggtctgactccctgtgacgcctccatggctagctagatcagtattgggcaagatctgaccgcccatgactccttggttgactggtattgaatgtgtgttgatcaggggtagatcatacaaattactggagtttaggtggatctagatgcccgaagtgataggttttacttcttgaattgccatttttggtgtttccacgcagtctcattcctcgtcggtcgaagatcaacctctgcgcacctcgattcccttggggaggatgtgttgtaccctggccaaccatgggtactcctgctgatggctggccagccaatggtcgtacagtgggggttgttgttgagccaaagatccctagttacccccaggccactgattgctgggatctgtctgttctcatcatttgacctttgagcaaaggtctgtctgttggaattattttacaaggatctagat

SEQ ID NO: 78675 - DNA, 1110 bp, Cannabis sativa
tctattggcttcaaatttctggatgagagctggaggccttcggcacatataatgaagaggtaagtggaaagtggatcaccttgacgtattcctctagacagggagatagaatcaagcacatgaccagtatgaacaactttgtagcgaaccgtagagacatagcccataatgagatcaatccatttgctagcaaagcccatacaattcataaccactctaagaaagctccattcaacccaattgtaggctttgctcatgtcaagtttaagagccatgaagccttttttacctcttctttttcgtttcaaatagtgcatgacttcaaaggcaaccataacattgtgtgagataagacgaccaggaataaaatcactttgggtttcagagataatacagtcaatcaaatctctcatgcggtttgccaaaactttcgagatgatcttatagagaacattacacagtgatattggcctgagaatcacccataacagcaaagtttttcttttttgggatcaaaacgagactcgtgtcattaagtccatcaggcataacttcagtgtcaaaaaaatccttcactaagttgataacatcaacaccaacaatatcccaatggtgttggaagaaaccaggtcccataccgtcaggcccgggtgctttatcaggaagcatagaaaacacagctgattttacttcttcatcatagatcggttgcaagagagcatcattgtgggtggcattgacagaagttttaacattatcaataattaaaggagaaaaagagttcgtggaatgataaagctcctcaaaatactgatttataagggattcaagacctgtattccaactctgccaggtgccattgttgtcttgtaattgctgaatttgattcgatcttttacaagcactagccgtaggatgaaaatatttgttatttttgtcccccgaatgcagccaatactgctttgaacgtcgcttccaataaagttcttgctgtgctaggatctcaaaataattatttttttccaccataaagttttctgcatcaaactcattaacagagtttttgaatttagcaagaagcttcttactttttgacaaccaagacttaaa

SEQ ID NO: 78676 - DNA, 1623 bp, Cannabis sativa
tttgctgggttaggggggtaatcggtgggggggagaggtgtgggcggcctgggcagttggtggtatcggggagtttcaggtggcggtgacggagcttcttgctatgcgagtgggtcttcagtgggcgtccatgttagggtacaagttggtgagagtggagacggattcttctgtgattaattcttagattaattgtctagattctattattatgtttaaaccaattgttgcagagattatttctcttctagctgttgttggtggtggttcttgttgtgccatttcccgtgttgcgaatggtgtggcccacgcactagtaaagtctgttactagttttataggggttgatttgtggacagatgtttgtcctagatttattagtgctcctgtaataactgatttgatttaatttgatacatgctttccttcaaaaaaaaaattaataaaaaaagataaatgagaagcctaagaatgaatcatttttttaacaagtttccttttttcacaccattaatccaaaataccaaagaatattaataggtataaacattttttatagaaaaacaagaaataataatattacatagataagcaatccaaagcaaacccaaactaaaataaaaaagaaaccaaatataaagattacaaaaaataaaacctaaaccaaaaatacaatcaaaaagaaaaattaaatctctaatccgcgagctcagactgtctctccaagtgtccactacgaactctgacaatgcaagcccgattcaaactccaaccgtcgtcgtcgatggaagatctaaaaaaggaagcaacaaaaaaaagtagatgagatatcttgtagaataaagagaaaaagatggatctggcgagagggttggggcttttgagttttggaggttggagaggaccatggcggtcctcgtttgagttgtcgatgacggacaaggccaggctaggccatggctgaggtgccgcacaatggactgagagggagagaaagaaagagagcaagtgggtttgggggtttcactgcctgtagccactgtgggagtggtggtagttgactatagtggttcgcgatccgaaaaggtctccagctaggtgttctagcgaggcttcaaacggaggagaggcttcaggcagtggttatttttcagagagagaaagagacatagagagggtttagatgagatgaaagaaatggaatgaagaggagatgaaatgtttgatgttttattttttaaacgcccaaacatcaaagacgaccatcaacgatgacaaagttgtcagtgatggactaatcaacgataatgtgtcagtccatccctggcaactttgtcgtcgttgattcgtttggaaggaaaattcttgctcaatccaacagttctttttcgaaaagaaaaaaataattactgacgataaaattattgttgataaatttttcaacaataatattgtcgtcaataatcatttatgtcgccactgatcttttattttacaaaagaaaaatagtttttatcagtgacgatccttaaatgtcgtcattggtactctcactttaaagtgaggactttggattgttactaatagtgcggtcattaatggctattattcttgtatttgttt

SEQ ID NO: 78677 - DNA, 1669 bp, Cannabis sativa
gctgtttcccacgaaagatactcatgaagttgataattatatatttaattgcatgccaggggcatgaagtaacatctttatattctataatgctaaagggagattgagtgaatatatggactatggtctttatatattgggtgcagagtggtgcacctaaataaaacgtgcacatagataattaaactagtgataactagctattaattataagttagtggaaaattttaattggatcccttcaaaagcaatatttgataatgaccaaagtgaattaattaatatataaaggggagctcaattcaattcgcatatgaatatatatctctctaaaagtaagtacttaaatagccagctcacactttcaccccacattagtagtagggcatagctaggtaaagttaaatatgaccaaagcgaaaggaaggatgagaaaaaaggagaggatgggttctaacccaagactatatatatatatgctaaattaaaaaataaattaaatatgaccgatatatatttttttaatatgaaatgctcaattgtttttaataatatagttagtgcgtgatatatatcacagtttagtaattcttttcaattgttgtagaatctcattaattttcattcttttttttttttttttggcactcatttacaccattttctttgtaacatatgtaattatgtatatgttttttaactcataaatctaattgtcctttttttattcagatcgaagagattgaatgtttaaaaaatgttaaaaaactagtactccgagaaattattaataaattgtaacgaatattgttacgaatagttaatttacaatgacatcactcatgacgatcacttgaaattattaattaatacgtgtaagaagcatatatgtaatctttagatatgtgtaatttaaaacttttattattatcgacgtcatttttcaattatatatatacatataaatatatttcttgaggaacaataaacttgttttcattatcactgaaattaattaaagcatagggggatgaagatgaagatgaaagtcaagttcttcttcttcctcatttaaagtcaaatccaaatacttacgacgaacaaacacattatataatatatattggtttgtggattatttgtgcttaatatgggagacagcttattagctaaatcaaagattgtacgtgtaaccggtcaagattcgagactcgttcttgagtagtattattgttaattaatagtcagtcaaatatgcaatttttttccatccgttcacactctctatctagctataagccctttatttagtctttgtctcctaaaattaacccaagtactaactttatatgatacgactccattcctataaggtcacatgcgtcccccaaaagtactacattatttaaccactttcaatattgcattaattgattctactttcaacccacgtctagggaatctacatatcttctttaggtacgtattcataatttattttagtagctacaggaacttcctttaatttcatgcaaattaataaaccaaattaaggtcatgtttggtgttcatgcctctctcaataaataaaataaataaattaagattatttatgctgatagtattattgctctttcataaaatcatattataaacaaattgctaagtc

SEQ ID NO: 78678 - DNA, 2933 bp, Cannabis sativa
  modified_base (45)..(65): a, c, t, g, unknown or other
ttaacaatctcaattgttcgggggagaatttctaacggccaaaannnnnnnnnnnnnnnnnnnnngtacatgtcaaagttcgagaggaaaaattactaattagccttatcattatttgcactttaaaatttaaaatggattgatttaatttaaaattatgatttatatttcgtagtcattttaatttttttaaaaggtagttgttcatttttttaataattttcttttatttttaataaatttataatacataaataataaaataaaaactttcaaaaataatattaattatatatcaatattctacttaaaattatcataaatatcaatattccatctaaaaatattatattaagtatacataaagagttatacatattgatttacttagaactactattgataattttgaaaccgtaaccaaaccaaaaaattgtaaatggtctgaattgaccaaaccattcactctttatttggtgcgctctcaaatggttcaatccgaattggttgggatttgaaaccacgaattacggattatatgaataacccaaatttggttatatgagaatgggtgttcatccaatccaatccgcactatttttactattttactcatagtacatctgatccgcgctaagaattttatttttttggatccaatccaatctgcaaaagtatggattggatcagttattttagatttgttagtttttaatattaaattattaaatatttatgaaaaaaaatttacataactagcaacaaaataaaataaattataattattctatatctctaacaacaaattaaaataaataaaataacaaattcaaagaaaaaaaaggtatgtgtaaaaaaatgtttaattttattttaaattgtatgtaaaaaaaaaattatatataaaaatagaatatatatttgatttattaagttttaaaatatagttatattactattttctttacattaaaatgctatttgtatataatttttttttataaatatgtgtgaattgaattgaatcggttattaatcaacatccaatccgcacaagtgtagattttagaattttccaatccaatccaatccgcacaagtgtaaaaattcacactttgcggattggattggttattttatgaacaccttttttatttttgcaaagaaaaagattcagatacattttaatttgttttctaaataataataaaataacaaaaaaagccatctatatttacatttatattcaagcaatctctccatacattttgaaattcattgtcattcactacatcatctctcattaattctcgcatacattttaactcaaattttctctctaatatctaaaatgcccaaatcccctaatctccaaatcaccccatttcaaaggtaatgattttgcaaaaggaaaaagaataaaaagttttggtaatagaaaaattagagaagcatataaagaccacaataaaataggttataaagataaccgataaggccaaattttacttcaaaaccacagcagcattcctctgagcaagatacctctgcacatattcattaggcaacgatcgaatgagcttgaaaacctcagcattcgcgtaacgaagattagttcttggatcggaataaggtgcctgcatggtgtataaaaagtatcactaatcacatcatttcgtaaaaagtagtgttttagtttaaattgtgttagtaccataataagcaagaaagagttgcttacaaattagaaattacaactaaaagagtacatacaaacatttagcaaatcatttatcaatccagttgaagtaatgtggggtattcaaacatagtattcatacattttttgataaacttcgtaaacctttttaaatcttggattagaatcctcaactctaagtagattttccattaaaagatgtatatgaaatggccaaacaattgacttgtgttctaaaatctgtcaatatgacaactgaaactacaaccgataacaatggcaatatttcgaggagaacaacataatcagtgtgtagccgattagtgtgtaaagagagagagaaagagaggtacctcatatccagttatgtcacaaatttttttgcaaggatgcatagagggaggagactcaatattgacatctgaaaatagataacaccaacaactcaaaacttagaaacagctttatagaacacaaaggataacatagtattagtaagttcctaacaacaatggtcaactagatttaccttaaacagtacaaagacataccaaaaggagacagtgatctacaataatttcattatcgaaattctattgtattagattctagtgaattaatgtattctataaacaatatagaaactctttcaatcaaacaaatatattgcaattattctaatcgaatcattcataaattttctatatgaagaataaggaagaacaaaaccctctttactttttatcacaaagaaccaattaagaaaactaatcaaccttaaacttctcagctcatcttcaataatgtagtttcaaacacataaggcattttgctacacaaacaaaaaaatcctaaatttctcccaaatcaactcatgcaatcatgaaagaaaagaaatttactaacaattgggttcatctggtggaaaattctggtaattttcagcttgaatgatctgccttaagtgtttccaatgtctacctcttgattgaccttttgggtacttctcatacatttgaactcgcttaaaactcaggtgagttggcaataccaactcggcttcaatcacctctggttccattcttacggttcaaaccgaagagaaaaaaaaaacaatctttaataaatttcacaaaagggagtcaatttaagcatatataaaccctaacaatggtgatagtgaaatctattaggtaaaagacaccatttttac

SEQ ID NO: 78679 - DNA, 1823 bp, Cannabis sativa
aatttgtttaacttcagcaatggaagaggtagtgtcacagatcctggtgctgattttaacaagggtcctgcctttcccatgtgtctgcatgaagaggaggtgtgccatgtcctcttcactgatgcttcctgggttctgggggaagctggcattgcagcggtaagggttgatagaacgaatggccagtggtttgtcaattctcaaaaaattcaatcgcaatctgctttggaagctgaattcagagctatccttcttgctctttcctaggctgttgagataggttgaggtgttgtccatattctctcggattcgaagatcgctgtacaagctttaacagcaagtagaagcccccctaattggaagatttcaagtgtgtttttttcgataactaatgtcattaaaaagtttaatgtgtgtaagttcttttttatcaaccgaagttttaatactttggcggatgatgtagctaaaagcgctagagttgctagccaaccagctattttgtatgtaggggagggtttttcccctgtgatttctatctactttcttatttaatgaacaagacgttctttcaaaaaataaaaataaaaaatcatatggaggttatggactcaataaataagtataaaactcattctccaacaactataagtcctataacttttaaattttgaaattatgacgtgtaacatcttttacactcttaatatcgacaataattgtagaggttactcataacaacaagtaactctccatatgttacaaaataacgataatttgtcatactcacttttagtatgttacacatatttaatctgcactaggttattgttacgtgcattgcacgtatagttagttatatttctaatttttatttttgttatgtgtatttttaaaattttataaaaacttattaattgtttaattttttttttttaaaaaaataatatttaaaggtttaaaaatttaaagaaaataaatataaagtttatatatatttgaattaatctaaaatttgtataagttcaattaatctaaaataaataatattaatgtttatatatatttaaattaatttaaaataaataacattaatatttatatatatttataaaactgatcctactaacactgttaaatttaataaaatatttttatattcttaaaatattgtattatgttaaaccaacaaaaaccgttagatagcaatattttatgtataaagatatatatatatatatatatattatatactaggttattgttacgtacattacacgtatatttagttatatttttaatttttatttttgttatgtatatttttaaaattttataaattaaagaaaaccacttattaatttttaattttttttaaaaaaacaatatgtaaagttttaaaattttaaggaaaataaatataaagtttaaaattaataataattttaatatttatatgtatttaaattaatcttagataaataacctaaaacaaataatattaatatttatatatattaattaatttaaaataaataatattaatatatatatatttaaaaaactaactctactaacaccgttaaatttaacaaaatattttgttaaactaataaaaaataattaaatagccacattttatatataaagatatattatattattcaaaaaaataatataacatgttctattaacaaatcttcgaatacattatcgaggtgttcccttccttccatccaatattaatgttttcatatttttaccttgttaatatttagcttctattcacaaagttaatgataaactctgcaaatagacataat

SEQ ID NO: 78680 - DNA, 891 bp, Cannabis sativa
gtcgcaatcattttcttcaaaaataaaaaaaaaacgaagaaaaagaaaaagaaaagcagtttaaaaaatgaataataaagaattattggtttgagttgcaataatataaattcctcgtgtgtattgcatcaagagagtatcaagatagttttaggatgaacttgagattcttggaatgtaaaaatttatggtataattgagtctaaatgactttttcatttacccttacctaagccaacgttataatccttaaagttattttgatttcaaaatatttattgttgacattaatggagaaggttaaataatgcaagaatattaaaaatttagattgtgattttgtttggtgagttgagcatatatggtggagtataaattattgtggtcatttgtgaatcctattatttattttctattggactttaaagttaaactttaaagcacgtgaactgaaaatctagttaaagattataattgagattttagagaaaatgtaatataatgtagataaaaatgatgactttctttgtgtgtttgcttttattttatttattttttgttagtttaccttggtctttactcgagggtgagtaaaggttaaatttggaaaaaattgttaggtttatttttatgtatttttatagtctaatttagggtgtgttttagtatttttataattttattgtgcagatttatgcttggtttttgttttcatttgtttttttgtttagagatctttaattttggtaattttggtattgtacaagccttttgagaaaaaattgagaaaatataatagggaaatgaaacttcttttagcttggatgaatttcctattgtcaaaaataggtcaaaaatggatttttgagctcttaaattcgtagtcaaagg

SEQ ID NO: 78681 - DNA, 776 bp, Cannabis sativa
aagcataccaaaatgagatacccttttggtaagatcaatactcctcccatatcattatttggtaccaaaagctcttcatttttaaaatttcacttctcaaatgggaaatttagtaaagcttttatctttctcccataagaaaatgagcattcatataaacaacaacaacaacaacagaagagagaggcagagatcattaaatttgtacaatatcttcaaatataaataaattaaggggttacataagatacctgatagccgagtagagatggaggcgcagcagaagagagaaagaaagaggggtttaagggtttttgagtgagtttgagaaagaaagaagagaaattgcagcagaaagtgaaaagacaagagtgtgtgaacttaccattgcctctccaagtaagatataattaggcttgcacgtttaattaaagatatatccacatcatgtttccttttctcaacagatcgatcatatttcatcaacaattgtgtaggattttactgttttaaccctacaccaacaaagaatgtatatcagtatcaaaggttagaaatgacctttccttgtctaatttaatcttagactaatacggcaccgttttaaccccacgacaccaaacttaatgtcgtattgatcctttggttcaaagactcaatataagagtctagaaccctaaacactcagacacaactcacacacagcctcacaaactcgaaaccctagcagagcaacacccacacacaaacacaaactagattagatgagtgaaaaa

SEQ ID NO: 78682 - DNA, 644 bp, Cannabis sativa
  modified_base (292)..(296): a, c, t, g, unknown or other
cagatttggtttagaaagttctcccagtcgtcgataagcttccatcgttacaatcctgctgccaagaagccacctctaatgttgtcgtgaagttttccgtactgttgagaagtcttccatcccttctccgtcagaactaagggactggtgcggggtttcacggagaagatgttgcaatggtgacagttaggttctatggagaagataaagaggtagaaagaggtagaaagatgaagagagagagagagtgtgagtgaaaaaagaaaaaaataaataaaaaatatttttttannnnnataatttttaaattatttttatattgtaaactaattttaatattatgcggattcatcaaaatgtgccacgtgtacactgtgtacacatggtcaatccattgtggcatttaacagagatttttagatatgagtgtaaataagaaaatagaatgtgagtttgataataaaaaaaaatcgatttatgtagttaattgttaaaaaatataaaatttagatggttttacagccaatattcttaagagaaactattaaaaaagtaaaggattatttagttcatattaatatatattttgatacaaattggttataaggtcctaatttgtatttgaaaacaaggttcaaaaatta

SEQ ID NO: 78683 - DNA, 1778 bp, Cannabis sativa
tatgggaagagaacccatgcaactaccacacacttaaattgtttggtatatttcacaaattgtgaaaatagaaataatgttgtttctaaaaattagttatttgtgcacgtatgtaaagaaagtaacacaaacccgacgaccaccacacacgtgtgggagtactcataatctaaccgagcttaggttttagatgggtgttagtatgcttgcataatcatattagtacacgagcgacttaattcgtaactcaacttatataattttatcagtataatttagttttttttttttatttgtgtatatatagcaatagtaagcaagtaaaatggatagaccaatagctaaataacaaattatatacatatagtactatagattttagttctggtatgtttgaggaaattacattatatactcactttgttttgcatgttttaatttttatttttatttttatattctttatgatatacttacttttatagatgatgttcccattatatcacttagattaatgtaaattatgtgctagacttaaatagagaatgaaagtatattgggcaactcactcacaaatgaatatattttaataaagtataatatgagaatattttttattaataaacaaaaaaaatattcctcaatttatctttatttagacaaacaaaaacaaatcataaaatcatcaattatattcaaataaataaatacataaaatcttttctttgttgacatttaaaatacaaatgtgatgcaaacagaaaaacttgacaaaaatataaccatccaatctttatattgtatatatggcttattaatatatatatatatatataattttaattattacttatgctaagacacaaaaacatattaattattacttaatattatattatacatattcgaatatcatcatgactctcgatcaagttctaaaatcccacataataatataaatttttcatttaattttctatttttctttactataatctttttataaattttttatgaggttacacatgacacaaaaataaaaataaaaaaagcttttataatattctagttccaattcatggagggaagtcgaaactgtggtgtattattattagtattactactagtactacgcaaaacgccgtcgtttacagagccaggtgggatggaattattctgatgatgaaacgacgccgtttgatttaatatagcaacaaacgacgacgtattagaagtattattaagatcagcatgaaagcgctttgagacttgatcgtgtaactcatttgtccaaaacgacgattgctgttgtcgtttgactcccatttgaagaagatcattattattggccgtttgatctgaattagctgatgatgatgataatattccttgtagaaaactacaatcttcgttttcaagtaataaagaagtaaaattattattattatttttgttgttgtgattattattattatcaataataatatgatcatgatcatgatgatccatattattcatcatcaacggtggtgatcgactttgctgctgtccattgtttttcttgtatattcgacataaaacccaatcatccagctacaataattaataattaaattaattaaaattcaacaattatttttaatcaatataaaacaatataaattattcatgaaaatacttatatatattataggttattatttagttatattgttattatatgtatttttaaaattttataaattaaagaaaatcacacttattattattattattat

SEQ ID NO: 78684 - DNA, 790 bp, Cannabis sativa
agggcataaaacccaacaacatgagcattcaaaaaatcatgatacacgagaaccatgtatgtcacatacacctcgatataggggagtcaagtgttaccttggtatacgggagccaggggctgtagtggcattcaaaaaaattcgtacccctaagttagtatttctaaagtttaatgaaacgttgacattatccctagtaatcgagtttcttaatcctaaagtgctagtgcgagtgctggtaagttcattaagttgaaaaattacacattcaaactatttcatgctagagttaagcactattatgatataaatgcttgaggtctcacaagaatataacaactgagtttataaatctaaagtgctagtgcaagtgtttctcctcaaatctctaaaattaaaaagaaaagaaaagcatcatcaattatagaaagctcttggaagcaggatactacatctagtaaagactttctaattgattgaagaaaaccctctaagagtgggatgttgccccagttgtggtactcttttagtggtaaaactcctcctaagtatgggttgttgtacgtagcacgagtttagtccaatctgtcttttttctttttcttctcttggagttttttcttaaacctttaataaggttttgtgagctaaaatcattgaacaaagtttttcaccaacccgtgatttttcccataaccgtcagtgtgtgattccaggttcagctttcaagacaaccattaaatatctcagacattgaagagacattacgcatcacccatccgattagttt

SEQ ID NO: 78685 - DNA, 562 bp, Cannabis sativa
ttttctaaactctcatgtgtttaatttcattattttaaagatattcatatttaggatgttaatcaacatacttgttggtaaatctagatcatgataaaatattcccaacaatcccatgttaatttgctcatctatatgagatcttgtggattcttccaaccttggaggaatgtcaggatcaacaggactcacatcattggctagattgacagtgttatctaggtcggtaggtctctttatggtgggagaaacactagtcttagaatttaccgtcatgggatcctgaggaggattcgaggggggatttcttctatttagaactatggtgataatcaaaattttaaaaattttgaaaaaaaaaattacttttaaaaattttttaaacaatttttttaattaatattttggacttttacgccaatttggaccttgacacccagaccaccagacccaaacccgaccacgacccagacccgaaccccatactcaaatcccgagcctcaatcccagcccggatccgaactcgaaccccggctccagacccaaacccaacttaaatatt

SEQ ID NO: 78686 - DNA, 565 bp, Cannabis sativa
taagtaaaaaagagtatatatatatagtttaattattattaataatattaattacctgaggaggtagactttgcatgcttgtggtagccatggaacccactaacacgttccatagtttgatctctcttatctttcttataattattatattatatatatatatatatattacaattatttatatatatatatattaattgtgtctcttgaatgtgaaacttagatgatgtgagtttgaatatatatagagagagttaagaaaaaggtaatacaaagactgtccacgtggcatttatattaccggcgttctcaacgaggcaaccccataattaccgctaataacactctttcttccaccgctactaacaggttcccggtcaaacttactttatttattactaataataataattataataataagagaaatacaaaaaggtatccggggtgtcaagcaccctcttacgtgttaatatcgctattggtctagtttagtatcgggtttcatatagtttaatataatagtttttagggagtattactagtcaaccgcaaagtgacacgt

SEQ ID NO: 78687 - DNA, 2880 bp, Cannabis sativa
tttgcaactctgactatgcaaattatccattattgtgaatttttcaaagctatgtgaatcatttgagcaaaactagcatgcataaactctttcatatttccttatgcatatgtttttatcttgttttgtgagcttttatgtaggtgttgtatgttgatggggatcaagagacacttaacctccaacaccaacgatgggagccgattgtagatgatgctttagctgaggaagtgtgtattttgcctcgagtcgtgttcttgtatctgttcttaatattttcatttgcttaattattctgtaatgttattggggtgttatgtattaacagggtaaaaagactgatcttcctggaccagactcttcatctcaaatgtaagtttttaacttgtatgctttaccaatcaattgtaaacatctttatgtatggtcaaatcatagaaaagaaaaagaatgagagtgtggactaccttttctttgatactaaatagtaaatagtttgtatttccttatgctattctttgatatttatatttcatctgttctacatattcagcaattcactagaggcagtaacacctgttcaagtaaaaccagatcaggctgatgatttctctgatgaagggttggattgctttactcgtcttttcaattctttgatattgttttcatggttttaactttcatacttgagctgttgagcaccttagatggtagctacagtgttttgatggtctgtacattgtgacacttttgaactttttcttgctgattctatgtgttcagaattccaaagggaagactgagaagaacaaagtcggttaatagaaaacaagcgaaaagctcagaccgagcaaaggctgtttctccttcaggaaggttggttacatgtatttttttttctcatacactcaaccaccatggttgtgtgaacagttttttaacttgcgggttctatgcattcagaaattctggacggaaaacaaaatctaagcgggagaaacaagctgaaacatcagatcaagcaaaggctaattcttccctgaaaaggttggtttttgtgcactttttttttctttctaccaattcttagtactttggcattggtccattagaacactcaagcaccatggacacgaacaatttttaacatacgggttctattctatccattcagaagttctggacggaaagtagagaacacaaaaggcccgagtcgggagaaagaagctaaaacatcagatcaagcaaaggctgatccttcccccaaaaggttggtttgtgtgtactttttttctcttacaaattcttagtactttgaaattggttaagtagaacactcaatcacaatggacatggacaattttcactcactggttctatgcatttagaaattctggacagaaagtacaggcaaagtcaaatcaggaaaagaaagcaaaaatatctgatccaccaaaggctgatccaaccccagaaaggttggtttctttacactttttttctaccatttcttaatactttgtcattggttcaattttttacttggtggttctatgcattcagaaattctggactgaaagtacagagcaaaaaatcaaattccaatctggagaagcaagctaagaagtcagatcaatcaaaggctgatcctccatcaggaaggtttgtttcttttttgctacactttacgctatgtgatttgagtttttctcttataaaaccgactctacatgttaagtaggcaaggaactagagcacagaagagagcttcagaagagcctaatgaagtgaaaaaatttgatcaaggaaaaactgattctttcttggagacactggcgtatgtttcttccccttacaaactctttcgatacctttttcttgatatttaagtgttctgtttctgcatgtgtagttgtctccgaaagagggtgaagaaaagtgctaattcggataaggggaaacaaccgaaaggatcacattctaaggctgattcttcaaccaaaaggttgagaataattttataataaaacacatcagttccattttatgctcttactaatgaaatgaatgactatgtattggttttgtaggactgaaatgccaacatctgctgcagatgctcctctgcttgacaaccctgttgaagcagttgtggataaaaagctgaaagataatgacagcaattcgggtgcggtggtggatacaaaaatcactgaggagatggcagaatcgattgagaaaaagaacccgaaagttgataatgaaaatggagctagcaaagtgtgaatgaagtcatcagagaagaagacatgaaggcctgaactgagtatggcatatatagttcatggctctttgttttagttttaagttttagttatacacagaaacattagaagccattgttgggtttctctgttttccttttattggttctttgtttccatagattttgaataaactacaggctacagccctcccataactacccggagttagagcactatgggttttggttttaatagttgttgttaaatggatttttggcttaaagagtttcagctctataggcttttataatcattattaatctcttttgtgttgcatgaaatttctgttcttcatggtctggtgcaatgccagagtatttctattaggtacgtcgaacaccgcaccggggtggtactctataattagttggcgatttttcatatttatgaaattaaaatatgcagaaggaaatgtagcaatgcttggcattggcctttgtaggcaatgcatgcatatttacgggaaatttacatgtatactaactttggtctttttttacaaaaatactgctaagcggtattttttactcttttactgtatttttttataagt

SEQ ID NO: 78688 - DNA, 650 bp, Cannabis sativa
taggttgttaatccaacatactttttagtaaatctagatcctggtaaaataatttccaacactaagacccattaacaacgtcctcctttaacttctcgttgtcaaatgtttggaagatcactcctcccactaaggtgagctctgcagctccgggttcctcggctcccgttggtggagaaaattcccaccactaccaggaaggcgtccgaggtactagttgctctaggggagaaagtattaggggaaactccctaggtagagggagtgatttttggccttttggcaggcacaagtggttcaaacgacagcatgggatgcttgtcattcctaggaaggatgcccacgtggagcttaagcgcaaagggtcaaccgctttcccaagccaaggtgcaagaaaggaaaatttgtcaactttaactccaattccttccaatccatcatctgcaacaccattaccattgtagcaataacaaaaaaaaaaaaaaaacaacaataataacaacagcaacaacaacaacaacaacaaactccaccacaacaatagttgcaaatagttccatactagcttactctacttcaaacacaaccgttactccatccaaatccaacaggacaacaacctctcaagcccacatccgccagccaacctc

SEQ ID NO: 78689 - DNA, 900 bp, Cannabis sativa
  modified_base (114)..(115): a, c, t, g, unknown or other
atatatatatatatacctgtatttgtaaacggagatttgagcttgttccacagagcctttttcatgatgattcagttcaattagatatcaaaagtatataaatatatatatatnnataaatatatatatatataataacacaaattaaataagcttaggtgtaacaaagaatttttcacccaaagtagaccaaattaataataagaatccggttatggtagtatatatatatatagagagagagagagatggagttgtgtgatttgtatattttaggcttgaggaggagttaacagaaaacgcagaagcaagtagtccagttggcatattattaagcagcaaaggccacattatagtttctgacttttggcacacgttaacgtctctcacacggtgtgtatattaatttctacgtgtaatgtaaatggccttgcatttttcaaatatatataatatatatacatgttacagttgcatgcgagcataaattatgttaaagaaggaattttacaaacaaacgttatatggcgggtgatgtgtactatatgctatattgtatttattatttgtgctaataattattattaatttgaagaaaaaaaaactgaaaaagttcatcctcatcctcatctcatcgatctattatgagaaaatggcctaactgtttttctctcctatttcctcacttgtttatttttcaggtaattaattgatattttacccaaaagattatcttatcacaatgattgatttagctttacacgacttgtttagtccaaaactaaatataaataataagtatgcttgcagacacgttttttctttggtattggaactactatatggtttaatgaagatcgatcaagttagtgtattaataatgtaatgtgtttactaggg

SEQ ID NO: 78690 - DNA, 1065 bp, Cannabis sativa
ttatttttggttttttgggctaggggcgaattgtgtatgattgtttaaagaaagctttaatatatgatctatatatagatgatcaattgggttgcttataatataatccacagatttatttacgacaagtacaattcttacctctcattcaaaaaataaacaaggcataattatgatgaatatattgaaattctttacttttcttatctgaaaagaaagtaattgatattatttcttgttcattatttcctattcgttcatttgaactaggaaaggaagcaaaggaaagtagtatttttcgttacaaaaattctattctttgcttattttatggtcgttgaatatattcatcaaattatctctaatatattcatgatattatcatttttgttaatttgtttttgtaattgttcttcctttagttttaaatattttctttctacccttttaattaacgaataatttttttttatatgctttatgcggtgaggcggcggcgtgttgctttgcgttggatttagcgaagaaacatgcctttaaatttattatggtggagagtgattcgaagctagtcatcgacgctctcaacaggactgagtccaagtgggagcttaagaactatgtctcattttgtattaggtcctcctcctcttttattagttgtattttcagtcacactagtagaaattgtaattttagcgcccataatgtggcaaagtagacgtttacccaccagaggtttggagatgtcttcctattcattccatccctgaacaacttttttgtaatgaggtctaaatttatttgactaatatatgcacgcttattttaaaaaaaaaaaaaatttacagaaacaattacctcaaattttgaggtacccaaaactgaaccatataaaaaagtcacatcactatcgtctaaaaacactaaatttaaaaggagtttttacatttaatattgaaattttattgtattttttaaaaaatattgtgtaaactttatattgtgtattatattaagtttactgttattctactattattttttagagataattacataaaa

SEQ ID NO: 78691 - DNA, 2811 bp, Cannabis sativa
tacaatttttgtttcactttaatgctttgtcttgcaaactaggaatgggataattcaaacagaaacccttcattgattcaatcattggcatcagaaaacgatagacacgagatctcatcaagtgagaattacagtgaagatgaaatacagtctgacttgcctgaaaatgaaaagataaagctcccagaaataggaatggaattcttttatgaggaagaggcttacaacttctacaagaagtatgctgaagagattggtttttctgtgagaaaaggaaaggtggtcagactcacaaatcgagcaattagaaaaagaaatttcttgtgctcaagagaaggtttcaagtcaagaaagatatcttttgataaaacaactaagtatgaaagaaaagaaacaagaacaggttgtgaagcatgtattcagctgacggtcgaagatggaaaatgggtaatctcaaatgttgttcttgagcacaatcatgaacttgaaaggccaaggcaaagtcatgccattgaggttccaccttcgagtgtgaaaactactattaatgataattatggttatttggggaaagaaaatggaactgtccagtatctcaaacgacaatctccatacgattctttcaattacacacttgatagaacatctaatgacgttcaaaagttaatgaacttgttttcatacttacaagttaaagatccgtcatttttctacgcaatccaagttgacaatcaaaatcgttcaacgaatttcttttggagggattgcacgtcaagaatggactacaattattttggagatgttattgttttggacacaacatgtagaattgacaatatggtttatgctcttttttggggacttaatcatcatcaacaatatgtcatatttggttgtgcaatcttgcttgaagagactttggactcatttgtttggttgttggagagtttcaagttgtcaatggatatgtatcagccaagaacattttatagtatggaagagtgtgaagcaatgtctactgcaatcgacatggtatttccaaaatcagaacatcgtttaagtgtgaattctatcaaaataaatgctagaaagcatctcccgacatactttgaacaacctggttttgaggtccttttcaacaaatgcatttttgattgtacaacaaatatagaattcgagatgcattggaactccttgttggaacaatacaatcttcgcgaaaatccatggcttactagcttaaacaaattgtggaaaagatggtctcacttgttctgtaaaaagacattttcagctgggattgaactgatgttcgatagtaatgttaccaacatggatttatttttcttgaattcatcaagcaaggttgttacactgcctgattttgttatgcaatatgtcaaagattcaaaacgaaggcgtttaaaagaattgcacgaagatctgcggtgccatgaaattgtcaattctagatcaaggaaagggatggagaagcatgcagaggagttgtacacttgcacaatgtttgaaaaatttcaagaggaattgcttgatagcttgtcattggcaatagaagaagttacaaattctgcaaatatttccaccttcagattgacagaagaaggccacaagaaagaagatattgtcacatttgattgcttaagttcctatgtcacatgtagctgtggaaaatttgaatcaattggaattttatgcagtcattcaataaaagtactaaatgcaaaaaatatcttccaaataccatctcaatatgtaatgaagaggtggacaaaatctgcaaaggaaggagataatcaagcattgcaagtggttgattatgaggatcatacttctagcaacaaccaagggaaattgagtatattgtcaagaaatcttgtgcataaagctttaaatgtcatatcaaagagtttggggtctgagaaaagtagaaaagtagttgaaagtcatcttgatttagcttctagagaagttgacaatattttgaaagagaaaggatcaataatagagcatagcaacataataccaaatcttgatgatgttaattatgaagattgttatcgcataagaaatgatagtttgggtagtgtttatgtaaaaagccagaagattgcatctaattcctcatgtatcaatcaagaacaacaaggatcaaaatacatatcgaagaaaagtatgaagtcaaggacttcaaaaattagtgcatgacagactgagagtcaatctcatggtaataacccttcttaacagccaactattactcatatcatcatatgtaagttttagaatttgtgaccaactttgaaatatggtacactatctatttcgtaaatagttttgtatgaaatggactggtagtatactctcttgttttattgatatataatatatattggattgtaataggataagaattaagatagtttacgtttgaggtttatattttaaataatcaatttgaggagatataatataaagttgcatactagctatttttaaagaaagaaaaagaaaagagtatcctactgtaatattaatgaagaattgaagatgatgttccattttgtatttatggaattgtttttagttttagattttaattagttggataataaaatatattataaaataatttaatttgtaaaaagtattctatcaagaaacatattagtatatatttgaggctccaattgaaaaaaaaaaaatgagttgttaaactaattttttctcataaaaaaaataaataatctaacaacaaaaactcattagaaatacttgaacatgttaggtctt

SEQ ID NO: 78692 - DNA, 735 bp, Cannabis sativa
tggtttaataataaaaaattttaattttttaagtatataaaatcaaatttccctttaagaatatgaaaaatagaaggtatacatgtaaagaaaaaaaaatatacgttatgattataattatttataaaaatatacatctagatgtaattttttctatattaattattataagttgaacaagatagagttttctattagtataattattattgtaaaaataaatttaattaaaatattttttttacgttaatttgaaattaaaaatatatataattaaatataaatttttaatagacataaaataaaaagtaaaaatattataatctaaagttagatttagagttttgttagttaaatccctaattaataatattcaaaattaattataaatccactaaatggagtgttaaaatgagagttgcaatatttataccaaaaaagaccaaggctgtaaataaagagtggttcaatgagctataatgtaaaaagtatagaaagatttattgatatatagattgtttaggcccgggttaggtgctaataggttgttaataaaaaaaaaatactattttgagcaatataatgttctgatttattaaaaaaaaaattataaataaataaatatattaattataatgtaatttttaagagttaaattgagtcattaaattaaataaaaactattttacccaattcctaccgtaacaaataaaaacttgcgcttgtttttggtaa

SEQ ID NO: 78693 - DNA, 507 bp, Cannabis sativa
gtaatatttatgtaatcaatctcttattttactctttatattatgttatcccaatttttattcatgtgacgtggcatgtccacaaagacaagattgatgccacgtggagtacaacttgtcaataagagaccgagtcaccatgcacaacatatgagttgacgaagagtccaaatacttaagcaggacaaagagacaacaaattggccaaccaggggatctggccagaccaccctttactgtccatggtgcagcgaaggccggtcaacctctagcaaagcatgatctggctagattctcctctgatagtcacttttggtgcctctgtagctttgaacctgggcagacattctctgtaacaaattggcttcaacaacccacaaaaataggcgttctgttgtgaatattttacaatgatctagatttattaacaagtatgttgattaacatcctaaatatgaattatttaaaacaatgctttacatggattgtagtggaatataatgactc

SEQ ID NO: 78694 - DNA, 1222 bp, Cannabis sativa
ggtatgggttggtgttatttgtggcaaatgactaatggtggctgctagcgttgaagttttcccagccaaacctgagaactgtgggaagagatttagggggacggtgctagtgtgacctactcctccaaaagtggtgtcaacaatagcgatttttcgttggtagtgagggtgttattcgtgcctccattgataactctgttgttattgttagcattcgcttagttcgtagccattgtgaccttcctctaaagtcatagaagtattgcttgaaatttgttcccaaagacgacaccaaatgttgtaaaaataaaatagacaacaccaaaaaccacgagtattcttgataaacaataacactcacttatagaactgcgaatattcacctagagtggcaaatactcaaagataaaatgcgagtaagcaattaaaaatagtaaaaacataaatgagacagtgaattatagtggtttagtcagagcttagtctgcttagtccacttttaaaatggtttgcgcttagtttctattttgagttaaatcacccctttatatagatagcaagtgatctttaggtttatataaccggtcagacgtgaccgttagaatattgattacatttaattaagacaatttatattcaaataataaataaaagaacaatttcagttattcttagttaattatctgaatgtatgcgacttaaggagtcgtacattggctgttcatcttctggtaatacacgaagtcccggcctcttttgtgtctactcccatattaggcatttgggcccagaataactttcagagttattagattagaattcctgcgattaccttggtcgcatacctaggcattcatgccttgacagcttaaaacttagttcctaacgagctttcgaacacattagtatttttagactagacgtgtgtaaaaatacggtctttacatatcataggagagatattcttactcatcgcatataattaatatatacgtgaccagtatcacttcttccatgtctcggttgtaccttctcacaagtttctatcatgcgaggttttcctagagatatttgttgacacgtcattctttttcatcggaaatcaaatccacaactgtgtatgaaattgtactcgtatttttaaataaaaaattcataaacaatacacaaattggatagaaatatgttgttatattatttataataatataatatatagatt

SEQ ID NO: 78695 - DNA, 1147 bp, Cannabis sativa
caattacttaggcataatggtttagatattttgctttgtcacaagaggtcaagacaccatgctactaaaaccgactcagagatttggtggatcttaggaaaataaaaattattggaccttttattcaaaaaaatatgtaatatttttaaaaattacatattttgaaagagaaaatattttttttttgtccttgggctgagtggactctaagcgcgggcctagtccgccttaactcaggcctaaacccataacttttgtacatttgtctatgaacatatttatatgagtgtatttgttccctaaagaactattggtctctcaaatggtagttgggttaggatattttgccccctccctttttttttatttctaaaaactcctcgtgaactatattaagttagaaattataaataaaattaaaaatatttttcatgctatatattataatttaatcatcaattgtaacgtacagaaaaatacacttaatatttaaatttaatttaattgaatgaagaggaggtctatgactacaacctaggttgtgcacccaataaaaataaaaacagacctttaagtaaatgctcaattaggttatgtttaattgagccctaaaacttttatctaaaaaaaattgaggccaaaaactttgttcatagaatattttgcgccataaatatttaagtttaggtatttaaccattaaatattatgttattatttacctgttattttcttattgatatacatgtagctacaaaaattttaaaattacaacttagataatactactaataaaaatgtatttatttataatttatggcacaaattaccttataaaagggaataaaaattttaaaatgtatttatttatattttttttaattattgtttattgataacatgtatttggtcttgttttaaagaaaatgtatgtactccatttttttttggttctaagtccattttttgacctcctaaaaaagggaatattttgaatgttagttggaaacaaactaaataagaataatattgaagattttttttcttcttcttaaaatggttatgttacttaacaatgttactataggtgatcgttaaaaaaagaggataataattgaatattgaaactagctattttaaaaaaaatt

SEQ ID NO: 78696 - DNA, 726 bp, Cannabis sativa
aataagtaattatggtgtggatctctagtggcaacacacatgctctctcctggagaagagccttctgattattttgaaatgctgaagaagcctgatactaccatggaagatctcctacgacaagcatcgaatcttactgtgcttgatgaggatggctgggaaatcaacgaagatggaggaacggtcgccgggggacattgtgcgaaagcaagattttgctctagcagaccgatgagtcgtactctgctgaagacgatcttaggtcgcgtttggggtatagctgataatcaatggggagtcgaaatcaaatataccaataaagactcaagtttcttggtattctctttcaaatctgcccaagatttaaatagaattctgagtaagagcccttggtttcttaactatgggactctaattcttgaaaggatggaatccttaccacaagattgggataaagaactacttcgatttccaattagtgggcgtgttctgcatttaccatcccgttcaattactcaaagaaatttggtgcggttggcaaatctcgcaggggaagttattgaggttcagaacgctgatatccctcgcattgtctccagagatttcttcacttttaaagtctggtgtaacatatccaaaccaatattcccaggcctcctttttcctgtcgagggaggaaaaatatggcttccattcaggtatgatcgcctcccttttatgtgtttt

SEQ ID NO: 78697 - DNA, 680 bp, Cannabis sativa
gttctacctaatagtaattttattttatttttattttttttttttttgatgaatcagctttaatttcattactccaataaaccatatttacaatcaaagagcatcccgattaaagggacctcatctagaaaacacctgatttgtacatttgtatatctattttccaaacactttctattacatctataaatttctaaaccattccaagtcttttgtctcaacctgtttcggccatgtgctatatattctatgctttaccatttctttgactgtacaacttactctatttacatcctcatctttcccattccatatcttatcattcctagctctccatataaggtacactaggcttgccactacagccgaaagggtgttcttcttgaacttgctgtatttgcttctttcaatccatctcaagagtcttgataaggattgggtagaaactttccatcccaaccaatccttaatcatctgcaagcaatgttgtgagaacgaacaagagaaaaaaagatgatcacatgtttcttcctgagcattgcaaagcacacaacccgaatcattgataataccaaatctatgcaatctctctcttgttcttagcctaccctggatagcaatccacagaataaagctacattttgggatattaaactttccccaaacttccttactccaat

SEQ ID NO: 78698 - DNA, 779 bp, Cannabis sativa
atatatttttactttttatgcctcacatcttgcttttgagttaaatatgttcgtttattgcgttttatttcacaatctaagcatttgtatatcaatttagcttaagatactttgatttgcatgtatccccaaagtcattttctaagtagctaataatctaccatatcttttacgagcagtttttaatctaccatgttttacgcgagcagttctaatctgccttgttatacgcgagcagttgataatttactacacacacttttttagagcaaacttataatattttgaataattcacctttggaactattttgaatattctttgattgctcatatgaatagttaatcctttattcataagtttagcttatgtattatttttcaagacacatttgtgtcttgtttataatacatgccaaaactatgcgagacgttacatattcaactcacatataactttccgtttttttatgagaaaatctcatttacaactgctattttgattttttctcttaaagaaaaagtttttcaatttcttgactttatattgtcaaaagacaattataatcaattattcttttcttgtggattttttttttaatttttaggtttgcaatacaatatatatttttagatggactctagttattatatgcatatatatgcccccaagtaattttaaaggaaataaactttgtaattacttgaacaaattttaattttattcataacaagcattaatcattacagagatatatacaacatttacatattaaattc

SEQ ID NO: 78699 - DNA, 603 bp, Cannabis sativa
tactatatgcctaataaaatgataccgcatgtcaatatgttttgtacgagagtgttgtactggatttttgaaaattttaaaagtacttgtactatcacaaaagtaacattttgtttagccagataagattagtaaaacaactcccaggtccaatatactcagttttggcagtagaaagggatatggaattttgtttcttactcaaccaagagacaagattatttctatataaaagcaccctttagtggtagtcttacgatcatctaaactcccagcccaatcagaatcactgaaaccaacaatagacatgttggtatctctcaaataccataagcacaattcaaaagtcccaaacaagtgtttgaatatgcgtttaacagcgaacaaatggtactgtttaggattagcatggtatcgaacacacagcctaacactaaaacaaatatctggacgactggatgttagatatagaaggctccctatcatgcccttgtacaaggtggaatcaactaactcactagacttatctcaactcagtttggttgtggtacttaaaggggtaggaacatgtttagtgtggtctaagcataacttctcaagcat

SEQ ID NO: 78700 - DNA, 686 bp, Cannabis sativa
tctctctctctctctctatttcatcctcttcattcttcttcttttttccctttcttccattgttcttcttcgttctttcttctcatttttttcttcttctttgtttttttgcttatagtgttggcattgtatttggattaagatttgtggcctttcttgttagttgttgaaggtatttctcttttctttttttcctacagacttattttagggttatttttttttccatctctatgttttagttttggaaattatgattgttgttctataatctttccaatttgtgtattgtgtgtcgtttaagtgataagcatttcaatgtgttgagttttttgttttttgtttttttttcgggggaaatgcttcatccgaagtgattagtgtgttattgttttgttcataatgttttttatgggtattttttgtttttggtttggctgtatgtttagtgttttgttatttagttttacttttttaaatttttttttaagcatcagattgtttttgttgtccttttttacttttttgttttggttgtgattaatgttggttttctttttggtaataatgtttctggttttttttatttggtagaaactggttttttattttattttgtttgttgtcttctgtagtttcgattttagggtttttttttgtgggttttgtgtttgtttaattttggg

SEQ ID NO: 78701 - DNA, 3042 bp, Cannabis sativa
aaccgagtcccaaactcggacctgcacccaaactcgagaaccagacacagacccaaatctgagacctgggacccagacccagtcccgaacctggacccggacccagatcgtgacttggattcggacatatagaccaggacccggagccggacctagaccccaacttgggacccagacccgaaccggtcctgaaccagaaacccgaacccaaactcgaaccccgaacttagacccgagacttagacttgagacccagatccgaacccaaactcgtgaccggcccggactcgggagccagacccaaacttgaattcgatcccaggatctaagtctcgagacccaagacctggacctagaccccagacccgagatccaagctcgaacccagactcatgacccgaactcgggactcaaacccgaacctaaactcagatccagacccaggacccgaaaccccagacccaggacctgtacctggactcaggacctagatctagatccggatctgaacccggacctaaacccgaacccagacccacccagtccgagttttcatgtaattaatttctctgaattattactcttgtagtctacttctatcatctgttctgtcatcattttgtaaattatattattataattgtacacaaacttcttattaatttaatctttagtttatttatttcttaattaccatatgtgactctccagctcaataagaagtacatgaaacaatgcttccgctgaggatataattaaaagataaaaaaaaaaaaatgtgacagatggaataagactatgggtatttgatacaaatataaatataaatattgggagacattttcttaaaaatagaaaaataacaaagggctgtatatatgtataatgtgatctgtgtgatatggactatttatgaaatataaacattgacttcggcaataggtgatgatgaggctgaaatgggcatatactaattaagatgctcttataatatacatacaatacatatatatattgcacttcaatgccattcttcttcagacataatctcatatatagtcctcaacacttctccatattcagaactcaaagttatattacttggttagtaattaaattaatatacttttctctcttttttcttatcataaatttagatgtgtacatttttcaaaattgttgtctcaatcctaattgaaacaatctcttactcatataaaatatataaaattatgaaattggtcgtcaggcttataagcttgtcgaccaatatctgataattccaagtcatttgattggaagattgtttgtgatagtcgggattttcaaacaataataatattatattcatctaatattaaaacaattaaaattatacatattttattatggacttattgaataatactagctagctaatgcattcattttatatttgtgtatgtgtagaaaactattgaggaaagcttgagacttaaccatggcaggagaacaaatgggagtgcttaatgcactcgatgtggccaagacacaactctatcatttcaccgccatagttattgctggtatgggattcttcacggacgcatacgatctattctgtatctctctggtgaccaagcttcttgggcgaatatactacaccgacttagcctcagacaagccaggaaacttgcctcccaatgttgcagcagcggtaaatggtgttgcttttgttggaaccttgaccggccaactgttcttcggatggctaggagacaagatggggcgaaagaaggtgtatggactaaccctacttgtgatggttgtgtgttcagtggcctcagggttgtccttcagctacgatgctaaggccgtcatggccactctttgcttcttccgattctggctcggatttggtattggtggagactaccctctctccgccaccatcatgtctgagtatgctaacaagaagacccgaggcgcttttatcgccgctgtttttgccatgcaagggtttggaattcttgggggtgggattgttgctttgattgtctcaagtaagtaaatatatttcttattacatgatctactcttgtttggtttttgatttctatactaattaaaatttcatcatcatgatgatcagctgcattcaacgcaaaatatgatgctccctcgtacttagtcgatagagctggctcgttggttcatcaggctgactatgtttggcgaatcattctcatgtttggagcttttccagcagcagtaacttactattggcgtatgaaaatgcctgaaactgctcgttacacagcattggttgccaaagatgctaagcaagctgcttctgacatgtccaaggttctacaagtcgagcttgaagctgatgttgaaaaggtagaaagactatctcaaagtaaaaattcatttgggcttttctctaagcaattcgccaaacgacacggtctccatcttgtcggtacaacaaccacttggtttttattagacattgcgttttatagccaaaacctttttcaaaaggacattttcagtgccattggttggatccctaaggccaacacaatgaatgccattgaagaagtttacaaaattgctagagctcaaaccctaatcgccttgtgtagtactgtccccggttattggttcactgttgcttttattgaccacatgggacgttttgccattcaactaatgggattctttttcatgacggtgttcatgtttgccctagctattccttacaatcactggactcaaaaagataaccatattgggttcgtgattatgtactcattgactttcttctttgctaattttggaccaaatgcgacgacatttgttgtccctgctgagattttcccagcccggctaagatccacgtgtcatggaatatcagctgcggctgggaaagccggagcaatggtgggagctttcgggttcttgtattccgctcaaagtaaggatccaacgaaaaccgaagctggttacccaccaggtattggagtgaaaaactctttgattatgcttggtgttatc

SEQ ID NO: 78702 - DNA, 695 bp, Cannabis sativa
cttagcatgcaatagtatattttaactacatattacattataataactatgctagctttacatatatataggtatagagagtatgtgtgctacaatattacttcattgaataataattggtgaatataacataataatttatgttattatgcaaaacaattcttttcttaattttcaaaaaatagtcttttagacagtatataaaaaactactttacaaaaaaaataaaaattaaactaactgaatcagaaaattcattttaactccttcaaaacaatacatcttagtggcacctataaatatacctgaatatacatcttctttctatacaatatgtaaaactatttaaatggaatcaaatcattccctgtccgagttacatatatattgtataaaaggaagtatttaaatggtttgatgagttgaatgaattttttgatttaccaaaaatatgtgaagttgtggaattcggcttaagtacaaaatcattgttgaaaagaattagtgtttacgtatagttaaagcattttaatttttatagtagcattatttaaaagcactaaatattttcatattatttaaagatataatattttattttattttattttatttttcttttacattatttttgacacttttacttttaaaaacactttaatattaacgcgcgttttaaaaatactataattaca

SEQ ID NO: 78703 - DNA, 662 bp, Cannabis sativa
gtttttttgacatggcagtcggggaatgggaatgggaattggggtttggggtttggggtttggcattaaaggtttagggtttgtggttttgggttggggttggggttttagggttagaggtttgggatcaagggtcagagttcaggcatcagggtttagggtttacgggaatgtgaatgagaattgaataaaataaaatttaaaatgcataaaaaaaatttgataaaattcatcaaattttttctcatgttacatgataattgtcgttccttccatttccaaatagaatattcattccaccaaaatagtggaaagagcattctattggaataacattctaatactttaaaatgaaactaaacaaaagaatggaatggaaattatttcttttccattccatttcattacctataaccaaatgccacctaagggtctgtgttcatggcttagggttcagggttcagggagttgggtgttggggttagggtttggggttttaagtttgcattttggcgtttaggattcaaggtttaaagttttacggtttgacaattttagggtttaggggtttaggggttttgggtttagggttcagggttcaagggaatgagaataggaatgaaaataatataaaattcaaaatgcataaaaaattgataaaa

SEQ ID NO: 78704 - DNA, 512 bp, Cannabis sativa
agttcggagggaatttttaacggccaaaaaaattcaaggggcacgatttactacatgtcaaagttcagaagaaaaaattactaattagtcttaaaatttaaccttaaaaagtgaagaggaaataaaataatagtcgagatgatttagctaaaaaagaaaaactattatatatgttatttttaatatacataacgtacatttatgtaacacgtatattgatagtgataatacatttttatattaattaaaaagaaataagaaaaagccagagatgcatgtgaagtcatctacattggataagtagagatcatatactagtggtcaacaaatattaaaccaacgaaaataaatagtctttgtttgtattattacttgatacttttatacactacttataaattttgtgtttattaatacagctttcgtaaaactcaacctttggatataattataataatttattgttatttttaatatagttgagttcaatgatagttttcaactgctacaac

SEQ ID NO: 78705 - DNA, 690 bp, Cannabis sativa
  modified_base (479)..(489): a, c, t, g, unknown or other
aaagacatcaaaaaaatgcaacagaaaatatataatattgtaaaacgaaatctcacaaacatcgcatacatatcgcacaaatttcgtacacaaaacaaatttttgcaaacaaaacaacagtgataaaatatgaaataaaatcgcacatacatcgcagaaatatcgcataatgtcgcaaacacaataaaaatatccatgcctattgttaaatattcaagatacaatcctattaaacaacaaccagtaatacaacacatatgcatctaatattgatagctattaaactatttgagaaatggttcaaacatgagctttacatgtagctctattgtgtcctgcaccgccacatagcgaataatcatgaggttccactaacaccttaccattagatggtctacgcttcgtcggtcttctacctgcattgctcctcctaggctgacttactggttttttctccactggtaccccaattcttatgnnnnnnnnnnnttccggtagtacccactcatcctccttgccaacaatattaattgtcgcattgtagatcttcttccacgtttcttttatgtaatatggagagtaaagtgcgtacatgctcgcattttgactaatttttgcggcacatgcatagggacaagggattttgagcaattggaaaagtccgcaagtgcatgttttctccactaagtc

SEQ ID NO: 78706 - DNA, 1806 bp, Cannabis sativa
gcacttgtacggattgaatgttgattgacatataaaaataactgatccaatccaatccacacatatttatacaaaaataataaaatatatatatatatgcatacgaataacattttaatataaaaaaaatgataatttaaaagtctaatacatataatacaattatatttcaaaacttaatagatattcttatacaaactttttttttctacatacaatttaaaacaaaattaaacatttttttatacatacaatcttttttcttcctttgaatttttattttatttattttagtttgttattgaagacataaaataacaataatttattttatttgttgttagttatgtgaaaaaaaaaatatttttttcaaaaatattaaaaagtcaccaatctaaaataaccgatccaatccacacttttacggattggatttgagctattgtgtggattggatccaaaaaatgaaattcgcacttagtgcaaatcggatgtactataagcaaaatagtgcagattggaatggatgaacacccctaaccctactgaatgggataaacaacaaatgagataagctggattagttctctaaactttcaacatgcctaaacactaataatcaagtccaatcatgcttaccaaatagaccctaattgtatttcttctattcagggccagacatgtgtttagcatcactgatatttttctcctggccctctctctgaccaaggatttcacaacaacaaaaaaaaaaaaaaaaaaaactttaacctactcagaaaaaagaataataaaaaaaaaactatgtagctctaaaattgacaataattaaaatcaagccaaaatttctgacccacattatcttcattctcatgttgcatacatcacaaacttcacaaagagtaaccatcagtgaattctgcaccaaaggcatataactttatagttgtctcattttgatggtcctaaaaaagacattatcgtagttaaagatgctaaattatccaaggaagttcattataactaaatgaagcaccaagttgcagagaacaaaatctgcaaaagctctctctgctggtaaatcctgcaatgagacgtacagaagagtatgagcaacaaaactttcattactgctaaatgaataatgtatgtaacattacaatacaatgacacaacacccaacaattctttatgtctatatataaaatcagcaatgcaggaggatctttttgtttttttataatcaatatggaagtaagtttgtaaaagggattaattggcatccgtgtatatagatcagctctaatgggaaagtgttagctccgaatggggtgcgggtagaagatggttgtaaacttgtacgattgattaatggagtttctttcttgataagaaaaaaataaaaaaaatagtaaaagtcttctttaaatagtttgcctgaaattttcttccagaactacaccagcatcaattaaaacacaagacggttagtttatgaatgaaaccaaaattcaccttgaattccttgttctctttgttcacttgaatgcgaagacaaactaggaacagaaagcaatcgtttgtcagcatcatgatgttgaaatgaggattataatttaggtttactaatacatgaaatttgcttaccagcaaggactgcagtcccaacacaagaaagcactcctgaaaggaaggaattgaatgggaaggatccaacaacagccatgtaagctacctgtttataagataacatatttttaagggtcagtcaagccactactacctctaatttttgtatcacacaaa

SEQ ID NO: 78707 - DNA, 2966 bp, Cannabis sativa
ttgcttacccaatctcggcgattctcaactaccgtgattggtcatgactattgcagcaattagatctctggcgatcgggaaccaccgagatagggaaaatttcttgtagtgtgctaaaaataagattgaaacagttacttaccatgtatataagaaaaaacagtcatacatgcaacacaatatttgaactttattttcgatattataaattattctaaattttttaaaaatttacaagtagtcctaaataattacaatgatcatgaacaaaaattagattataaagctctcctaaataccaaaacagattatataatatttgtacttttcaattttcaacgacatcattgctgccttacccaaataataaaaaccaataaaaatatacgaggaagactaattaacaaagaaccactaaaatagggaaaatttcttgtagtgagtgctaaaaataagattgaaataattatttaccacacacataaaaaaaaatagtcatacacaacacaatatttgaactttatttttgacattgtaacttattctaaattttttaaaaatttaccggtaattttaaataattataacatgatcataaacaaaaattagattataaaattctccacaatatcaaaagagattatataatatttatacttttcaatttccaacaacaacattgctaccttacccaaataataaaaaccaataaaaatatataagactaattaacaagaaagaatggtaccgtcgtcacgaaaagaaatgtcaactgccttcatcaactattgagtattgtttttctaaggaaaaaaacctattgattattgaccatgtaaatgtaatttgtcaattaggggtggacaacatccaatttaatctaattaaactaaatcaatccaatctaatttaattataaaaaatttaatatttaattatatttggattgaattggttgttaattaaaagtaagattctaattggattagattggatgttattcttaaaatctaaccaaatatcgatccaatttaattatatttatatatattaaaaatattatttatatttatttgtataataaaaaatatatattttaattatatatttttagtgagttttttgtgttaaatttataatatttggttgttttgtatatttgtttttatgatgttttgttctattttattatttggtaattttgttgttttacttttttttttaaatttttagttatattacacttaaataaattgtgatatttaatttttatgtattttttttcttcatatttttatgttaatattaaaaattaaatgtgtaattggatatcaaattaaaaaatcgatcaaaattaataaattattagattgaattttgaagtataattaaattgaatcaggtgataattttctgaatacaattaacaatttaattggacgagaaaaatattagattagatactcacattttatatattatgaaaatttgaagtggcgccttgataagaatgagagacgtgcaatgttgaactatatatttcatagttttaatttgttataataatgtaatgtaaccatatctataaacacgttttagtttttagctagctagtaaacagtgctaggtccatcattttttgatttaacattgtttaattttaaatttaaattgagaaaaacaaaaaaaccaggtagtgaagttcttcttcaccattttcttcacttattttctttctttttcaactctctcttagaatgatgttgagctatgacaataatgacttcccaaacgattttgagatgagctttttgcgagggaagcagcagagggctctgcaatgtatatgattttgttgatattgtagtttaaagtaccaccagaatatacaaacaataaaaatcaattaagaatttaagaaagagtttgatatccaaacttaaagaacacaaaataccagtgaaaagaatccttgaatagtgactttattgatcacgaatcaatctcagttacaaactctcttgctctctcaaaacatgagtttcagcttttacagaattttagagagaaaatgaatcgacgcctaagctaatgagctagctagctatctatttgtactattcggctaaaagagatatagctcagctttttatcaaaaactgttacaactaacttaacaaccagctaaataaggaaagcttaggactacttatgtgacagtccataagggaaaataccaggtaagttgtgcaatcccacatcgcctgggaaggtcaagtgagatgatttgagactgtgtaggtatgagattgcacagttgaagagagcttaaatagattgattgatgctgcctatatcaacaaggtgcatattagcccatcacgaaagaactccacagttaagcatgcttgacttggagtaatttcagaatgggtgacctcctctcgtgttggtctgtagggtcaatcttcattacatgaagcagtcagagtgacgtactcgtgtataagagtcattcattccgtaggtataaggcccaatgaaagcttgaagcggaaacgttacaagttagttaagtgacccgaccttcaatagcaggttaagtgtgtgcttaagacccatttagcttaaggaagggctaaaaaaaatctttctttttttaaaattatacattttttttcttatgacctactatatattttaagtaacagatatgattttgttgtttctaagttcaaaatttgttgtatctcggtttttgtttaaactttatttgttgaggcaatagtgatgttgattatttctttgttctttcagagtgggtctcaacatcataattacttatgctatagcgccaggagtattatgagttatgatattaagcattaaaagtcttctttgccaagttttgctgattattatatatagaacattttagagttaccaaataattaatcaattagcta

SEQ ID NO: 78708 - DNA, 827 bp, Cannabis sativa
ggcatatgaactgcttggaggttctaacgagttacttggaacatttttaggagtaacccctgtaacctgtccaaaacaaacattgggaaatgaatgcagttttttatgtactaaaatacatcaatgacattgtcaaagctctaaatttattcattcttataaataaaaatgcaatgaagttataattaattcatttatgtatacctgtaaataggatactaacttataattaatgaatgattacatagaaaaaagccttataattaagtaatatataactaatttacatattaattttacagtttggaaaaaagaaaaaatacgatgtggagacaatgatgctacaagtgcaacatcaatagttataaaaattgacacgatacttgaactaactagctttagacttttaattgtaagcaatacttattttgtgtacgcttttttattactaaggacttatagcatattttgtaatgtatcctttgactttgttatgatataattaaaatatattttgtacttgttatataattaaattaatttttatttaaaagtaaatgttattcttataattaatttataactgttttaaaaaattaatatatattcagatttaaagaagtttttgaaaaaacaccctatgtcttcggttattatataacaatcaaagagaaaaatagccctacctctttgattattactaataatcgaagacataaatgaagcataatttaaactggaagaccctacgtcttcaattattatataataaccaaagagataggtcccttttttcttcggttgttatataataaccgaagacgtag

SEQ ID NO: 78709 - DNA, 720 bp, Cannabis sativa
atattccccatcttggtatctcttgaatttattttccaactcactaatttgtagttggatcgaatcttcttacttttgattagcattgagttattggtgtaaatcctgtgcgttctgatttaagcgctcgcgtaaatcgggttatttctgatttaaacgttcacgaagatctggctttcttcattcatggttgctcatagacctggtatctgagtaactctcaaattgactactcctcgtattactcatactttctcgatcatcactacattgaggtctatcccttcctcgcatatgtctttctgattgactgtgatctcaggatcttgaacatcctgagctagaactttcctcgtcctccaccgtccttctcctttgggaaaggttagatgtaagccccctactaaggtatgtatatgcctcttccttattagtgcgagaaggacgcttgggatgactcggtggtaacccacttgtcctaggttgtgtcccaggatttctcttcttattacaagggatctcttgttccctagttttgggtttccttatttctcgttcctatgataagattttggaatgtcattgttttcattcccttgatttgtgaatccatggggtctccgaggtacctctcggggaggtgcctagttgttcggttgtttaccttctagaacatccctagtttccctaggttgctcctcctaggtgttttggggattt

SEQ ID NO: 78710 - DNA, 1030 bp, Cannabis sativa
caattgtgtttctatggccctcagctttaagaaatctcattcgggcttgctttttttgttagactttgggactgtccttgtttgtgttacatcatttgttatagggttttattttttggctttgcatcttgtacatgttctttgtttctttaattccaaatcttttgtattactgaagaatttctttttgatttggtaatttcagcttacgagcatcaatggaaggatatcttgatgcctataatcctactgtttctgtcatgcctgctggaattttcatcaatcgagttgaggtctgaaacataacttgcgttaccatgttcatgttactgcgtttctgtttagcgggtcgcattcttaatgggtatagttttaggattgaattctcctattcagaatttactactttgaaaatgtgtgtattttggatttccttatacaggggagggaaagtgcattgtttttatctgcatcatcaattcagatggggttttatgtttgttaggttggaatgcatgattcctgagaaaggaggatgacagtactcgaaacccatttacctgctagtacttaccagttaggcaggcaatgctcagtctaatagagtagggtgagagtacaatatttgatatctgatacatatacagattgggtgagggtattctcaaaccccaagcttgtgactccacttttcaaccctaactctaaaccctaaaaagtatgtacataactgtaaaaattatataaacacattacttatgtaattttatttatatgttttcaacttgaatagggtagaattacctgtttgcaccctttatttgttaaggtaatacccatgttcgatctccttaataagacaataattaataaggcacggtatcagtagaacttagttttcattaggtagggtcggggtatagacatatcagaagacattcacaagtgttctaatggcccttcaaagtaataagtttgattattaacataaacgttccatgagaggtttactgtgctaagcttagctttc

SEQ ID NO: 78711 - DNA, 544 bp, Cannabis sativa
ttttacacaaataagttcccggctatacttctaattccaaaaacggataatccttccagggttattgattattgaccaattacttacagcactactttgtacaaattcatctctaaactcttatgttctcgattggctagagttcttctgaatttaatcaatcaaaatcagtgtacttttgtcaaaggcagatcgattgcttacaacattttgattcttcaagaccttttgaagaattataagaggaaaaattgctctcctaggtgcactataaaaattgatatcaacaaagcttatgatacaatcaattgggactttcttaagcagttgctgatttcttattgattccctgctaaattcataagttgggttatgacttgtgagagaaagacatcttattctttacttatgaatggaagatttcaaggtacttttaaaggagagcaaggttcgaggcaaggggatccaatatcgccgcttttatttattcttataatggaatacctgtctcggagatttcagcttgcggccaaggataaaaaat

SEQ ID NO: 78712 - DNA, 677 bp, Cannabis sativa
ttcttcatgtacctccccatcattataattaagctaacgatacatcgttgccattttgcaagtgttatactcgaagttcggttaagtaccaaaaactgacatgtgtcacatgagaggaacgtgagtcaactcaaagaatataataatgatcttgtatcattactataattaaataactcattataattaaatataaatttaatagaaaatgttcaaactcgctcactaggtagtctaacgcgagacaaagatagtaactattaaactggtatcgacgagttgcatgtctgtctcgggatatactcaaattaatagacaagaagaggatattcacccactcgagcagaataaatgtgacaacacactaccgtctcgcgttacacatagtgagaagaccacctagcataaccaatgctaataaaagaatacgacaagacgaattatatcttccaacacttagcattttttccttattaagatggacaaggaggataactcatatccaacaagacatgaccttccaagtcagcaataaccgtctaaagaataaaaatagaaagcggttggatagttattagatattatcccatgtgtgattaaatgaaatgtgggaattatccaaacttcatgaacagttatattgaaccaatcccaaaaagattaactgtctccctata

SEQ ID NO: 78713 - DNA, 725 bp, Cannabis sativa
acatccccgatccaattcattctgtcaaaaaaataaacaataaccattaataaaatataacaaatttacaagacaaataaaataaatgatcgactttcttgatttaacatctttgttgcagattctagctgtcgtgtttgtggtttgcagtaggagagccacaagcatctttactttgattgttgttattcaaagaaattgttgctaattttttagctagttaggtttcaaggctaggcaccttgactttgtcagttggcagaattggttaaaaaccagaataggaagtttaaaggatgattgttgcaaccgtttatagcttatggataaatagaaacaattgtgtctataaatgtttctgtctttcaatgcctgtaattgtaaaggtaattcaaagtgtagttaagcataggaattatgatcttaaagatagaaaatattaaaaggttgtaactataacaaaaattgtaattgatctacttcacattcaaaatcactacaagtaactaatttcgtaaattaattacattggtattgacatgttatagtttcacattcaagcacattactcaaatagttttagttcaacattaaacatgcaatgtaaatatcttatatcttaatagcatcaacaatccaccaagtgaagaggaaaaatgttcccaaaaaaaagtagtaattcttcataatttaaaaagtaaaaacaaaattaacatattttaggg

SEQ ID NO: 78714 - DNA, 892 bp, Cannabis sativa
tatattaaataatattaataatatgtaattatcattattaatattacataaaaaaattaaaaaatttattaactaacaattaataataaaatattatgtacgtagaaggtgatgaatatttagtaatgacttaattttaatcttttttataataaatcaaagaatatattttagtaaacttagattatgccatcacgattttatgagacatgatgaatttgtatctagaaaataacaacaacaataatatatatatacatatcaaaataagcaattcattttattatgattaaagattacttagaacaaatatcataataaaaaataaagattataaagtatataaaatattctcaccaaatataataaggtgttcgaaaagatttccaaaaaaataaaatcttaactggaaaatgattatatatagattgtaaaatgataatttatattcttatgcatgacaaaggattaagcgttgtgaagaaaagtataatgaaatgaaattgaatctaaatgcatatgtatgatagtgatagttctagtgataatatctttcaaagcaaaagaaaaatgacccaataattttgttgtgaaatattttcattggagaagacctcgtgaattcataaccattgtcaagtaatctataataaaacatcaagaattagaaaaaaaaaacataacaataaatctaaaaacgaattattgttgcaaataaaatgaaaaaaaaagaacatataatatatatatatatatatagagagagagagagcataacaacaacttgaaacttatatgagtgggcacaaagtttaacttgagtttggggtactatatataaacataataaaccatgcaagaaaatatatagtttaaatttttagtagaagaa

SEQ ID NO: 78715 - DNA, 1409 bp, Cannabis sativa
cttggtggagcacatgcatgtgatgatgtgtgtgtaggtagctccactatcaactatccaagataatttttgaataaaagaattgttaccagccatgttagatgctgttgcattgttgttttgttcttctcgagtggagccgtgactgagccgctggctgaggagagaaatcagctgctggcattggctggaaagatcaatttgagggtgatttggggcaacatctagtgtagaagatgcagccacattgttggcagtagctttggctttgtcattctttttcttgtctccataccctggtggaaatccatgaagaaaatagcatttgtccacataatgccctggttttccacagttagtgcaagaaggtcggggtttcttgccacgagagggattagtggaagatgagggtctaacggaggaggcaagagaggaaacatcagatgaaccaagtgttcttcgcctttcttcttggactatcatggagaataccctagagagattagggatgggttcattgagaaggatttgagccctaaccgaggcataggattcattaaggccggttaggaattgtaaaacctggttttggttatagtaattaagaaacaccttcatggcaccacaagaacaggcagcattaggttgaaattcttttagctcatcccaaatggatttgaactttgtaaaatatgtggtgacggattgatcaccttgctacaaacgggtgagttgtgtttgcagctgaaagattctagggccattaccctcattgaacctttcttgaaggtcatgccacatttctgtagcaagatcaaaatacatgatactttgtcctatttcaggagatacagagtttatgagcctgacattaccatgttattacaacgattccaagagttaaggagatggttaccagctgcaggtcgaggaagagtgccgtcaataaaggcagacttgttcttggctgttaatgccatggttatgccccttttccaagactggtagttggcgccattgagaatggtggagacaagaactagccctggatggtcggctgtgctgagaaaaaaaaggactagcaacatcttcatgagctaatcgatcttgaagggatcgtcgaacaggttgggagatgttgtcgtcttgaggaataggagaagaatgaactggttcaaggatttcttcctcattctgcgatctggatctagatctggaaggtggaattcgttgaggagccatgggaacactggcgataggtgcggaagtcgaatcgggattagaagccgattgtgtttgctcatttgcaggtggaggaacaccatcctgggagcgtgtggagggcctcgccattgaaggacggtcaaggttgtctgctgataccatatgagaagtgaagaacttcagag

SEQ ID NO: 78716 - DNA, 1747 bp, Cannabis sativa
ttttttttatgatcccttatattataattatataaaattacttgtaaatttttcaaaaaatttcaaataatttatggtactaaaattaaaattcaaattttacactaaataatatatcgtcgttttagtattctttatacaaatattagttttatgtaacatgaaaatatatatatacacgcaaatacacgtgaaaatacattaactttgcgtgaaaaagaaattagtcaactaattaatacgtcccaactaggaccttatttctctattaataattattttagtggccttaattaggttatcattgactatccataacaagtatatattaaacagatattgacaaaattaataataatatagggttagtctattatactacactcctaaacatgtgttttagcatatttttttatatatatattttagagtattttttaacgcgcctacgttataattatttaagatcgtctgtaaatttttaaaaaagtttaaatagtttatatttaatattgaaaataaaatttaaatattttattaggtactattattattttttaaacatacataagtaattaattgaaactaattaatattattattttcttaaatagatttaataatactctaactagtatttcatcaaattattaaaatcttattatgagttactaaaagctcgaaaaataatatcttttaaaaagtaaattaataaataaatatatagaagaaaactcgaaaattattttaatttataggggatttatatgtactcccattttctctccacaagtaaaataaaccttaactttcaccttataaaataatgatatatatatatttccaataaaaataattgcactatattttttcttagaaaataattgttgttgataagtcaaatgaaaagccaataatattaatattgtatggaaaagtcagaaaggaaaatataaaaaaaatagtaataaaatgaattatttaaaataaaatagaaaacagatcgaccccctaactacttacatcaaacagctaaggttgtcgattattttgtgaacttttttttgatttattattttttagaatctttattttggtttaagcaccctcaacatctattatatttaattaatagtgttgatttaatttaattaatactattttactcaaaatgcaatttaatttgcataagatctttaactgatctcttccttaagacccaataaaaaattgatcaaagatcataactttaaatttttaactaacaatatcgatgatttcaaaatattgtattttatgataaagtgtttcttgatcgtttaatttcatagattgttatacctaattgagcacaataaatcgaccagctctgaattttttgggttaaaacaacaaatttcaacgaaaaagttagaacaaacaatcaatcaaaaaaattgaaaaaataaaaacccaaaaaaatataaaatgtagaaataaaaggtgaacatgcaccaaataaaatttgaaagagattcaagtttctctacaaatgtagagagccttaatccctcttaaaatccttccaaggaatattattattacaacatgggcaattacaagaaatacaatcttattagtggcatttcatccctaaccacaactcatccgctgattcttcaacatcagtcggttcggacctccacttagtttcacccaagcttcatcctggtcatggatagatcacccaggttcgggtccataagca

SEQ ID NO: 78717 - DNA, 3340 bp, Cannabis sativa
tttttttttttttttttctggatggagatttgatgatttgaataaatcaaggcatcccagcagcgcgtggtttttattattttaaacatttagtgaagttaggataatttgtgtaattaagtttttaatatagatttgaataattactaataccaaacaacgtattacacatacatatttaggagatttattcttgaatttatgatccatttataatcagctttgtttgatcgctgtgtaagagcaattccaacgttgcactaaaatttggatttagtgtatataattcattcaatgtagcactaaactttacaacatacatgtcgtttataactataatgcacggtatatatgtcgtagcactttagttatatatatattttaattattattattatttaatttatatttatatatatattgatattattatttgtattataaaattaaaaatgttgtttttataatgtattttttaaaagggatctatgcacctttatttattgcatcttagagaattttttagcttaatttttgtatagttgtctatgttatatctatttaagacatcgtataaaagtttgaggaattcaaaaatatttaatatgtcgaaaatagggtttgcatgcaaaacttttttattttatatgtgtgaaataaactactattttaaccctattttcggcgtgttaagtttttttaatttctcaaaattttataaaatgtcctaaataactaaaacgtagacgaccatgaaaacaattaggctaaaaaattctctcatatgttgaaatagataaggagtgcatcaattgacccctaatgcattgtagaattttagtctattttgttttatggtcgtgtacattataattatttaagactccttgcaaaattttgaaaaatttaaaaaaatttagcacgatgaaataaaattcaaactatctattacacatgtgactcttttatttggatgggtgtattgtaaaattatcttttaatttattatgtgtaaattaaaatgtgaataccataatttttttattttattaaaaaattaatataataataatgaatattttttttttggagtaatttttggtgttgtggttagagtgaaaataaattttgatactaaatttgataatagtgtgacactaaatttagtctgctccttggtgatgctataagtcatctcgtgtgtgagaattgtccaactctttgagttttacttttgacgattttttgttcattatgtttttgattttaaattctaatttgttttcttgtcaaaattatataatttaattattaaagtttaggttctaaatttttccagcaaaaaaaaaaaactgcataaatattctttaactccacctccacgaatagtaatttgttactagttaattgtgggtttttttttttttttttttaaataataatagtaatgaatataattattttactttcagttaataattttcactccaaattcaaactaaaaataataatagtaaataatctccactgcggtcactctttttgttgttgttgttgttgttaatcgatgattcagcatttcataaccttttgaagccataaagtttctctagtctctccactctctagtcgatatatatatgtaaataagacatttgagttttagaacttaagaaagagaaacagagtttgttccttttgcttcgatggattcatatataaaatttttgtttctgcatacatttcagaacaaagtgtgcatgtttttataatataggaattaaattcactttgagctttctctttaaagtgattcttttacacacaatttttctcttttgcaagtcattttggaagttttggtatcaaagaatataaccaacacaaacgctttagtccaaaggaaaacatcaaattcctccttcctttacaaacaaagtattatttaaattatcacagttaatcacattactctaatgctattcaatcttgaactcaaaaaaatgaacatctccactcatggatgttcaatcagaaaaaccaaaatatttctgttatggaaaattctgtcacgaacattctttcaagagatcctgtctttttcttttccttttcattttctttgtacttttactaataggaatagctgcattgatcattgtctttgtcataaagcctaaaagccctatttttagcctccaatcagtaaagcttgatttatatgagttgaatcctcatttgggttcaactcttttcatttcctctgtcattactttgactctaagtgctcaaaatcctaacaaagttgggattagatatagtccttctcgacttcatgtctatcatgaaggattgtctattgggacaattcgggtcccggggtttctacaacctgctcacagctataacatgactgttccaacaaggattttgtttcaatctgtgaatgtcagccatatttttgatgtggcttcaatgcaagaagattcgaagaaaaacatgattcagatgaaaataatgggagatgttaagactcacttgttggcatttcatgtaaccctgttaaagattaaggtttgttttgtgatctgatatggatgtgttttcatgaacattaacaattaatcaataatttgaaaagcatttggaactcgttttttcaggttgccttggaatgtgacatagacgttgatgttaaacaactttcaatccaaattgaagtttcaaacataaaaagagtaaatgatcacatggtaggcattttctttgagcatgctctttcttgtgttttgtagttttgtaccattcaaacaagttattatgtaacttatataacaagaaacttttcaggcatccttatttcctaccactgctcagaccatcttcagaaagtgcgcattagctttttacatctaacgctacaccttcaaatgaactgttacgttaaattcacaaacttcgagttcattttgaagatagattcttctatgtttgtgacataaacgctctttttttttgactttttatttaattaatttcaagtgcctctgccactgccattcatgcatgccctgttgtatatattaattcattgctatattcattatacaacatgacataacgttcaattgacaatcaacaaaggattaatcaaactatatatatgtatatatatttatagcatgaagcaacacggaaatgtaggtatagagcaacagtgggaactgcaatatataattggtggtagattggttttaataaaggctatggatcccttacatgttttggggtagctttacagagacttgtaagagtctgtggttgtggtgacagaaaaagt

SEQ ID NO: 78718 - DNA, 759 bp, Cannabis sativa
aaggcaaggagacccaatttcccctttattttttgtgttaattatggaatactttaccaggaatgttcaaattgtttctcgagaaaaagagttcgaatttcatccaatgtgtaagggtgttcaaattattaaaaatttgttttgctaatgacttgaccctcttctgcaaaggtacaagagaagttacaacactgttaaaaattgcctcagatgagttcagtttcatgtcaggcctgcatgttaatctaagtctcaaatttactttggaggagtttcaaaggaggtcaaagctagcattataaatgatatacaatttgaagagggttttttcccccttaaataccttagagttcccatgagccctacaaaatggagatttttagaatatgagataattatcaggaaaatcaaactcaagttgcatacctgggcaactaggcatatgagttttgcatggagagtttagttgattcattcaattctggttgggttatgaaattactggatgagcctattttcccttcctcaaagtctgagaaaggaagttgagcatctgagtagactgtttctttggggttcaaatggagattggtctatgctccatttgctagctgggaaaaaatgtgttgtcccaagtctatggaggaattgggtttaggaaggggttttgagtggaacatggccactttagctaaataaatttggactttaactaaaaaacatgatgtgttatgagttaaatggataaacaccatttat

SEQ ID NO: 78719 - DNA, 3432 bp, Cannabis sativa
  modified_base (28)..(69): a, c, t, g, unknown or other
  modified_base (2651)..(2652): a, c, t, g, unknown or other
  modified_base (3319)..(3324): a, c, t, g, unknown or other
aacattaaattttatttctgatctatannnnnnnnnnnnnnnnnnnnnnnnnnnnnnnnnnnnnnnnnnggcataaaacccaacaatatcaactttccaatgagagatctgaattgtttagggtctggaatgagttcaccagattcattactgagctttatgttaggctccattggtgttgaagttgaaatggcctgtgtcctggagcaattgcatattgaaaggtcgttgtgttactgagatgcctttgttgcatcgagcaatttcaaggcctagaaaaaaatgtaggctgcaaggtctttaagtttaaattgtgttaagggtggcaataaactgattgaggacagtggtgttgttagtagccacaattatgtcattgacatatataagtagggcaaggaatgcatgttgtgtgttttttatgaacaaggaatgatcatttctagattgagaaaagccttgtgagatgagtgtggagcttaatttgcataccattgtcgggatgcttgttttaagccatataagctctttgttaatttgcaaacaacatttgggggtatcactcctttgggggtgtaaccttgaggaagtttcatgtaaacatcctcttttaaatcgccatagagaaaggcattgtctatgtccatgtgacgtagatgccaattattgatggcagcaagagcaaatagaagtttaagggtgttaaacttagctacgggagcataggtgtcaaaaaaattgattcctggtttttgtgtgtaacctttggctacaagacatgcttttaatctattgactgaaccatctgggttgtacttgattttgtacacccatttgttcccaattacatgttgattgggaggtaaagaggtgacaatccatgtgtgatttctctctaaagcttctgtttcattgtccatggctttgagccaggcagcaaacttagaggcttctttgtatgattttggttcagttaaagcttcagtaggtaaaatagctgccttaaacatattagagaatctatgataagaaatgtagttggcaataggatagtttgttgaggcagcaactttatcatagatgtaatcctgtagataaagaggtttagtgatgtttccgcctgatttgattgtttgtatgggaactgtagtgttgctggtagtgttatcattaatggccacaatggaaattggagcaagagatgttggatgaggaactgatgtgggaggagtctggtgttgtagagaagggtctgctatggtatttgagtcagggaaaaaggtcaatgttgctgtttggggttttagtgaggagtggaaatatgttctcataaaaaaataacatctcgagaggtgaagatgtgattgctttggatatctaacagagtgtatgctttcatattgtctggatatccaatgaaaacacatgcttttgctcttggggaaagtttatggccatggggggaggcataagctaagcaaccatagttccttagatgatcataagatgggattttgccacttaagagctcataaaaagttttgtctttgagtaacacagagagtgttctgttgagtaagtagacagcagttttgatcataaagctccaatagacaagaagtatgtttgattgaaaagcaaggacacgagcaacatttagtatgtgctggtgctttctctcaacaatagcattttgttgaggtctgttaacacaagaagtgttgtgtaatgctcctctacttgcataaaaggaggttaatgtaagttctttagcattgttagtccttatagctttaatgtttttgttataatggacattggcataagtaaagaaatttctgatgtgaatggcagcatcaaactttgttttaagtagatagatacatgtataacgagaatggtcatctacaatgttaaaaaaatatctatatccttcaattgaatcaaggcgataaggaccccaaatatccatgtgtacaagatcaaaaatgtgatctgtaaagctggtattaaaagtaaatggcagctttttttatttggcgaaatgacaaattttacaattaaaatgatgaggtagagtagaattacaatgtaacattttattgagtttgtttgtgatgataacagatggatggccaagacgggaatgcgattgattggtgtgcatctgtttgttgtaagtgactgcattacattttagattggtagatatctcttgctggatgtaacagagattgctaagcctattagcagtcccaatcttcaaggtcgagagagttcttggataatgcaattgttagagttgaattgtaaaacatgagtattggcattaagaaaggaactgatagaaaataagttgaaatgaaattggggtacaaacaaagaaagattaggtaaatgtaagacgaacgacaaaggaagcattggagtaggagtaattctaccagacctaagaacaggagatggtgacccatcgactaacgtaacagtacaagtggaagcatggggttgaagattagaaaagaaactagaattacctgtcatatggtctgtagcaccaaaatcaatgatccatttggaagacgaggaaaggagacacgaattttgtttacctggatcatcaatagtagtgatagaagaagatgaatacnnaagagactcttgatactgtaagaatttggcatattcatctgcagaaagaaaaactgtctaccaggagccattacaaatatgttcgttccaccaaacttcacatacacaaatcagcgaagcatatgacacatatttaactgaaatggacaaaaaaaacacaggggagggaggagaacaacgagaagaaaactggtggcctggaacagtgccacgcgcccccacatgccggtgcacgagagtcgggccggtggagatgggcagtgcgtggggcccatgcgcggtgatattggctgccagactttggggttttgtagatcggcgactgggcaatccgtctatgtgggcggtgagaaagaactcgcactctaactagggtttctgaaaaaaaaaaaaggaaagcctaaactcaaaccctaatcttttttttatgaaccctaatttcgaatttcgaatttcgaatcacaattctaagtatgactctgataccatgtagaagataatgaatcgaattgtgtatgtatttcatagaatagtacatatttatatacatagcttggagactaaatgggaaactactaaatacaaataggaaactactaaaatacaagttaccctaatttcttgacagctaatattctaacaaattaaaattaattaactgagtctnnnnnnagtattatctcaactagtgagatgccactatatatttggaatggaatacactctcagttatatagaacgctctatatgtatcattatatagatacgttatgattatcc

SEQ ID NO: 78720 - DNA, 1201 bp, Cannabis sativa
atatgagtcatgacttttaaataattaattagcttaaaaaatatgtattagggagaaaatgctatgccattcttctaacttttaagaggaaaaaaataaaaagaaaagtgttggtgtctaatttttgaattatttattttttaataattataatttgaaaaaaaaaaaaattgttgacataattttatatcattattattttatcggtaatttgtgtgagaaaatttaattttttttatgcattaattgaactaaaattagtccactagttcaaaactatacaaatttgtaaaatgagttaatttttactaaaacctcattttacccttctcattctaaactgactctctctctctctctcttcctcccctttctctttgtctctcgaacccaccatcaccttctcaaccgacaaacccaccaccacccactgaacaccatcgtaccgactgagcacaatgacggccaaggtaagatttcccccttcttttaatttttgaatttttttcttattgattagggttaaattatttattgatagatttaaggtctgatatgtgcattttgaattaaatctagggttagagattgtattggattagatctagtgtctgtgatttttttggcgagaaaatacctttttagggttggctcaatgcattgtgatgccatgttggttttggggttgaagacaaaggcttgatataggggcccgatgatcggtccgattgtctgaccaactcccaaaagttttgactaggcccgatgagcccgatataaggtacgatggtgcccgatgcctatttggaattttgtaaattttttgttatggcccgatgtgggcatgatagggtacgatatttaggcccgatatgttttctctttcataatttttaggtttgagtctgataggctcgatataaggcccgattatttgcccgatggtagtttttaatttgtatattttgttgtggccggatattggcccgatctatctttcataatttttggtcagggtccgataggcccgacatagggcctgatagtgggcccgatgttcacattgaatattttttttgctagggctcgataggttcgatacatggaccgcttatagtctgatgcttatgcttattcttatttatcaattcatttttttttttacttgttcttgatcttcattccacttttgtaaaagagg

SEQ ID NO: 78721 - DNA, 1040 bp, Cannabis sativa
ctccttagacttcttctcctcctccacccgacgaaggactgctcgaagagatgtcctctcatcttgaacacagttcacttcaacagataaagtcccgacggtttcctcaagtcagtcagaagccccatgatccttagtcagcttagctattttcttcacggcggtaaaaagcttcttgttggcttcacccaactccatccgaacagctccgagttccgccctagcaacttcagcatccttcctggctaagtccacctccgccctcatagtgatggataaagccgtgttcttggaacaagcagacttagcccaagagtaggtgtaggccaacttcagaccggcctgcacagaggaaaaatattcaagccaagtaaggaggattaaatgaaatcgtcaagaaagacttacccttgtgaattccttcaaaactccacccatcagcagctctagagaagagtcattgtcagcaccgaccagctgcgcactaacctcaggaacaaacagttcatatagtgggcgagcatctccttacctttcttggccttcggaagcactagcaaaggtggagtagaggtctgcactagctcagacccacctctccgtcggtcaaacctgtcttaactccctcctcaaaactccttagacttggcagcttttggagtagaggggtttgcaaccgttagctcctcagaaagatcgatgacctcccaagcaggcatcttttccttagaagaggtcccctcaccacctttagacttcttggccaggggagatgcgttggagctactgccaatcctcttcctcagagcatcaagcatctttagagacatgtctgcacggaaccaaaaaacatagttagagaaaacagacatcagaaaaataaatcataatagtcaagaagcttaaaaacaagatggagtagtacgcaagatgattgctcgggcaggcctcgaaagtccatcatagctttcccttttccgagcacgggagaaggtggccgagcaggagatatgggttctctaatgcgaattgcatgttca

SEQ ID NO: 78722 - DNA, 1478 bp, Cannabis sativa
  modified_base (66)..(69): a, c, t, g, unknown or other
gtgtttcgagtctccaccatttttgttttgttactgtctactttcagacgcttccttcagctctcnnnnaaagcaccaaaatgttgaccgaggatcaaaacaaaacaagaccaagtattttctctctgcttaggccatgcagcactctgctaaagccatggcaaaaactcagtcgaagagagcggggaaaatgaaatctgatgctaagaaaccgaagaaccagggaaagcgaggtgttcaaatggagaggcaatctcaaatcaaccttctcaacgaggttgaactgctcaaacttactggaagtgaggatgaaccagacgaatttggtcaggggaaaaggtgcttgagttcgaaccaggcggacctatttcaagaacctttgtctccttgaagctcactcagagaaattcaaaggcaagaggatgtgcaacgcgactttgtgagctttctcaaggctacggagcaatgtaacagtaacctatccaaaggtatgaactctactcctcctattctgagatttgcaactgtagtgaggaatttagacaattcttttaagaattctcagcaagataggaaggtgaagattgaattagaagatattgaagatgaggttaaccattggaagccttctttggtgtgttatgttcttggagccaatccacctttacatgtacttgaaggctttgcaaaacggaaagggaatgacaatgtggataaggtaaaactgttagcatacggagtgttcttaattagatttcactctgttgggcagagagatgaagttttgaatgggggttatattttgttcaatcgaaaaccagtcattatgaagccatgggacccgaattcaagcattaagaaagaagatgtgaaaatggtgccaatttggatacaattagaggacttagacctcaaatattgggggggagaagtccttgttaaaatagttgggcaattggggaaacctattatggtggatgcgattacaagagaaagagaaaggcttatgttcccaagagtgttgattgaggtcagtattgagcaagaactcccaggcttaattgaatttgtgaatgagtatggaagcatcactactgttattgtacagtatgaatggaagccaagcttatgtcaacattgccatggaatgggtcatgtgacagccgaatgcaagaagaaaattcaggctaagaaggaatggatagtgaagaatgataacaggtgagacaacaaaaaaaaaatacgcttgatgaggagggctttcaaccggttacaaggggaaaagaatcaggtcacaagaagcacctgcagaaaccgaattgcagaacacttttagtgtactactaacagtagcaggtggtgagaaacaggatgtgcaagaagtggagattggggcaaaacagaataacacaagagaggggggagatccctctcttagaaatggataagtttctttgctggaatgtccgaggggccaa

SEQ ID NO: 78723 - DNA, 512 bp, Cannabis sativa
taaacattgattgatcagaaccaatacaaatcatcatttacaatcacttcttaccaaagctctttttcaggtttgtaataatgatatattttttttttttttggagttttcttgagaaaagaattgaactttagtgaaatttgaattgagaagttaattgcaattagggcttcattttattttttacattagtatatgattttgtaagtcttcaatctatagttatggcatgtaatggaaattagcatttttagttatgaaatttaacaatgtagtttcaatgaatttagctatatggttatctggtctatacaattatatgatagactctctactggggcatcatattagaatattgtgaggaactgtgagaaaaatgattatgataatgaataacaatgatataggaaatgatttactttttaagagaattataattgtttgtttgtacccaatggcgaacgattaccaagtgtcaaactattatttgctttactttgttgttatttgat

SEQ ID NO: 78724 - DNA, 1318 bp, Cannabis sativa
gggtcactatgggacttctaacttttctattcaacccggtaatgaggtatatagtactgtagtctgttcatattcattgctaacgaatgtgtattgatattcaaattaggtttggagtactacttaatgaggaagaagtatgttcttaaaggagaaagaaagattgattggtggattaaattagtatcgattatgtaattgagttaggactagaatgtaatgtaatgtaatgtaaggagttcaaataagtgatggcaatagtaaatataagtgcctcgcatgtacttgaaactcttataccaaaatatgtatgagcagaggggatttcacgttcccgaagtaagaaaatatgagattgatggatatcaataataaaataacctgtatttgggaagcaaactatggaccataacaatatagtatacccttcgaattgaagtgtttttatatacaaaaagtggtgataaggttagaccagatcactgttcatacattggaactcctgtaattgagatattaaaacatacatacaagtaatgtatagaaactcctgtgaaactatagaggaagttcaccgctgtccgaaataacaactctgaccttgggcacaccgttgtctcttccttcggcctcaatcttgtgaacaatatccataccagaaattacctttccaaagacaacatggtggccgtccaaccttcataaagaaaaaactctcaaagtataaatcttgaaaataatgtcccaaacttatatgctaaaagcacaatggttaatgaacacattctaattacacaagcggaagctaaatagctgcaaaatttgcagcagcaataatagtaatgtttttgttgaaagttgcacttaactaccaattcaattttattactgaaaataatacaaaataattgctaatagttgcacttaactaaccaacttattattattgacatttgacagcaatatgattcttaattttggtcaaatttcaccttttaattacatacttattaatatttaatttatacttaaggaaacttttagtataaatttagtattatagctgtaaatattccaatttaaacaaaaaatgcataaaactaattttaatttatgaaaatataaaaaattaaataggcaattaaatgcaactattagcaaagaattacaattatttctattaaaaaatgaattcgtcagtattttttttaagctaattaggatttttgcctccgaactttcacatgtacaaaatcatgctctcaaacttctcaagttgataaaaaattttcccgaacaattgagatttgagattatt

SEQ ID NO: 78725 - DNA, 1092 bp, Cannabis sativa
aataaggatctatagttttttaatatttttatggattttttttacaaaaattgtaactattatttttacgttaatggtgcaggaacaatattctccatgttgacactaaaaaatggttaacactcgctcactaaataggtgagatgaaataagaaatgagtagaataaatagagagacacacaaaatttatagtagttcactcttcatgttgtaatggtaatagagctacgtttactttgagtttttaattatcatcacgagaattagctagaagagaattgactaagtgtgaaagatctaaatttttagagagatatgttatgacttgatgggcacttttctaaatgtgaaaaatgagttagatgaactctctttttatagtcaagtaggttctatgataataataattatatattcaaaaaatgtgaaaaaaaatacatttaagctatttttgactattgatgatgatctaacggtgaaattgacttcggagatcagtcgtcaattccagtgtttgaatccctactgtgggacctttttcgggttgtcgttgaaatttgtaactccgttgacaatgaaatttggacctattatctttagaattgtgattggggtatgaaacacgacttgtagaacattgaaatagtttaaaatgcaagttgaatcgcgtcaatcagatcattattgagtgagttattgctgtactaaaggctgctctaatatcaatgccaagttgatagcccagcgcccaagttaacatatgacgataacatgaacgctgagtaagtagaaaaactttttaagaatgtatttttttgacgcctaagtaaaataatacttaaatcaatttctgttttgttgctcatcatttttcacagatattcacattgtttatatatggaatatattggatcattatgataccaacaaatctcaaacaaaaaaaaaaaactataatataaggtaacaaatgatattaacattcaccctatctattctattatattatatagatccaaacctcaaacgagaaaaattttaacattacataaaacagatgtaataacaaatgtggattttttttttttttt

SEQ ID NO: 78726 - DNA, 7435 bp, Cannabis sativa
  modified_base (5432)..(5446): a, c, t, g, unknown or other
tttataatttagggttttctatattaaagcgcttttaggaatatgtttagatctgtgatatatatatttcttaagtgttttataaatcttaatatctctttctcttttcatcttgttcttcttttcttggtatctattttatattattctatattattttataacattattaatattatttaattatgccataaagtaaacccttacattttatacgaaacccatacacatcagtatatcctactttcaccaacttcataaaccaaacttcttttaaagctatgtggtatgcactaataatcaacaaatcccagtacatcaaatggtagattctgagtcacacaaatcgaatcgactgatgtaatccttttacaactcccatgatcaatattattagtatcgtcactctctgtttctcttctttccaactctgtttcttcttttgcttttctttttttggttgcaagtcactcgagaacaacaacttagacctctaagacttcaataaactacagcccttaaatatttatatatgatgcgagaatttatctattgaagactgttgagaagttgttatctgagattgttagctgtaactgttttgctgttatctgttttgacagctcatgtgtggtgatttaacttatttatttttcaattaaaaaaaaatcttgatgacattcaattaaacttaaaataaaatgaaattaataaagtatacctaaaataaaaataaaagtataactcttcgcatcagcaatgtccaacataacacatgagaccctccagtaacatatacagcgagtcatcaaataaaataataagcaaaaagggaaaacttgatcgtatcgtgaagaaaattataggcataatattagtcaaaccaactactgtatgtataagatttaattacaacgcatttaattgcatgaacaaacatacctgtgttaggcacagaatttactatatacatactccatattttttactttttctctctgtatcttgtatcggagagttagtccacgttgctaattgctttgccatttctctactcaacatccaaaaaaaaattaactgtgctatatatttagctagctagttaaggaggaaaaacaattaattaaatgcaataaattaagaacaaaaccaaaacttagtaaacttttagctagctagactatataaaaaaaaaaaaaaggtgatatattataatatatcaaaccccgtagccaccgtcacaggtgcagctagcgttggcggagtcgccgccaacatggtggcgaggtttggtgctgaggcagcaacacacgagacccaccaataacatgaatccccatgctgatgctactgcttgtgcccaactcagataatgccccattgatgatctttaattactactgattagtactctctctctttctccctttgctcttttctcttccttcttgatttttgttgcttaataaattgtcatcttcttcttcatgaaataatgggagagagatagagaaagggaggagatgttatgatttgtgaagacatgatcttgagtggtgtttaaatttatatatgaaaactatctgtaaatattaaaaaacatggcccagccagccatgtgtgtcaatttatacgtttggtcattaattaatacacctttttatcttttgatttttcgagttaatacaataaccaggggagaaagtgagaaccatttctgtttgtataaaaataaataaataaatatatggaaaagcacatgcgtaatgttttaaaagacattattgaatgaacatatcatatcacacattatttctctctcttcttacttagttggctgctcttttatatattctctgtggtttttctttcctcatttcacactcttggtcttttaaagccctttcaatattattatatatttatatacataattgttaaaagaataagaaaagatcgatatacaaatacaaaagctccatatctattttattccctcatggctcatactacctttttatctaaatctgtatctctttgattatgaaaagaaaattttcgttttactttaaatttactattttaattaattttgttttttcaaaattgtccccgctgtttgtttttcttttattctggtcccactataacctggcctaaagtcatgaatgtggatgatgtgtcgtacgttcaacaatcctatcactctatagatcttaacaggaggtgtctcttctcccaaacatgacagtgaaacaaataatattgagtaaaatttcacaatgatttaacggaaacgagtgagagaaagtaattgaattaagatgaattctcattgataaatatgtgagcaaatgtccttatatacagaattctgttagaccacagcagaacactacaaaaaattgttatttttagtaacaatattttagtcataatataattttttttgtgattaaatagtcacaataaaatattatttgtaactaaaacatagtttttagatacaaattattaataatttaatttttgtcacaacaagtattataactaaaaacacatttagtcacaataaattgtaatttttgtgactaatactttttgccacgaatcttttagtcacaatttttataattttagtcacaaattttattgtaattaaaagcaagattttttgtagtggaattaaactatataactatacctgtaaagtgagagtagcttaactaatctacatggttagttgatagtagttaactaatttaactgacactaactgttgattgaatataggactaggttcactacaatcataactgaatgcttaaaggaaaatgattcagggtcactcctttctagcaattctccaccttgaaccataatctttcagcctctgaattttatgagccatgagtagttgaagagtagtcactagtgtccgctgcgagaagcttgaggcaatgaacaaacttggttgatagtagggactttgtaagcatgccaaaaggattttctactgtcactgctacaaatttgggctttagaggcaacttttaagacatttcagagtcgattttggagaaattcgctatcgacgctgatccagacaacgctatagagtcgaacataatcgatgctaaagcgtaccatatggcgtcaattaactgacgccatatgcactaataactggcgtcaaaagattaaaaaataacgccaaatctttaataattaatttatttttccaatttaaaacttattataaattaagaaatttaatttatttaaattatacatttattaatttataataaatattatttaatttaaattcaatatttattttttaaaagttaaattaaatattatttaaattaattttatgattagccaatatacttaaattaatttcatagaagcaattaaaaaaattatatttatattacacaaatattttaaaattagtccaagtgttaacaaattaataaatctaattacaagttaaccttaataataagctagggaagaaaaattcttatacatttcagcatcaatcgttcaagccttcgtgaatcaccgccagcaatcgttctatcccctgtcgctgtaatggtaacaattcaatttttaaatcatatgtcttctttttttcctaaactgtaaaaagaagtaaatatttatattagttcatatatactattatttgttaatataataaatacgataattaataattaaaacttatagcgttttgatcgtgtatataacggctagggttaggagtgttcatcaaaccgcacaaactgcccgcaccgcaccacatcgcataaaaaatgcggtttgaaatcttttgcggtgcgattgcgatttgtatttttgtcaaaccgcgcagtgtgtaacgtgcatgccaagatggcacgttacaagctaggtgatgcccataagttggccaagtgtgggtcaagtggtgacgcatgttggtgtgcatgttggtgacatgttgatgcttagtttgtacagtagtgacattttttttgtaaatatcttcaatattgtcttgatttggacaggacatggtattcgccatttatttgggtctacaaatacaatagcgcaatcgaatttgagaaattcagtgatttggtatatggttatgaccatatgtctatagagcaaaaatcgtatatgtttatggtagaaggctataagcttagaatgctcttagtttaaagaaggagtacttggtgccggctctccaccatctcctgacaccttggtgctaagtgagctactactaattagtgcgactagtagggcgggcatatgaggaccactaagggactcatatgtctccatgagttggaatactcatgtacactatcgggtcgacccagtaatgtgtctaagaacgctgccagaggttagcgggtacattttcattggcttaccagtatgccgcttgcacggtacatgacctaaacctccaagagacgttgtagtgggccttgaagtaattcttctgagtagtttttacaactttttcaaccattatgggagcacattccaaaagaaaagaagtaatagtaggtatagtagcttttattcgaatgggccatgaaatgaaaattgagaaatattatgaacataaccatggtaatcgaagctcatgtcatggccacgaaaattagaggaaattagtatatatttggtctcataattaaaaaattattttttgtacgatcccccatttctttttttttgtctctctttcgcatcaacaataaaggcaaaccaaggtcataggttttaccttttagacacatcttctcttttgttgagatatgcctctcttttcttgcaggtcaacaaaggctagagcttcaactaggcttcagtcgacagtggtgatggctttgcctggtgctccccgtccgttgtagagagtgatagagggtttaaatttttttagtttgggggattttttagggcaccgaagctcatcgcaagcttaagaaaaataattaaagttggaggttgggtctcgcaagcagagagaaaaaaaaataacatttatttaattattgttttatttttataatttttataaaaaatttataatatttaaacaattagtattatgtggatcattaaaagcgtgctacttgtacactagtgtacacgtggataatccaccgtaacacataactaaaatttatgaataaaaatataaaaaaacaaaatgaaataaaaaattcagtaaattttactgtcaaaaaatcgttttatatggttaagtcaaagaaatataaagtttatccctacaaataaatactactgttctgtgcctctagtctacctattctataatcaatactaaactcatttaaaaattgataaatatgcatgccactaaaataacaataacaataataatnnnnnnnnnnnnnnnaataataataataataattacacaaccaacaacaacaaatatataatgtagaaataataagaaacataattcaatgaagaaaacaaaaatgaaaatatgcttctcaaaaatagccatggctcctaaactataaaatagttaattactatttatttattttgattttaaacaaaagaattatattttagacattactacaagtagtaatgcaagtagtaatgctgcacaattacattttcacctaacatgtaagcgaagagtgaaaaatacaaagctaaataaaatccccgattatccaaacaaaatcaagcattgctcattacaacaatgaactttgaatgaaagcattaccagcccaagaaaataaaaaagagataaaattaggcttaatgaggtttgatcacttcaagggtcagcatcataattctaacacagaccaaataactgcacagtgcgcacaaaaatctaacaaaataaacagaacttgacaaagtgacgacagattattatgtacataaatttgtaccaaacaataccatcttaaactattaaaccgctctgaaaacctttaaataagaatagtacaccgcacatcatcactctatgccagcaagtatgctagtatagcctcggccaacagagttctatgacaacccgttaaagggaggaagagcaataaattaatgttctaaagttgttagcaactattacttcattatagaaattctccaatatttttctgacgaatatatggaaaataaatagtgaacaatttgctttacagaaaaataaaggaaaaagaaagcattcattacaatttacagcccttttgggatcaagaaagattggcaaccttcttcacctgagaaaacttatccagccaaatgagatcactttttacccacccccacagcaacaacattaacaacattttagctcaaattcagaatagcaacttgtatgagtgataattgacactaaattccctacaaaacaaaacagaacacaattcaaaatcgaaaaaaatattccaaacagcaatcctacatccatgcagcaaattactacgtattgactccattagtgatggatgaacatatacatacatatatatatataataaaataaataaaaacaatagcttatcaacataaaaataaaatgtagccaccaagtcacgaactaacaagaggcaattacagaactcatccacagcatagcaatcagatatatttaataaggaaccgtcacttaaaactaggttagatcctggttggctgggcttttataactgattttgacttctcaagtttgaaaaacacttatgctgctgcctgctggttggctaaacagtgagtttaacttttagctctataaagcattttaacagaagtcactttagaaaacttctcaaaagagttttctgagaaactaaaagcagaagcagtcccagtcaaacatagccttaatctagtttgataccacttaaaaaaggaaaatgctttgcaacttgattgacgtcaccacctgaaccacgtggcactatgggactgaatgggagatcttcaaagctgctgctcagcagctttgcagacctcccggccaaccccactgtgccatatacctcgggaggtggctcgtccttgggatgtatagcttggtcttaaaaataatcagcattttatttattaactacgtgacctcaagcatactactaatgataaatttaaaaaattatatcattatgggaataatgcaatgccagaaattttaaattattaaaatcatatttctttctacttttttctcctggggtccattcttgaattccacaactattacccatataaatcatagataattaattcatcaaaaaaaaaatcataaatcagtatccaaaagcatatacacatctaccatcacagtcttaactcttaatgaagaagggcatcaggaaacattgacaatgtaatgacattaaaaggcaag

SEQ ID NO: 78727 - DNA, 503 bp, Cannabis sativa
aataatctttcttcttttggttttaaataatcaggatttcgaccgaccccgtctttcgattctaatctacatggtgtactgtaccgagttcatgtcaagatcctctgtccagtttcggtggtggtggtgtgtagcggtctttcagcttcttcaagaactctaatgtttctgtgtacgaaggatcagagcggttgaccggtttacaagaatttatatgatctgttgactccaaaacctactccgaaaaatgtcataataaattaaaagcaactataatccaagatacagactttattgtatgtttatttatacttacaactagttcaccgaatccaggatatgctgattcgattggtactatttccatacgaaaagcccatccaccgtagccttctacgatcggagttactttggtctgttaaaacattccgaaatacatatcaatcaaagctgacaaagaaaactgagaaaacatgcaagtgagtcgctttaagacttacctc

SEQ ID NO: 78728 - DNA, 5597 bp, Cannabis sativa
attcagtgcaattttattaaaataataccttggtgaaacaactttaatacagatgtaagactatataagttagtcgacaagttgatgagaagttagaataggtgcaacttgttggagaggttttatgtagggtacggtaggttaatacttctagtgcaagaattttcttctattaaaggagggatgacagaactcacaacacacaactaattaaaagctcagaagagtttttttaaaaaaattagctctcattttattattgttcccctatttttattttaagcacaagtaaatatcatatctcatcaattctctcttacacacaattatcacatctccagtagtttttaattaatcacgcccttactagttagttatcctattacacaagcttttataaatatcaagttgcttatttcacaagcttctatataaataccaggttatctacttcacaagcttctataaatactaggttgttcgtaccactttcatcacatagtaacttttacaagcttctataaatatcaggttgttcacactacatcggtaacattcacaagcttctataaataataagctcttcacaccaccttcaccacatgagtaactttataaggttctataaataccagacataccaaactactcacaccaccttcacagtttaccaagcttgtccatgaatcataagctcctttattcacaatccttttaattttctcacacaattataccatcaaatatatatttatctactaaaaactaacttgatctaggttatcacttgtacccaagattgatcatgttgtacaaaatagacactatttgctcttgatcgttataatctctcatattgataaagtagtagtgactccttactattgtagacgtggaaaaacaaaatttgttgaattatataaatttggatctctttttatttaaagtaatatatattaaatgtttagctataactctaaacaaagtttatatgtattatcaggtagtaacaaagttattttccaagtacttgcgaataatgaacgaagcttcaaagatgtcaattaatactatattaaaggcagaactggataggttttatgtatttgattttataagtacattgataaaagcaagcccaacaactcagccaactttttttttactcttacacactagcacttacaccaacttctttactcttatcttttaaatatataaccaaaattttattttactacaaacttttacaatacactatatattattttctttatttttctactttattttgtttaaataatatatttataaataaaatattatatatatagctgatgtgtgtgatgtaattagaaaagttaaattaatattagaaaacatttaaagactccctattcctctagctaaatgtggagaaaattttagctaaaaaacttgttaagtaaaataaagatgagttgagctaaaattttgcatctttcttaattttagctattatataaacatatttgacatacgtattcgtagaaacatatgtatacgtatacacatttatttaatcactatcttcttaatagacatacgatatgaacatatacaccacgcataatgcacatatatgtatgtataggagtatctatgtcatctggatccttaatccaactaaaaatgaccaagtcaacgactaataatctgtcaatattcaacgacagccgccgggagcgaacccaattcgggatttggaaatatcataggccaccttataagtttgctgctgacgatttccaataatggcatactcgttacttgctgcgaaagccaaacaagtgacacccttttcggcttccaagatcaaatttttaggccccagattaagaccggcgccgccttgaaacagaagctgaatatgtggcaccgcagccgaaacggcgctggggctccccttgaaacaagtatccaaaatcgaaacagctggagccttggcgaacttggtcgatactatcttagcaaaagcttgacttaaagcagagtataaaggattaggcaaacgagtaataacagtaccagagtctataatacagggcactctgtaactcgtaggagctactcctaatggcttcattccgaccgttatagtcgttaatctcagaaaatacaaactgggattcttagcatcggtcatcataggggtgtacttaaaagccggtgatgaaactgaagatgttccaatcgaaaagactccaccttggccgaattctgccgaaggaagacagtacgagaaagcgtatccgtacttagcggaagcctgggaaagcaacgagagtttgtcccgggcaagacccaaaatcccggcggctcttccgaacaggccttgattgtcttgcccacatccatatacgaagctgggaagaatctgggtctgggttatggtgaggcggtcttgactgagaatcccaattgagaacgacgagtctccgtagctggctgtgtagatacagttgtctgaaccggcggcgcaaaaggggtcgttgagtgtcgcctgttttaccgacgagcattcggggctaccacacgttaggtgtttgtaagtttttgatgtttttgggtcgaaaacagggtctacttggttatggcagtaaattttacaaggttggcattgaagccatgagaatgagctacctgtgtcgatgatcatggagtagtattttggtgggcttccaaggcccacttttacatagtaattacccgacccgattgacatacccgagttcagtggtatgttaatggatttgagatctgttggcttatgatgagaagaataggtagagaatgaagaagaagttgtagagcttgtgtcgttttgtgatagagtatagtagagcgttttgaggcgttcattgtcgtttgttactatatcttcaaaatgggactttgggtttagagatgaattgttattggttttcacatgatatatagtcagttccaacgagtctttctctgcataaaagaagtcatatattaagatggttaatattttatagtttagtataaaaaccagctaaaaagacaaaaattgggaggagaattatacagatatatagatatatatatataccttgaaatacatgggccgttgagctggataccgacacaagcagaagtaataaacccagaaaccataatgaccccatttctgacactctttgttggagctgaaagaaactaggcagagtgtgttctctccctaatacttatttaacttatgtatatataagagaatttgaacttggaatcagaaaagggcaaaaggagcattatgagcctagaggctttgacaccttcgaaaagacttgtttaatcaaagttttggggttctaacgataaaaaaaatgaagttatgttacttttattagttagttcatttattgcaatgcttttgttttcccctaaattttggtgccaccactagatagtaaaccatgcaaaaggcagtgggcctgtgattttggaatagatgagcattagtcttctaatctaacgtgtcatttaaagagagagaccccatcaaataatgactcatttgaaaattatatactgatagccactctctaaccacaatcgttgggaatataatgcagaacatgaagtgatgctaattaattgctcatagaaaagtagagggattagtttaaacatttgatgaaaataatgaaatgggattactaaaacatgcaagaagaaaacagttgtaatgaaggtgaatttagcatttctgtgtgtgaattcaattcaagaaaactaacagtaaaagaagattatatatatagcccaagttgtgcatccatcattgcctttcgaagattatataattaaatgttttgccatttaaaactaaaaatattaatcacatcatacatgttaaggcctgactatattagtgtaatttgtgtgattattgtcggcagcaacagtatatatatacttgagaaaaaaagagtgaaggttattatgttttactacaaatattaaagtactatatatatagtttgagattccaattattcaattttaattagttggtgaaaaagagataaggagttgacagctcgttatatagtcccttcgcattcattcaattcctaattatattcattttctctttttgttcattgcccattggccgactaggccattcatgaaatgaataagactgctctggttccctcttgattcaataagccaaatccatcaacgtaactacactagtgtgctgtatggtactaatgcaataattaaaagtatgagaattaaccatcctcttcagctctgttaaggaaaatcaaaactatgtttatataatgatgtgataccactattttgcacttattaactaagatggtaaaaaggtcaaaatcgtgtgatgacttgaaacgttgaatctaaccatgagtttagaatttctgtgcatagcatagcataatggattatggccccaacaaacactgtcattgtatggttctaatagatttgctcacggtttaccgtaacaagcatttaacagaaaagcaaaaataattaaagaccatcacaactgactagtaattatagctgtcacgaatagtctaattataaaggttatcggtctatgtcctttagtcatgacacgaacgtgacagagcatggcgttgatgactattcaacaatagattctatgatcatgaagagttaacaacttacatatgagatacaatatgttttacaattcttgttcttttatataaataattcacatgtagtaataaggtaaaactccaccttaaggtcgtttcataaaagtgtacatatgaccaataatacaactaaacataaactggtccaagaatgccagaaataggtaccactgagaaaatcctgaacttaaaagttgggaatacagttatcagcgcctgaaagcattgccttctaaggacctaccctgagtataatgtgttcgacgacgaacactttccgcaatcgatttgctaccccctttctcagtaccatatacgcttttttgagcctcatccaagaaatttttgcccttaattatggcagcccgagtagcttcctgagcgtcgtcgtcgtcagccttctttaaccgtttccatctttgctcttcatgtaactcggcatccatttgcatttcacgcagcctggcagctcgttcttcttccgacattttaggagcagcattgcgtcgcttatggtgtgactcctgtcgatctttagctacatatctttccttatctgacttttcatgatttctctcggcagcattttgatcatctctaacagtttctcgtctggattggccatcaggtgactgctctctgtacttagaactccgatagctattcttctcactacgacttgcttccctacgtgatttgttatctaaatcagaatacttatcatgatttgaactcttcttatgacttgatttcctatgtaattcatcttctgattctgaatacttatcataatttgaactcttcttatgacttgctttcctacgtgattcatcttctgaatctgaatacttatcataatttgaa

SEQ ID NO: 78729 - DNA, 1296 bp, Cannabis sativa
  modified_base (187)..(212): a, c, t, g, unknown or other
aaggccaacttagggctttacttgtatttactgttttgtccttgtgttgttctgtattgagtcttaatatcagtgtaagtggaggtttattccaacaattcaaaaatagatgaattcaaattttatatgcaatgatacggtctaatctattctaatcaaataaattcttttttttttctttctcttnnnnnnnnnnnnnnnnnnnnnnnnnntcgaagtcaaagttttgctgaaaattgattatttaaaattcagatcactatatcaatcaattttagattaaatttaaaaaatttcaacacaataattagttaaccaaagatcattttctgcaactattatttaatgagttcagtagtcaaatctatgtaaaaaatttggtaagttagcttaagcttcaattggtttataaatttaatttcctaaactaataaaattaaatgaatattgaatcgattgcattatagccacatgaaatggcttacaaggatttttagttgctaataaacatattcttaaaatggtttatatgagataaagttgttgctaaattatataataaatatatcagccacccttacaataatctaatatcatacaacaaccatattagcaatctaatattatacaacaattgtattagcaatcattacaaaaattcaatctcatacaacaactatattagcaaacacttataacccaatctcatacaataatcatgttagcaactataatctcatacaataaccatgtgagcaacccctacaacaatcattttagcaacacttacaacaaccaaatttaataaatcaactatgttagcaacctattcttatacaacaaccatgttagtaattctacaacaatctaatctcatatatcaactattgtaacaacccttatagtaacccaatctcttaaatcaagcatcttagcaacctaatttcatacaataactatgttagcaacccttacaacaacctaagttcatacaaaaaccagtttagcaatcattacaacaacttctcataaatcaatcatgttagcaactcaatctcatacaacaaccatgttaacaacccttactggcaatctaatctcatacaacaacgcaacccttacagtaactcaaccttctacaacaaatgatgctatagcaacctttacaataactcaatctcatacaaaaaaatatattagcgacccttacaccaacccaatctcatggtgtaatattctagagttatgaaatggattagcaaaatcctaactagataattatgtataattgaggaa

SEQ ID NO: 78730 - DNA, 2835 bp, Cannabis sativa
agaacaagttaccctccagaagagggttactcggctatcttccaataagatagctcagattgttaatgggactcgtcaaccattacccccaggcccagttttagaccttccagtggtgagccaacatctagaacctttagtgggtaaagcagtcgctgcctatgcggcggaaatgatagacagtattggtcgtaatgtgagtgagcttactttggaaaagtgtgtgatgagcatcattgctgacttttacactctatcgatagccatcaagcaataggctgcaagggtaagtcttaaattcccatcttcccttttatttgtaacataatccttattctcgagataaccttggtaatttgctcttgtcctctctttcttagatggcgttgttcgcatagagggccgctagggagaccgagaacatggccatagagctaagccaactccacaccagagttcaatccttgatctttgagaatgaggctttacacaacagggccgaacgggctgaagctcaaataacccccggtgccttcatgactcgtgaagagtgggaggccaaattagctgtcgaaaagtggtaatgggacaccaagtacaagggaaagtatctagaccataaggcccatattgagcaggaggctgcaaagtcggtaggagaagttgagaagaaggcgcgctcactcgaggagaaattaaccaaagctgtagaggaaaaagactgtgctaaagcccgaatgatggagaagtctgagactattcttgcccaaacttgtcaggttaccagccttcaagggcacatatacaagaaggacttacgctttaaagacctcgagaaagaggtaaatggggcgaaggagcgggcaactgcttgagagtccaaatttggtacccagacccttctctaccaaggagccataattcaataatctccattaagagaccatcaataggttgcaagagcaaattaattagggctgctcaaataatataaaaggacacattgcttgggctgccatgtgccagatgcgggagactgctccccaactaattttagatgcaaccaggacagctaacagggcagctgataaggcaaacaggtaccgtcttcgttgcatggaaatgttctatattacagttcttcacgattaggggtagaaagatcattcaatactttttcttatttcaaaggctgtcagggggaagattattaggaaggtgatttccatgatccgtggagaatacctccaaaagtatccacttattgtcgatagtgatagtggaggggatactattaccacgacttctcattctcaagagtctacggagatcgaggtatcttccacttagttgggagagagagttgctcaggtggctgtggaggctaatctagaaccgatagagcaatcggatgttccagccccaactttgttagcaccaccattacctcccctagaccattaaggaccttttagccttctttttctctctctatttttgtaacgcgggacggtactaatttttgcctggtccgcggggctatttatgacacttgttcccaagaaagcctgttgacataacattataactaggctttagtattttcaatgtgtagttgattgttaagggctatctcgaagtatacagttccaacggccgttactttagctttgtgactttttctccctctgctagcttacgtggtactctaggaagtacctgtgtcctttcatcaggtgggatagtcttgaccaatttctcatgagccaagtaatggtgctaaagacataaatggttttccagactgttccttctgatcacgagactttggcattttgtcgagcaccaagggctttttatctaggaggccagtttcacacgctatagatttcgaatggtattttcctggtcaggataataccaaaatctatgggagttcaagaaaagccttaatagttttaatctttttgtacaactcctttcttgataattattgagaagaggttcaagcgggtacttcccattttagggatttttagctagaaacgcctctctttaatattgattgtgttttttaagaaaggattcaagcgattgttcctttttgaaggaactttgtttaaaatgcctcttaaacacaaatttatcaaaaataaagtaaaacatggcacactgcatgttgtatagggtcgcaaccggctaggcacggtacccccaagtgagctgagaagtgtggatgtgtccactttcctggtcacttgtttagaacatagcctgtggcttaaaaaacataaagtgtaatctggaagcattaaatacttgtgttctcatttaatgatgctcgaaggctgtttgttacatattatagtttacgcaaaaacattttaaattgaaccactatttggtattccacctactggtaatatcagcataaatggtctgcattccaggcattaggaaccctcaatccatccattttctttagtcaaaaagttccttgccccaccttctcgagtatttcgtaggggccttcccaatttgggcaaggtacccccactcctggttcttcggaagctgggaagactcgtcgtaggacaagatcaccgatatcgaaggtatgactctttaccttcgagttgaaatgctgggagatattcccttggtacattttgagctgaacctgtgactgctcccgcaactcctctattaagtctaatgactcttgaagcaaagaatggttgcgggttggattgtaagtatcttgctgatgggatgatatcgtggtttttaccgagattaccacttcggatctataggccattgtatacagcgtat

SEQ ID NO: 78731 - DNA, 687 bp, Cannabis sativa
aatcttatataaattaattgaaaaatattatttctagatggtactgctagtctgctagtcaccattgatcagtggcggatccaagattagattttggagtgggcttagttatacatttaatataattcaaaataataaataaatagctaaatttaagtggaatgatggtttaacaacatcctcctgttgtagtcatcataagtttgaacttaatttgaactttatacttcatttttttttctaataaataaaaaagttaatacacatagaaaaaaggggcaatggaattcaaaacatggtctcccatgtaaatttaaagcatcttaaccaattattctatttaactactatatatatatatatatatatacgaaaacaaacattttatattaatatatattcaaatctgagagtgggctttagccctctctcaacacccctaggtctgcttatgctaccgatatctaataaaaataatattttttttaaaaaaaaaatactaaaaagcacatataatttaagaaaaaaatttttaaataatataactaatggttgaacatgtatagaaaatattaagcaccacccaactttttttcttttctcatacaaatatgaaataagcaaataataaatctatataataaaaagcacaataatatcgttaaaaaaaaattaaaatacttatcc

SEQ ID NO: 78732 - DNA, 778 bp, Cannabis sativa
atgttccctgcaacagtgagtaggggaaaaggagagcaatataagcataaaagcaccattaagcaaaatgaacctactaaataacaaatggaacagaaaaatcacactgaaaagagagtcagtctcatatcagataactcatgaaagacaaaacatggtgttggaacaaagttatatcaagctatccatacagagaaggaaagcaaaaagtataatccatgtgccatgcaagaaaaattgcactataaatgaatttaactcttacagcagccttggcctcgtccattagtctcaaaactccaggtctaggttccacctagaataatgatttcagtgtaccgatttaatcaacttatttataacaattttaaacaatgaaacggggaaacaaagtgaaaatgtctacttacagttccagacttgattatgtccttgtatctttcagttttccaatcctacaaaagcatcaaatgaaaataacatctcaattggtaatgccaatatgaaaatgatcatactcctctccacaattaaaattttacatgatattcaccaaatcaggtgaaaattttaatactgtattcttaatcagagatagttgaaaaggaaattgaatcctttttctcttgtggaagaaaaaaattaggtttctatgtaattaacctggttcagcttctaaaagctagcgatttcaataacctaagcagaagtagtctcaatgaggtcaatgagtaaagttaaatagtttccaacatctactgattgttagaaaagtact

SEQ ID NO: 78733 - DNA, 604 bp, Cannabis sativa
agagagaaagtggaagtgaggagaatgaaggttgggacatgataagaaggcgaaggccatgacagtgagagagagagactgtgaactgcagagagagagagagagatagagagaatgggtttaagagagagtggagagtggagaggatgggataggccatagaatcagaagagagaaaggggttttagaaaaaaaaaaataaattccttaatcaattaatttattacactttaagatagattatcattgtttaacgcatcaatttaattaatttatgttataaaaaaattaattaatttattacaatgtgaattagccatattttatgagcattgctattagtctttaattgtgtttataagactttatatttaattacactactaatattatttagaaggtactagacagtattagtatcttttaacattttttatattttataatagttattatgttaaattgtgtaaagtctgatattaattcattcaataataatttaatatttaaaagagtgctaagcaatgatgctcattagtatttcttttttacttttaaataaaatggctatatatttaatttaatttttcttgaaaaataacat

SEQ ID NO: 78734 - DNA, 759 bp, Cannabis sativa
tcctacatttataggtggtatcgggtcactatcagaccaccatctgaccatcattagaccttcatcttcaacttttacttattttaacaacaaggcatcagactactatcgggcctggcaaaaaaaattagttttctacccaaaactcagatccgaccgtgttcgaccctaaatctaacatcaagccacatgtaacatacattaatcatacaatttattcctaaaatcaataataaaaccacctataaataaaatcatacatttcaaccctaaatcacacagaatatacaataaaataaaaatggaaaactaacattcatggcccggtggtcatgctttcgaagatcctaaatcttgagttggtattcttcgataggttggtggtctttgattggaagcgtggtggttggcagccatgggttgctagggtttttgtgtgagtgatgagaagaagagagctagagacaaagagaataaagaaagagagaaaggagggatgagttgtgaaaggaatatttttggatttaataaaaaagtgacatatttaactaattttaatatatttaggtttagtatattaattttaaccaaatgaatgaatattaattcaaatttcactattagaaattatatatatttgacgaaaaaaatattatttgagtgtaatatatgaagtatatatatttaatattttttttctttacacatagtatatttacaatatatatgcttgcacacgttagtggaaaatcttgaaat

SEQ ID NO: 78735 - DNA, 965 bp, Cannabis sativa
  modified_base (718)..(724): a, c, t, g, unknown or other
cacgataggcccgcatcatcctctcaattatggcctcaataatgggtcgatagctataggcgaatggttcaagaaaagtacgggaacagtccgcgacattagagtgaaactaatccccactagaagattgagggagtggggagcttgggcgatttcacatatctttgagaaagaagaggaagagtaaagtgaaagataaatatgatggttatgtaaaaaaattgttataaacgataatgaagactcaaacaagaatatgtgtttaaataggttcattaaaaaaggtagatgaaaaggtagaactaccaattgtcgaagcattaaatgtcattaataagttggattcccacatgtggacaagtgtaaagtcattttaaaaattaggcatacaaaaaatgaggcatacaaaccaaaatctcccaattcccaccgagtcctgataactagcaaaggattaaaaccgtcgcctcattgtcaacatacaatcctcctaaccatatttgcgccaagaagataatagcaaaaaagattaaagtaacaacaaaataaatagcaaagtaaggttataagattaaaagaaacttcagattcgttgaaatgtatctaaaaggggggatactgccatgaggcaggagttcgagtaagaggctccgcaggccacttacatcaaattgtcttaaaaaattacatcttttttcaagagagagagagagagagnnnnnnngagagagagagagagagcgagggcaacaacacggcaaagcaaaaaagaaaataacgttcaaacatcatttgtgtcgtcatcgtcatcgtcactggacttgtcgaaatcagagaatgtctccatgagatcctcatccttttcgaactctatgtacctttgcaaaaacttgtccacgtcctaggaggctgatttgccttctttgatctcagagtaaagctcgtagacagactgataactccta

SEQ ID NO: 78736 - DNA, 4134 bp, Cannabis sativa
gagccaatctgtggacgacttcaatttgtcaaaggttctttgccccaacactcgaaatcccgggactgagaaggcgctccgaggagatattatctcgttcgcggaggataattatagcaagtgtaaattcaaaagggaacaggagctagcatttgctcacgcataggccgcttcgaggaggacctcccaggagaaggtagggaaagagaaaaccccaattcgacctaagttcccatttctatttcccaactctggggcccccggtgctagcacctctagaacttgtaagtcccctttgaacattcacctcgtcccttctttttgagactacgctggcctaagtccaatagaatttgataaccaactatatagtttttggatgccccattcacggtggggtgataacgccaaaagcttttatttttcgaacttaagtcactttttgggtcagtctcagatgggccctggtcctcctacaccaatcctcttggaccattcctcatgacttcaagttagttccttccctcggatagctttctaggggatgacgataccagacttttaatttgtgaattttttaggacagaattagaccatcagggtaggactagttctactgtgctatgcttccataatgacctttaatattgttctcaccccattatttattttgaaaagcaaaacctatggaggacctttttagacgcccttactcaaacttacagtcctaagaccaagctgcctaagcagcacaatgtgagcgtgactccaggggcttaccgctgaagcccttgagaactgataggttgtactaattgatgaggaagaagaagaggaagaagtcgtccatccccttggtcggaaatgcaaaggtgttatggtcgagccagggccttcaaagaaaccaagaagggatgatacccccggtccaagtgttgactcagggattccttccgaggtcgatgagtatcctgcacctccaagtattatcatgactcctgctcaccctcatgaggaaagggtttagctccgcattgccaagcataactatctcgtgggagaactatcaaggggagatgctgaggcagaagctttaaagaaatggcttagggaggctcaagatgggctctttcgaggtgagtatgtcgaggacgactgggatttgaagttagaccctctaacagactggtttaagcactttgtggggcctaacctggttgcttttgcctcagaaatggtaagccactttgtcgctcatctaacccaacttcccaccaagagatatgcggcttgtgcttcgtccaaccccgtagtcatcaagaggtatatattcttttctatttgttttatatttgatttaatgtatacacatttggagctctcttgggccataatacaatgataatcagataatacaaattctttcacagcgtatttaatttagtaccataaaatcaacatcaatgcccttagaaaactcatttcaatgtaatattatttactaattaataaaagatcagaaattattttataatgttttgttcacatgattactttcatgattatatgattaatatataaattttattaaatctcaaacttataatttctcgttattatattgttgtcaacacagtaagaaatattcataatcatatgcttcatactatttagtcctatgatttatctaagggtgttcatcaaatcgctcaaatttctcaaaccgcccacatcgcaccacaccaaaaaaatgaagtttgaaattctttgcggtgcggtcacggtttgaatttttcctaaagtgcgtggtgcggtgcagtttgcggttttgaattgttaatatgcgatttaaactacatcgcaccacacattataaaaataccaattttaatatttatttaggttcaatatgtgaatgtctagcccaaagcccactaattattgtatttttgaaaattaatttttttttcatatttattttcaagcctacgatatttttaacaagtgtttctcaaacattgttgtatttgtgatagtttaattatttggtgatagtctaaaccgtagaaactacaaaaaccacaccacattgcaccattttttcagtttttgaggttttttagtttcacagtgcaagtgtggtttggaaaattggaaaaactgcatgtgcgggttggtttgaaaaaatggtcgaaaaccacaccaccagcaccgcgaacacccctacatctatcaatgcactggatttacactgatgtgataatcatcgatgtgatttacttacatttagagaagtggaatgtcatttttagggcatagcaaagtaaacttataatggatgtctcgactatacatcggacatgaccgatttcgatagctgtaaagatatcataaacttaccgttatttttttctaattcaatgtgatttagttgatcttcgatcaattgatctcaatcttgaaatggctaagctttagcttaattgtactatacgagttcttagacttgttcgttaccagcttacccgtaggactagctcatacttacatattgggagctcggtagtgtaattgagttggagcgttaatcatagatatgtaatctagtgaaatgatggttttcttagagcttgactaaacaatataaatggaagagctcttatctcagtaataataatagtttattgaaatattatttataaagagctaagtgttttaaggataaaatacattgaaggataaaaggtaatttatccctactcgatgtgccatacgacaggcctgtttggtccttgctatgacaagctcagagtgtctagcaaaagtaatcgtagtctctacaataagaagatctctaactgatggagttccccaaccagtgggcaatgtatcgggcacaccttcctgaacaatgtaagtccacaaactagaaaggaactgcctccacccctagttcaactcctagaaaaatggccgtaaaactcactacctatttgctctgaatagtagtgatactagactacaggttttgaggaaccgccgttattcttgagatcactcgaggaactgcccgaagaaccagctgaagaagctggacggtggtcttcaaatagaagactaagtaggtcttcatcgattcagtggtcacctccacaaaagtcacgctggttcacaacatatagaagtcaatgggaggtgagcaaccaaacaaaatgaaaagacgtagaagaaatactagttaactaaacctaagggtactagcccaacagttctatagtaaaagatgaaaatcagcaaagtacaagttccaagtgcaagaacctgaatggaaattgcgtcttaagttgttaattgactaagatagactcgccctaagaagtgccatacaaagttcctaagggactaaagtattggacaaggattaagcaggcttaaaaggccaaaataaagtccttgtaagagtcaaaagagggccaaaattggccattaccgtaggaccgaagccatgtgtcggctagggtcccaaagaattagcatgtaccatccacggtccttaatcaacgcaagaatcagccagggttctaggttgaagcctagaactgtccaggtccccaaattggcaccatgtgctggccagggtcacaaacaaaccctataggccgaccaaggtatcctacaaatcaaaaactatataatttgaaaactcaaacgtgttctttatgttcttcgtgactcaaagagtcaagaatcaaaacaaagcacaaaatcaaatctttttcatcaagaaatcatacattatgcatcataaagatatcatgtggatcataatgtgaaaaggattaaaatctaacgtgagaatcaaaaatataaaaaacttggaaaagattcaactcaataatgccaaattcaagaaaacaactagaaaatggaatttgaaagcttacccactaatgaagtccgttgaggatgcttgtgggaaggttggatcatcaaaatgaagcaaaaaattttggagatggagaccttaggctgttaggttccaagaggagatgaagagtctgttggaagttattttacaaggatcttagatctactcacaagtatgttgatttaccaacctaaatatgaacttct

SEQ ID NO: 78737 - DNA, 1369 bp, Cannabis sativa
tactggaagaaaccttgtttaggttgattatacaactgcccttattaatactgacgacgtccatcaagataagtatatactcacaatcttttgagtatccataagcttgagctttctccatcggtaaaatattcacatattaattaacttggcaactgtcagggtgagatgagcgtaatgcacttgagttatcatcatcttggtcaaggcttttacttggtatgttaatttagtgatggcatcaacttcatgtaaacccaccactctcttcgattggcttttctcacttggtcattgttgattattcatggtcatctcctcaagtaattcataagtctcgttagcacttttcctcataagagccccatcagaagcaacatctatgagtgtgcgggtatttctagtcaacctattgtagaagttttggacctgcatccacttctcaatcttgtgatgggacacattctgatcaggtttttgaatctctctaaagctttataaagagactcattgtcgtgttggatgaaattgttgatctccaatctcaggctgataactttggctggaggaaataacttgaaaaggaacttcagatcgtggcagagacaccaacaaactcttcgctcattccctaagtgataatgggaacaagcctaagcgataatgggaacaaccccaagcgaataacatcatagctaactctattcatcttgaatgtttgacaaaactccacgaagttagctaaatgcatatttagatcttcttatggtatttccccaaattggactgtggattgatccatttgaagtatggctggcttaatttaaaaattattggcttctatggcatgtggtcttatacaagaccgaatgtctgtgaatgttggtaatataatccctcaggaaacaattaggtgaattacgaccattagccaaatcttctacgacacccccattcttgttgttattagccataaccgcttcttgttcaaccctttcaacaactctttctaacctcatgttttttctgttttgtatgcaggtcttctcaatctcaagatcaacatgcactcttgcactttgtccttgacgtcgcataaaccaaaagtatctgaaataagataagaagaatttaagaaaaataaatttgcaagaagtagaaaaagaaactaaagtagaatttaatctaattattataatatttatttaaactactccctaataacggtaccaaaaacttgttacgaaaattataaacttactcaagtgcacgtatcaagcagtctcacacaggtgaggtcaaattatagggaattgaaattgaataccattaaattaaatttatatttatatttggttaatcgaaataa

SEQ ID NO: 78738 - DNA, 905 bp, Cannabis sativa
ttgcttaatgaattgggattatatcatgcaattccaatttgcaaccatattgatataatgaaagatacccaaaatttgctaaatgactctaattaattatggagtctcgtattaataatttttaaaaaatattattaatcaatcacttttactatatttatccatatattataatcattcttactatatttatttaattttgtgggattttttttattattatagtctataattattaaattaaaaaaaattaaatttaatttttttaaaaaaacaaatacttttattagtagggctatagactccatattaacataagtaggttcgtccctgaccacatatagaaagtgttactagtcctgaatataacaattctccccaaaatatgattatttcattgtgtttcttaatttaatttcggtagaagttattaattagacactttattttataaaatgatatattagacttgaaatttttaaaataacactaaatagtactttgaagtattttttttctcaaaatataacttaataatgacttggtatagaagtgttatgaaaaaactgattacgttttctacattagttcacgattaaaattatctttaagttggttatattatatataaaaaagattgtcaaaaatttaactcagtgttttgtactattttaaaaagtacagaattttaacaaaacagatagttcaattagtaatttttgtaaaatactgagttcgaaatgatattaatccattaaaataattagagtttctcgttattaaaatttataggtacaagagattgtctgtttttctctatttttcttaaggcattggttaaacttggtcgtgcataatgcttaagctattgttgtatagttaatgctggacatataaaagaacaa

SEQ ID NO: 78739 - DNA, 1429 bp, Cannabis sativa
  modified_base (1394)..(1399): a, c, t, g, unknown or other
aattacccttaaaataataaattaatttttttttcttttgagaggaaatgaaaatattcattaatagttaatcggtaaattaaacaaaattcattacatcaaatatatagttcaaagagaaaaattataaaaaaattaggcataccaaatcatttaggacaaaataaaaaaaaaataaaaaaaaaaaaaaatcttaataacaacctgatctcaataaactacaagcagtcaagcattaaaaaagtatgaagtatactaattaagcttccaaacctattcaattatcaataattatagttaatgatcttctaaaaaattttaaacataaattaatttttgtatatgataaaatatactatattattctaattattttggaatatttgtttattttattttacaagtatagtaaattatatttttgacagcataaattatatttaaaatataattttctaactcttatgccctaagtacataaatgtttgtcttgtcccatacatataaatacatatatatttttaaaaaatatacatcttattaattattaatatattttttaatgaaaataatatcttattaattattattaatgtttttttttttttggaataatcttataatttttattttatttttttactaatgaaaagggatcacttggtgcaaatcccttttccactccttcgatcctttctgataatttcggagactacgtgtcagctataggagccttatacctcaacttaccttaattgggttatcggtggtcaccttaagggttcccggcacagatggcaccacctccaacaaagatcaagtagttctttaatctcactcatgagggattggggtggatttcgaactcttgacccaaacaaaggaagatgttagtaaaagtaattcctatcactacaccacataaacgtggtaataatcttataattattaatgttgactatctaatatatatacaactaatgcattgtttaaaataaataatattgttattaagtattagagttaacactttagggttagttagcaatattcttaaaaaattatcttatattatataaaaaaataatatttaattataccaataataatataatagcacatgcactttttacaatttctctaaaaaaacaaaaataataataataataaaaggtaatgaaacccaagaccacgtgagctggttcttttcggtccaaccatgtgcaaacacgtatcttaacaatcaaaagtcaacactttttacggataaggacgaatcaaaagtcaacttcccatgtggtatcattctataatatatatcctcatagtttttaaatccgatcgaatattggacaaatatagggctcgtttggaacgccgtattaagtcgtatnnnnnngtattgtattatattgaattgagttatata

SEQ ID NO: 78740 - DNA, 583 bp, Cannabis sativa
atatttgataaatagaacaccaacgcccctattggaaaacaaaactccatatgaagttttatttggaaaagaaccaaattatcatcatcttcgatcctttggttatcttgcttttgcttctactttaatggctcataggactaaattttctcctagagcccgagtatgtgttttataggataccctcaaggtgtcaaaggatataagctttttgatttaaataccaatcaattttttatttcaagaaatgttgtgtttcatgaaaatatttttccttttcataaacttaacactaatgacagcaatattgatccttttacacaaattgttctgccacattctacaattaatgacacctctatttgtgagtatcctacagattctaccaaatattcaccagctatcccacatgtgcacgatctgcatgaacagaatttggaagaacaaccaaattccccaactgctattgttgcagaaagctgagatactgctgctcacaatcagtccactgctgctgcagaacctcgggacactgctactcaaaataatacaacaacagaaggctcttcacaagaggcaccta

SEQ ID NO: 78741 - DNA, 1124 bp, Cannabis sativa
atcctttcattgcatatattattgatatgattacagtttgttttccgcatttcatatcatttgtatatgctatactacatacactacattatagtctaacatggtcaggtaaagaaagtgttaaaaatgtgtattactaagttatcttgatggcactaagggacaagttatgggttaaacatagacctagtattaaaactattaacaattaggcatgtcaaaaagatccatttagttggagcgggttggagttccgtttcgaaacattcagatacttattggatcttgcatcagatccgctccgccccgcctaatttttttctggatcagatctgatccaacccgatttaaatttattttaaaaaaacttaattcaagacttagaccccagactcggatcccttgggacctagactcggacccagacccgagacccggacccggaacccagacctgggacctaggagcgggaacgggacccaaaccctaactcgacacccggacccgtaccttgacccagacccggacccggacccagaccgggacccaaacccagacccggactcgaacccgaactcagacttgggacctgggacctagacccagactgagatccggactccgacccgggacccaaacttagaccgggacccaaactcggacttgggactcgggactcaggacccgagacccaaacccgaacccagacccggactaggacccaggacccgggaccaggactgggacccggacccaaacctggatcgagaccagtgatcggaccccagaccctaaaccaggaccgaacccgagacccgagactaggaccgggaccgagacctgggaccgggaccgagactcggaccctgacttaggacttggacccagatcgggaccgggacccaaactcaaacctaagacccaaactcggatccggaccggggactcgggacccagactgggacccgatctaaacctggacccaaaccctgactcgggacccggaccctgacccggacccaggaccctaacctgggcctagactcgaatttggacccaaacttgcatccaaacccagacccgacccagagtcaagaccctgactcggacccaaactcggaccc

SEQ ID NO: 78742 - DNA, 752 bp, Cannabis sativa
aaagattgatctgtagtaactgtagaaactggaagtgtagaataagagttactattttatacacaaatttaatttttttttacttttttagtttttactaactactgatataaatgaatcagaaatgattgctaaaatagttaattaagaagtttttcactttcttttaaaccaattttttgaaaaacattgtgaagtggtaatggtctaactagcaaataaaccaaataaatattattaaagattataaataaatactttaaaaagaaagatgacacttattattctatttataaaggaaagtaataattgtatatgattttgttagtgctgctatagacaaaatatattttattttcttcaaattttactttgacttttttaaaagagctaccatgtaataattattaaaaaagttcaattacaatatactaaattttaagacttagaattacatatacttctggtagaagtccatagccgcaatccatctcaagataatctgaaacttgaggccgatatacttctcgaattggaagagattaggaatagagaacaggaaattcagaagtagaaatctcaggagttgtggctgaaagacggagaccgcaatactagatttttccatgcctccacaattatccgtcggagacgtaattttatgggagcgatctctaataaaggggtcaactagattacaggccgcgagaacattgggcagtaattctgtaacagattcctggatgtgttct

SEQ ID NO: 78743 - DNA, 2156 bp, Cannabis sativa
acaaatagaccattttcagaaagattcttctttacagtctgtagaaatgagtgttctacaaaatccgcagccgggcaagtcataccagagctatatgcaaaacaacaaatagtctcttttagatatatgcctttgtatttcaatctcaacacatgtaatatattcaccttgaatctgcagagtcaacatcaataatgattatgtccacctttgtattattcacaccgccttttccatgagatgtcgtgcaaattccattagaagcagcatcatcatttccagaattagaaaccacattactgtctctaataaattggataccatctgcaatatgtacctgataaaccaaattgaagctagaattggttgatatagtacaaattgtagaattttaagatatgaatgatataatgagtatggaaaattcaacagccaattatgattgcagcaaagtcaaactaaagtttcagttatctatcattccaacttaactacagtgatcagaaatcgagtttcggtcccaaattttaacccactagagacagttatggtgtagtcaaaaagtactaaaaatggtccaaattgtttcttttagcatcaatgactttttacagtacaaaatggggcactggtagtaatcgtgaatcgccattatttgattagtgaatttacctgcaaatgttcctcttcggtaaaaccaaagtagccctttgcaagatcaagaaccactggatctaactccaccaccttataagccataaagcacaaaaccatattatcaccgcttataattattataatggaagattggttcgggatgtaaagctgaagattacctcaacgtgcaaaaagggcatgcatccatgaaggaacataggaagcaaaccggctccaagaccaataataactgctttagcctaaaaacaattttcagaatttagtgaaaaataaactcttgaatagatctaatgtaaatgccatgaaagatacaaaccaaaccactgtcattttccttacacagttacaaaaataacaaagaaataacaaagtgttgtcgatcaatcaatctagttataagagttgcctactaacaaaacaaaagatgtagcaattacaaataataaataatcaacataaaacacctttttttcttgatatgaagtgagtatataaatttccaacaattcctcttaacaaagacaaagtgagctcagaagtgcttactgatgtgttactagatgccacactttccatgtaagaagaaatcaacacaaatccagaaagaatcccggtatgataagaactagccagatagccatgataaaccttcagctggttgaatgattctaccaataaagaaacagaaagattcatacttaagactttgaagctactttacaaatgagaataattagctaagcaaatgagtgacaagagcagagaaaaaaattgacatggaatttctcaatcatggatttttcctcttattgtcaatatataatatttctataatggtttagctttggaatactatttgtgagcacggatcatctttctttcggcaacactaaacttagaaataagactaaataaggaataatcgcaatagctgaaattgacttatcaccacaaagtcaaagaatacacctttaagatgaaataaagcatatgtttttcttatcagagtactaggagacaacagaaacaaagagcatggaagtgttcaaacattttaaaagactagagagtaattcatgaatttcgaaaaacgcaagaacaaagagaacaatcctgtctacaatggaagaaaactcaagtaaaaaaagcataatcaaattataagaaatatggtcataccaccagtttttctctgagttcctcttttcttagatttggaagatgagacgggtttcttcctttcactgtcaccaacagttttatgagaactttcctttgttagtaaagcttcagactgcactagactctcacttctttgaaaaacaagacgtcgaaatatcaaatctttggttggaaaaatgcgactaacatcatcatcgacattttcatataccacatcctcaacaattattggcccagtgaatgaagatgtgacctacagatgttggcaggcaactgagatgatatgaaaatgacat

SEQ ID NO: 78744 - DNA, 579 bp, Cannabis sativa
aacaatacagacctaggtatttttcatggcacagaactctactaaccccccaaagtgaagccataacctcctcatcctctatcatagatagaaattttagccaaatttactaactggcctaacactctctcacaccaaccaaaaatttctttgaaccggacacaactatctcaggaagcttccaagaagaagaaactatatgctttataaacatgtccttgaagaactcccaaaacagccttataaatatcaggaccaaccacatttcagtatttctgataaaaaccaactctcatcccattaatttttgagctcttaaggattcgtctggaaaagagcaaatttgacatccaattttttaatggcacaagaagaaaaccaaccatatctgtcaaaactttagcaaggaccagattgagaacccgattcatatcatctgccgagggattatccaaagtaaataagtattcaaaataattaataaattcttgcttcacacccttgttagacttttatttgggcttacattaaattttattggttttattaaaacttgggttgattggatagttctttgct

SEQ ID NO: 78745 - DNA, 619 bp, Cannabis sativa
atccgtaaggagaaatactaagtaagttatgcaatcccacatcgtctagggaaagtcaagtgtaatatgcttctaaaactgtgtaggtatagtactacatagttgaagatggcttaaatagattgattggtactacctatatcaaaaagatcttgttttttggtagcccatcatgaaaaaactccatagttaagcgtgcttgcttgacctggggttatttcaggatgggtgacctcctaggaagttttcccaagaagcgtgcgagtgaggacaaagcatgctagaaacactcatgttggtttgtagggtcagtcatcactccatgaagtagccaaatgttatgtacccatgaataagagtcatcattctgtgggtgtaaaaggctcaatggaggcttgaagtggggacgttgcaatatgatactagagccttgacccagccggaggtgtggtcgatgaggacgtcggacccttaagaggggatgattgtgacagtcattagtctcgtgatccgtaaggggaaatactgagtgtgatgattctaaagttatgtagatatagtactacatagttgaagaggactcaaatggattgattggtactacctatatcaacaaggt

SEQ ID NO: 78746 - DNA, 600 bp, Cannabis sativa
cctggagcaatctagcaaagcatgttgaatagtctcattttccatcttacaaacaggacacaatggagaatcaattacacattttttaaacaaagaaaaagcaaccgggattgcatgggataacaaacgccagataaagagcttaaccttaggaggagcaggagaagaccatactcttttccaaaactttttagaatcagaaaaagaagaagaagaagggagatcttgattagaaaaggccaaatgataggcagactttacagtaaaacacccagaactctctttttcccaaatttgcttgtcatgaccataatgaccagaaatagggacagcaaggatgtctttgaccatggactcatcaaagcaagattgtaattttcccacatcccaggtgcccgagtcagagataaaaaaagagagtaagtgggaagaagggggagggttatttgaagtaaaaaacttaaacctattgatgggagccagtgatcacccagtgttttaatcccagacccattacccactttccaaattagcccagatgccatcaggtccctaccccgtaaaatgcttcgccaagaaaacgaaggactgtgaccaggg

SEQ ID NO: 78747 - DNA, 808 bp, Cannabis sativa
aattgttaattatatcttttaaataaagtaaaaaatacctaacataaaattagtatacgtgtctcgcacgtaactttttactagtaaacaaaaggaagccaaccaaaacaaaagctctgcataaaagaaaaaaaaatggtttgaaacattaactcaattaattctgtaaaataattcaaattgcataaactaatatttcttaaatttaatatacaaatagatttgcaaaaaattgatattaagatcccgatcaacccaaattatgtgtaatcgacaaaatattaatagctaatattatacttgttgcaattaatgttgttttccaaaatttcaatgctgaatttattcaattccaacgaataattcaaatttgcattcatctcacccaataaacttggcaacattattttgtaacttttgtttttatgtgattgcattacagttggccttcagttttattaatgctccgatataattaacgtatcaataattacgaactgataatgcaagaatatatatataattttagtcttatttgcaagtatttcatagtgacaatccaacacaagggatctcataaaaaaaacaaattctaatatggtcagttttttttttatatttaaatattggttgagttcacgttggtttatagagttctcactgttcttttttaacaaaatattcttaatgtataagtcactgttcatcaatgcaataaaactttgttaaaatttttcttaaccatgtccaaacacatattgttcatacatagttgggcctacattgtttatcagtgcctaacagttct

SEQ ID NO: 78748 - DNA, 582 bp, Cannabis sativa
tattaaaatttgaaattacagaattaagtacaattaaaatgataattgaaaggatttagcttaaaaaaaacttttaactcttttacgatgaagagtaatcatatacgcaatttttttacacaatcacatacgtaattttaaattacctggaattattaatttaccaatgaagaattttttagtctagttttttctcatattcaggtacgttatagctatttaaaatatcgtacaaatttttgaaaaatttggaataatttacaatatagaaaataatgttcaaaccgtctatttttcgaatttataaaatttttgcaggatgtcttaaataactataacgtacttgaatatgagaaaaaatttaactaaaaaataatttcgaatactaaaattaatagaaatgtatagatacatcccttttaagagttgatggtagaatttttcaatacaatgcacccccttaaaaaggatgtaccggtgcaccctctatttgtttcgccatatagaaaaaaaatttagtctatttttttttcatattcatgtacgttattgctatttaagatatcctacaaaattttaaga

SEQ ID NO: 78749 - DNA, 648 bp, Cannabis sativa
ataggaaccaagataaattgatcagaaaagtaatatcagttgaagttgaagaaatgtccaaacagttcaactaaggtcaaaatttaagacaataacaaaatcacaagaaactgcagacaaaaattcttcaagcagcgaggctggcatagttaaatggcctagaaagcgtcgttttcatcagttagtataattcaatggttataaataatttccaatcaagtaattatagtggaaagtgattacaaaagatataatagtgcaggaccttcaggttacgataaatatcagctgcaagagactcaaaattaatagtagtcaaagagtatgaatccttgataagagaacaaactccatactcaaaatcacattattgttagagtaacaatcagatgaaaactagacgatcttttgacacagtagaccatgatcagggtacccttttaagccattatgtcttgctacaaccgaagatactacagctacatttacatttacaaggaagaacattgcaacttttcaaagccacaagggattagttgaagcattaattcctataacttcatacaagtcaacctccaaggcacctactaccaactattagaaaatatattgttaggaaattgaaaagagcaagaaactatttttcca

SEQ ID NO: 78750 - DNA, 513 bp, Cannabis sativa
tgcattttaaattgagtttttttccggttaaatcttttaaaatattattttagtagtaaaatccttcaaaccacataactattagcaaatttaaagtgttatttatttttcacagttaactgctaatttggattacttatgtgtacacttttataaacgtcgtacatttttattgatacatttaatattattatttaaaaattataatatatttttaaattttaaattttattgcatggttttgcactccgcatgccatttgatagtgtagcgttgattctacagaataaggatcttgatcgatgccacaatttatagttaaacttttatcaaggcttctagtaatcgtttatttcttagaaactgtgatagaatgtaacgatgattgtgtctgcattgagtgttacttttagggtgtctctgttgaaattttctcagtcttgtatcaagcaacgttattcttacaaagactggtaaattctttccttctgtgatgggttaaagcaagtctaa

SEQ ID NO: 78751 - DNA, 749 bp, Cannabis sativa
  modified_base (379)..(387): a, c, t, g, unknown or other
gatattattttgtgcacacttctatttttacaagcatgaaaattgattagtgtgattttctaataatttttgttctaatagaatattttttttaagaaaattaaattatttgttcttattatatattaaaaagttgtgattaaatttttaaaattccacaaattaatatttataattgagagtactaaatatattttaattttatttaaatagtaaattataaaaggtagaaaatattttttaagaaagtatatgaaaagaaagttggggaatttatcatttggaaaagaaggcggtgtaaacggaaaaaaaatggtaaataccattttagactatgtgttttgtaaaagttactaattggactatttgttttgttaannnnnnnnntagaccttatattttttaaaatagtaaaaacaggacactgaggtcaattttcaacaattttattttttaatataagtaactttaaacaatttctaacacgaacagatacagaaaatgtaactagttttatcataatatctctaaatcagattattattaagttttattttgacaaaaaatcaatttaggattctattgtataattttagaaaatatagagtttattttgtcatttaataaaataaaaggtttaatttataacttttgcaaaatataataaaaaaatataggtgtacataggagaagccattcataatttgtttttgatagaaattatgtttaattttgtagaaacgaagccg

SEQ ID NO: 78752 - DNA, 1668 bp, Cannabis sativa
cttatattattaatttattttctcccgcttatttttggctgtaaaacacattatattatttaattatttatcttttgtatttggaaccaaggttgtgtacttatatactcaccttgtaatattcactcactaattcctcactctccacaaccgtacatggctgccatggctgcctccacaaccacccaactactcttcttcctcttcttgttcttgtccgttgtactacttccattaggttccagcgtcggtgtgaactacggtaccctcggcaacaacctcccctccccaaagcgagtagcccatctcctccaagccacactcatcgacaaggtcaaaatctacgacaccaaccccgaaatcctcaacgccttttcaaacacagctatcgacctcattgtcgcagtcgagaaccagcacgtcttcaatctcagctccgatacttccttcgccgaccaatggttcaccactcgcctcgctcctttcatccccgccacctctgtagtcgccattgtagttggaaacgaatacctaactaccaccgacgacggcgtacccgatccagcctccctcctccgtgcgatcaagaatcttcactccgttctcgtttcccgaggcctcaataggaagatcaaagtcacaactcctcacagcatggccgtactcgcctcctccttcccgccttcgtcttccaccttcgccccaaacctagctcagtcaatggagtctctgctcgatttcttggccgatactaactcccctttcatggtcaatgcgtatccatacttcgcttaccgagacaacccggagaccgtggatctacagtacgcactgctcggaaactcaagcggcggcggcgttcgcgatcccaaaggctatatatactacaacatgttggatgctcaaattgacgccgtcagatcggccattaacgctttaggattcgggaaccgtacgatcaaaatcacagtatcggagtctggttggccgtcgaagggagacgccggagatatagcggcgacgaaggagaacgcgaagatttacaacacgagattgatcgagcgagctcagtcgagcaaggggactccaatgaagccgagggacaaaatcgacattttcgtgtttgctctgttcaacgaaaacaagaagaaaggagggaccacagagaggaacttcgggatgtttaatggtgacgggtcgaaggtgtacgacatggatttgagctgtgagttttgtagtagtagcaatggagatgaaacggcgtcgtttggatttggtgagaaaatgaatactgagttgatgagaaggggtccttcggtttggtgtgtggcaaaaccacatgcaaacgacaaggttcttcagggcgttttggacttctgttgtgggcctggtggagtggactgtagagagatttataatgacagtgggccttgttttgagcccaacaagcttcttgctcatgcttcttatgccatgaattcttactatcaaatgcatggaaggaatttctggaattgtgacttcaagggcattggccttgttactttcagtgatccaagtaagtcgtaatatatttcatcaactatttttattatttattcaaatatgtttcgtatcattctttcatggaaaaaaaatcaacaaagaattatacttagcaagaaggaa

SEQ ID NO: 78753 - DNA, 875 bp, Cannabis sativa
ctagtctgattccctcctcttttccctttcgtttccctccttacttttcccctgctttaattgcttatgctctcttatcatttccttaccatcctatctaccatttattattgttcagagcgacaaagaggatcttttggatttgcatttaattttggctgctaatcctcttttatcgagtttcttttctctgcaggcactaatctttggctgttattaaccctgaaatcccatcatccatttaattcccgtcgttttttcttctttgggctctgtcagcagctctagttccccttccaggtgctgggctacgtttaggctccctcttccaggcttccctagcctagagatgaagcctttcttctccaggtattttgtttttttttgtctatttaaggtttcttcttcagtttatttctgcaaaacctttttattccctgcattcccttctcttttatattgctgtctttacctaccaaccactagcaatggaccttacctctcaaccccaacaacacacctctgcctatactgatgaagaaactcttgttcatgaatttgacaacatctccgttcaccatgattccactccccaatcctactgtttggttgccaaaatcctctcccccaaaattatcaagtctgactgggttgctaaagccatgaaggaagcctggatggttcgctgccccttttccttttctgaatatcattcaggaatgttcctcattcgttttggctgtgaaggtgaccgccgacgagtcatggaaggccagccatggcactttgaccacaaccttatcctcttagccatcccagacgcttttgatactattgttccctcccaagttagctatgtcccactttgggtccaa

SEQ ID NO: 78754 - DNA, 931 bp, Cannabis sativa
  modified_base (55)..(56): a, c, t, g, unknown or other
  modified_base (889)..(891): a, c, t, g, unknown or other
tatgtgtttagttcatcgttttagaagttcaattttaggttgttaaatcaacatnnttgtgagtagatctaagttcctgataaaatatatttccaacaaggtaccctttcaatttctcactcatccaatcgcctgatgcctcttgggacgtacagaagcatcttcttcttatgaaaggtgccccttcaaggcatcccataaataccttcaacaaccattccattttttcactattcttccccgccaagccaaaactcttgagttttaagtcttctcctgttgtgtgagacttcatcaccattacagttagacacagtgtccttcatcgtggatgttgcaccaaaactgtcaacccccacattctcttgcaattggtaagttttctttttggttgattcattgtagaattttgaggggattgtgaggatgccttggcttctagaacactggttccacgcccatcgtcgaaggttctgggatcatgccacgcactgacctgttttgttattgtatcgacctctggcaggtacagtaagtctgccatggaaggagcgggtccttctgaagctgcgagcggcagttcagccaggaaaaggtagaagcttgtggtatctgcccccgggatgggagcctttccccaatgtcgcgatcctcaattgaggttgggccagccccgatcttcttaccccttggccctatcaagggtcccttcaatggggttcactttccccatgaaagtgactcctttcaaacctctcaatatgcagaaggagagggaggcgaatagggccttgaagagacgcttggaggtcgaaaggctacaagtttgcaggatttaaacctctcaatatggcggttgtgctgtcaactgttgggttttgtgccctannnaaaacccatttcaatataatcagacttactaattaataaa

SEQ ID NO: 78755 - DNA, 562 bp, Cannabis sativa
ttatattatacattatatataattataaaaagttagtaaacataaataaagtagtaataaaataaataaaattttttagctcactttctctccatagctacatgcatagatgcattttattgaaatttgttcaaatttattatagctgagctataaagattttgagctaaaatttttaacttttagctgggagtgctcttatacacatactatattaataatcatttctaataatactatttacaatttctcatttataatatttatggagaggaagagcaccaaccatttgaagagactatatattattaacaaatatataatttaattaacaaaattaagatcaaccccatattgtttatgagatcaaaaaatttgttcatgttttcttttgtccacttcattttttaatttcattttattattcttagtgccaaatttcacttctaatatattttttctcctataacaaaagaaaaagaaaaagataggttatgttcaataggataggcagtgggagtgactattggttttgactgggggttgtgtaatgttggggatg

SEQ ID NO: 78756 - DNA, 625 bp, Cannabis sativa
attttaattgtatatgtttattaaaccattttaattgtatatgcttacttactatatacaaatattaaaaacaaaaaaattgataaattttttaccaaaaaaaataccatctttcaagcctagctagtcgccacccatggattgagatgggccaatgcatgtatgtaggcggcccacaaaaattagggtttcgatgaacaaagataagtcctataaatacctctctcgcctcaaagaccatcataaactaatacatcacggcaattcgataatccagatcttttttctttttttagatcttagctgatattgatcttgaaatattttctattatgttagcgtctattaaactgattgccagcgctgtttgcatttgctgtgagcgctgagtatgagcagacgccatagttgatccgtttctgcgaatcgtagaggcctttggtggccgcaaggaattcatcgcctctctccttttcgtcgtttcgggcaaattttctttcatttttatacatttttatatatgcttattgtttagttggaagtgatgactttttccccagatgatcgaagctgattatactgagcgcactattattctccttgagagaatcaagccaattttctg

SEQ ID NO: 78757 - DNA, 561 bp, Cannabis sativa
gaccaatcgaaaccccgggtgccggtgacctcagccctcaagcaatgtcgcttctttcactgccgttagctcgggatcgcaagccaaagtttggcggttcaaactttgaacagatttccggccacctccggtgtccgtttgacgagtcgtctttaccactagactcagctcgtcgaggagaacaacctacactaagctatctcaaccaactcgataatttttctggtgacatttttgtagctctgcccctttccaacgactttctagtgatatcgtgcactgttttgacaaacgattggcatgagtgtgatctactcatcgaggtggtcattttgatatacactactcctattttcagtgacgtttccgatacactaatttttactgccaccgatagttaatgtgcaccgcttaggtgaggcttcggaaccccaaattttaaatatagtcatattatatgttgttggactcaattttgaatgtagaatgcaatgatgataattatttagccatttgatggtataggtgagagtactatctaagatttgactaaacaattgg

SEQ ID NO: 78758 - DNA, 624 bp, Cannabis sativa
taatataggcttgttttttgataataggaaccagagaatgaactttatcgcaagtctttggaagtggctgctaaggtacactctactgttatgtactatgggaaactccttgtgctttttgttgttgacataggcgtttaaaaattttattctttacaactgatatgaaagtggaatggttatattttattcttgataggcattaattcttgtggatttaacagtggtactagaatgtagctgaagagaggtgatggtcatgtcttatcattttagaacatttggcatattgaattagatattgaggtcatagagtgtagggaaaattgaagatgtcttaatgtatacaagtgtggtagtacttttttttctccaaaggttcattttgaatgtttttgatctagtttttcttgtagatataggttgaattgttggacagggttgctgaatgttactggacagtaatttttcctgtccattatggcatgaaatgtcatagtttggaggcactttgtagggattaacgtttgtagtccattttgattccctagtcaacctttcctttggttataacaaggattaagattttatcttttaacactttcaaatatgtaggccttccat

SEQ ID NO: 78759 - DNA, 853 bp, Cannabis sativa
agtcatgaacgaggctgtcctcgtcatcgagagcggtaatggggttggggttggtggaagaggaagccattaaggtgtggtaggtaagtgtaactgggtttgcagcagggatcgaaaatgatgtgcaaacagaggtgaagaggacatataaataaacaaaaatggaaaggagcaagagagacgagtacctggagaagaagagtcgcctcgaagagaggattggcgtctgaaccatcatttcacagctgggagtgaaggtctggaatcgtcgcttaagagcaatgatggcttttggttgagagaggaaaagaagcaaaatgacggttggtttagagatataattacgattcgaaaatcgaagggagagaagattatgcagggaaattaaatgctgataagaaggagccgccagaattaaatgcaagtgtgagagagagatggcattaaacagtgaggatgctcgagaaattaggggaaaatacataatgattagggtgacgtatttaggaaacaaatccaagagtattaatgaggttgaacagaaccaaatcaaagtcagggggagggagaaatcaaagagaaaacagatggaacaataaatgcacaaacagaaagaaatcagaaagaagacatagagaaacgaaactaagaaggcacaaatctgggaacgaacggaactggaagtcagacacaacaaaccaatgttggtgcaaaatcagagcaaagcctgtaggaagctttaagaagaagatatgttataataatgttagggttgaaaaatactctttacaatcagtttttaattttagaattatattgaatattaagtagttggtgtgtttattaaaaaaaa

SEQ ID NO: 78760 - DNA, 1022 bp, Cannabis sativa
aaattaaccaccataaagtagcttccttttttttttttaaatgaaccaaagaaaggaaactaaaaacaagtacccacccacacacgatcatccaacaagttacgccttcttttttattaaaaagatttgcaacaaaaaaaaaatgaaacaaaaaaagcattattttatttattttttttccgaaaaagagaaataaataaaccgcaaaatagggaccactaagccctacacgatcaactcaaattaactttcccttttcttttaaaaaaaaatcaagattaaaaaggcaacaaagacaactacattatgacaaatatcatacataccatataaggataagttgatataaaaaaagacttgatgatcaagaatactttagaacaaataactaaatgtcaattttcaccaaatgctacaattaattcggcccactttaaaaatcatgattttattttatttttttatttcaaaataaacgagaatgacaaagtccctaaaaataataatacctatgttcaatgtgcattatcttgaaagaaataagacaagccaaaagaaaatagatgttagtgtatgatggagataaaagcacttgtcattttttaataatagaaagaattttcgagagaaacaagcgcaattcaatcacaatcacatattctttaagaaagtcaatcaacatgtaagagtcggacacacattttttcttaaataaacagtgtaatatttttcttgcaaattttaaagcatatttgtgtgatagtgtatgcaagggaacattacccatttgacaagaaagtctttttctaaatgtaaaaattgtaacctatgaagatgctgtcacactacaccagtggtagtcgttttctatggtagtgtatcctcttcataactgcgaattacaaagtaccaacttactcaaaagacaactttcacacactgatgtaggtagctctattcttacataggagcttgaaacaatgctgcataaaggatgctcaaacattaaccattgattgatt

SEQ ID NO: 78761 - DNA, 755 bp, Cannabis sativa
tgccttcaaaattaaatgcccatttgcatttcacttgtagcatctggaaagtaaaacaaaagaaaaacttattagactttaaagtatgaaatcattcatacatagctaatactattattaatcaagctcatatgagattttatatcaatttatatacatatgtaatgaaggcaaggaaataagcattatttgaattttcaataatggataataaaaagatgataatgaaaggaaagaaaaatatttgtacagtgttctgatcacctataatatagaattcaactcactagaaaacacaaaatgtgaaaaggtattaatatgtaattaacaagcattgatgcaacaaaatcaagtgtaattttctaaaaaaaaaaataatactatgagtaaatcaaagcaccaactatagttctatatttattgaaaaattaaatcttagaaagatgacacatatattccataataaaaatatgtcctgtgattatatgataaataaaattgagattttactatatgagaacatatttaaacaaataataccatcatgatagttgaaatcattatgaaaatactatcataaagtaaattataacatgtattaaattagttattaatcttatttagaaaaaaatactaatttttaagaaataaatagaaccagattataactattaaatacctcttggaataacctttttagaaggccatgcaactgtggaacaaacagcttcttgttggaatatttttaccaggat

SEQ ID NO: 78762 - DNA, 703 bp, Cannabis sativa
ttgcacctaccgagatttgtcggtgcctcaccctacagtaagctcccttcgcgcgcggaataggctgttctcgacaaccatggtttttcaacccaaaatcgattttttgggtgttttttcacccaatttcgattttttccattttcaaacactaatatcaatttaaaatattatttttaatcttttaacctaaatatcaatattttaaattaataatatttaatttatttgatagattattattaattttttagatattttgagatttagatttaaaaattgattatttttttctaaattatggtcagatttttaaaatttattaatttctataatatttatcattatttaataataatattagatatattgatattggtcacattttaaatgaaatgatagccgtatctttttaatttgaaatattatattaaaattatcttatatgataaaataaataattaataaatttgaaattaacatagatatttattatagatattctaaccataatatttttaaatttataaattagttattttgtgaaatatttaattttttataaattataagttagaaaaatgatattttaaatcattttatttatctaaaatttataaataatattttaatatttaaataacctatatatttttgtaaaaaattgaaaatggcttaatttaagatattttgacatataatt

SEQ ID NO: 78763 - DNA, 721 bp, Cannabis sativa
atagttcaggaggcatttttaatggtcttaaaagttcaagggacatgatttgctacatgtcaaagtttaaagggcaaaaatcctaattaacctttttaaaatagtttccagttacttttctcaaattttagacatatttttggaactagcttaacttttcgtattaacttttcttttttcctggagcttttatttttctcctatcttctcactttttttcaataattttttcactctttttccctttacccatcaatgaatctagggtttacattagaattttacatattattaaatgttgaatgatatgcaagtaataagttataagataatagactgagcttcaaaactaatcaaatttacatttcaacaataagtttgaaaaacacacaatataattgcattccaaaaaaaaaaaaaaaaacaaattaaaacttacagtactagtagttttgaagaagaatagggagagcaatgcagtgaagaaaagggaaaatataaggatgaaaagagaagctgatttagctgatttcacaaatggtcgccaaatggtctctatgaaattagtccacacccattgcatgctgtctttcatttttaactttcccacttcgatcttctcagttatatttatatctgaaatataacatacttatataataataataggagtgatgtctacggttcatatatatactagaaatgtgaaatagactataaa

SEQ ID NO: 78764 - DNA, 749 bp, Cannabis sativa
  modified_base (697)..(723): a, c, t, g, unknown or other
taaagtttgatgataatatgataaaaataattgtaatgaaaagtgtgtttggattagttattgtcaacatattttgttggtgtcaatataaaaagtttaggatattatgtatttgagaaaagtttaaactttgaggattaaattttttaatttatttattttattgtaaaagttatttttttattttttttgtattatctatttactgttatataaaattattctaaaatttaaaaattgagataggaaaaattacatgaaaatgtacaatttttctttgcctgcatttatccttcattttataactgacacaacaggtaaaaaaaatatttcagcaatttatgcgtcatttaaaaactgacggtataagtttttagtgtcagttttcaaattgttggtttcaaaatgaagagaattgttatttacgtcatttaagaaacgacgcaaataaaaaactatttatacgtcaattttgttaaaggaagaccatgaatctgcaataagaaagaagggacctcgcgatattaagaccaatgatgttagtgaaaatgtgcatacatatcgatcaacgagaataacagacaagcattcaatgccatcgtttcgataattttcataaccgttataattgttctaatttttacaagggagattatattcacactgttgggttttatgccataaataaaactcattnnnnnnnnnnnnnnnnnnnnnnnnnnnatagattagaaataacatttaatgtt

SEQ ID NO: 78765 - DNA, 784 bp, Cannabis sativa
aagaaataggttgatactctttagccattcttggtttttgtactttcggtacaacaccccattttagttattaaatggttccactgatgcatcgttatttatgatggcaaggcatacttggttgaccctttcacccacaatatcctaaaatatctagaaaaataaagcatgatatccatctggtcccagagctttagtggtgccaatggccttaacaacttgatggatgtcctccttagtaaacagttccattaaacactcattatcatcaacaaaaatacgtgaattaacaaattatgtaccacattggctttgctcatttattacgttagaaacttgaaaaatgtctgtaaaataccgctctacttcaccaataatctcttcctcaacacacaacctttggccagtttctatcataatattagtaatagcatttttctttttcctcactgatactttgttatgaaaatatttcgtgtttctatcatcagccatcatccactccgatcttgatctctatttctaataaagtttatctatattcataaggtcatccaatttaaattctagagttttcaccttatttattcgaatattaaaagcaataacgttcaaaagtttatttatctccttttgagttttcacaacttgcttaaacaaagaccccaatctacttattccaagtttaatgacaatttgtacaatattcaagatagtcacaaagtcccaaaggctctgtcacatctaacgtacacttttgctaagcctcaaacacaatgaatca

SEQ ID NO: 78766 - DNA, 700 bp, Cannabis sativa
  modified_base (238)..(238): a, c, t, g, unknown or other
  modified_base (315)..(328): a, c, t, g, unknown or other
aattttaaaaacaaaaaaaattactttcaatatttttttaaacagtttttttccttaattaatattttggagtgcgacatgactcagacccaaattctctcctacagcccttgtgctcaacccgacctctgacccagatttgaatttgaccgcagacctagacccgacttaaataaaataaaaaaatgaaaataaaaataaattttacagaacacacttttgttttttgtttttaaanttaaaaaataaaagtggttacagaacgcttttttatttttcaaaaacaaaaagtttaaaaacaaaaattttactttnnnnnnnnnnnnnnaaaattagaaaacaaaagtgttactaaacggcactataattttttaaccgtttaacaaaaataagttttaattagtagcaacatggtgaaattagaaataaaattaaagtaggataattatatatttttatattatttaataaaagttttaaattagatatagtaaaaatgtaaaatagtacataattgtattgaagtaataacttttatgaaataatgacattttattgtattcattgtactaaagtactttatacatagttgttttttttttgatgaaacacaaagctttattgaaaaccaaaaggcttaacagcccaagttcatagtggcaacaaagggtgacacttcccttgaagaaaagaacttgaa

SEQ ID NO: 78767 - DNA, 1027 bp, Cannabis sativa
aagagtgtaatcaatatgtgcattgtagggtgagaatggcagggttaaatttaaaatagaataaaaagaaaatttcaagttaattaaaaaggcgaggaaaatttcccaaaaatttaaaataattaccccattaaatcaattacaactcattatgagacatgaaaattattttgggtaattgcttccataacatctgagttcgaacaagttagtcacaagctgaaaaattgtaaaattaaggggcaattgtaagtggtcaaaataatcttgaaggtaaaaaagtataatcgaaaaagagcttataaaataaagcgacaagaatgttactaaaacacaccatctcagtagaaagaatggctgaacatgaaagatagagcttaaccagcttgtacagttaagcaaagcttgaggaactcgaagagcagaagcgaataggaaaacacgctaagacgagtgaagaataagtccacatggaccaatccgaacgaagaaaaggaaaggaaccaatagtttataggaaattacatcattcaaaagagagacgaatttttgttcacaccagactagttaaaattccatcggaatatatcctcaaaacattttgagctcaaaaaataggagagtgatgagaggaactaagagaaaattgtgtgaactgacaaagcaaatgtaattagattcaaattcagtgtaaaaaattcaatgtcatagtataaatttgttgatgaactaatttttagcatcaacattgtagagcaatattttcttttaatgaattactaacttacataatttttttttaaaaaaaaaacttatcttaaatgttttatctaatctacactattaggaaatacaaatttgactgattgtatgaattaaaatttaaaatataaaatttggacttcctgtaatgcagaaagctaaaagtagaatagtacatggataatttttctgttgtttttagatatttcaaataattaaaaacaattttccccgtctctcgtgtaaaaagctctaggagttgatt

SEQ ID NO: 78768 - DNA, 640 bp, Cannabis sativa
atcagaacaacaaaagaatacatctcttcaatacagaaaaatttcttttcttcaaaaattgctattgaatttctcagagcaattgtattggggagtaatagagcgatatcgttcggtcttcaacgattcgtacaaaggttgttttcttctggagatgtcgtggttgctaggctgccgtgcacactttaagcagagctccgaaacgtcttaaaaaaagcgacatagtccacaacttaaccagaatcttcatccgacgattcattctagttttatttttttaattcagaataataattttaaaatggtgtgttctgctatggctgctactgataatttttctaattctgctactaacgttattaacaagtctttccgttttgaaagattgcatctcttcaacacagaaaatttcttctcttcaaaaacatatatcgaatttctcaaagcaattttattggagtgtaatagagcgatattgttcggtgcataacaatttgtacatatgatgttttatcctagggacgtcgtggttgctagactgtcatgcacacttcgagcagaactacgaaacatcttaaaaaaaagcaacttagtctgcaactcagacaaaatcttcattcagtaattcgttaaaaaatct

SEQ ID NO: 78769 - DNA, 2944 bp, Cannabis sativa
  modified_base (71)..(73): a, c, t, g, unknown or other
ttaaaattcaaaccgccaccaaattcaaaccgtattttttttttgtggtgtggtgcggtgcgggcggtttnnncggtttgatgaacacccctagtcaccggtctgttgctcctttccttcgttggtctgctggtctggtggacttctttcgtggcctctgaatagagagagggagggagggttgggaagggtattaaggtcggggtggaactgggaagggaagggaaatgttttatttttagggtttcacttttgggtttagggatgatgaaaggtatataaatacatattttttttaatatggaaattaggtttcagtgggttccatgtgtaacccggttacaaaaccgtgaaatatgactaatctgaacccaacccaattagtaaccaggttacacccgaacctgcccagtaaatcttaaaacttactttttagggtttcacaagtttgagtcggtcgagtttcacgagtgggtgggtttttgagtacaatttatctgccctaagaacaacactttgaaagtccatctcaaaccaaatattatccaacccaaaaaaaatgacactgattcaaagcattgcgaaaaaccatcgcttcagccacctcgagagcaaaccatcctttaatacgccaagcaccgaaagcaatcacttgctccgaagtgtcccaaattaccaatctcaaaccacaaaaacccctcctagcatcaacaacaacaactatattaaccttataccaacctatcagtggtggcagccaacaagggtgagccaccgtactagaaagtcaaggactctccaccgtgatgcaaaaagaaacaccacttggctgattagcacgttgaaaagcatctaggaagtccatagtccaagtgaccactagatcatgagtaagagtagaattattatgaataaacatatttctaataaaccaaattctctacaaaataagcaaaattaactcaagatgtggaatgaagagtttatccaaaactcgcaacacaagtctgtaaaaatcatagaaactcaatgatgggtcacccaaagaagtacgagaaagtttcctgattgccaataaactagagcacctccataaagcatgatgagttgcttccattttagctgagcataaaggataaatcccattagaatgcacacactgcttattaagattagccatggtaggaatctaactagacgaagctctccaagctaacatcttaaccttaggaggaatagataaactccaaaatttcttccaccaccctacgggcccactagaagaaggactactcaaactcaaattacaaatagccaaccgataaccacttttaacaaagtacaacctagaagaatccaaactccaaattaacttatccttagaagcgtgattaggccaaatgatagaaataatagctttggcctcatcaacaaaatagttttccaaactccaaagcatgtttgtgtttaccttaatcgtgtcgtgtcataaacgtgttgacatgaacacgatacaataacacgcattgtcagccctatttttcctaaaaaaaactcgttgtcatgccattcccaggacttttagaatgatccatttcaaataaaatactttggacatcaatatcaaaaaaaaaataaaggcctaaccaattacgcataataggagaaattttacaaggaaccgcaaaaactttatccatagccatagaagaaggattatcagaagtgaaaagagaaaaaaaataatcatcaaatactagtcacttcctccccatctctggagaaaattttagaaatctcaatcctagcattttgagaagaaatacacttgtgaaaataaacagaatttcggtcctcaagcttcaaccaactagtattagcccgcgaggcccaatgcttctcctctttctcattaagagtatcaagctctttctctaaatgatgaagtccatcacaactaactgcagacaagtcaacatccacgataacaagctcttattaatagctgtttgacgacgatgaaccacacggttccaggtatcaagctttgaagtcacgacctctgcattcaagaaaatattaataatagggtttgtgtctctgttcatcattaataacctttacacattcctcctcaattgcctaagaatttttaaaataaaagcgagatttaaattgaacatggtttccccacaaggccataccactgcaaacataaaaataggcttatgatcagaacccgtaaattcaagattaagcatattagagttaggaaaataattagacaaactcgcactatagatgatcaagcctttcttgtacaatagcaggatcacgatgcttattataccaggtaaactttggcctcgaaaaatccaaatcagtgagaaagcaatcagcaagagcaggaaaattatttaacaaataccgcttaactaaccccctttcttttacatcattaaaaagaatttcattccaatcaccaccgagaagccaatgtatgaattatataagtaattattctcaacaaagtccaaaagtgaactcaaagagaagcatcgtaatgaccataaacactcttacaccgccaaggaacaaccctagaaacacaaattgaacatcaatatggccatgcaaaaacgccaataaagtaacatttaaaccaataccccaaaatgaacacaaaccaccactttttcccaacttctcaacaactaacttacccataaaattcaaacgaacacggagaagtttcatttgagattgagaaccgatagtttccaaaagaaacaaaatgtccaatttaaccttccaaatattagcgtgaagagttcaaaatgtcctatcattattcatgcttaaaacattgggcttttttcagttttaaccaaaaaaagtaacaatattacaaaaatactttcagctggccaaataaacaaatata

SEQ ID NO: 78770 - DNA, 538 bp, Cannabis sativa
tctattagcaaaggaattaagaaccaaagcctacaaaacacaaaaattggttccatttatccggatcaaagaatgcaactatgtcatctgagctcatcaatttaatatggtggtcaagatgtctattgtaatccccaaagcacaccaagctcgaggcttaacattttctatctattcggttaattaaatacgatagattaacaaaatattaggaagagtcgtcagagctacacaaaagaattcaaaaatagtttattttcataatttatattatatatcaattaatattgctttactatccatagaaacatcgccaatttattcaaaatgtcacagaaaaattaatattgttgctcttctttctgtcctcgcgggcaggaagcacactaactgccatgagtgattctactgtgtatataaataaatgacgatccaaccacttgcagatttaggaaaaacaaagaatgtcaaatagaaatttttcaccatgtcttcaataggtgacataatattcgaagtatccccttattaatcttaa

SEQ ID NO: 78771 - DNA, 1464 bp, Cannabis sativa
ttatacagatttctttgaacaacaactacaaccaagttatttcaatacatgtttgagccaatgctgtattcggcttctgtgcttgagaaagcaactgatttttgttttttcaaactctaactgatcagattaccaccaaagttaacataataactggaggtggattttctgtcatcaatggaactcgaccaatcggagtcacagtagctttcaatggtgggagtggtggatttgacaaattgaattccttcacctattgtccctataatgtatttcaatattctattacaagctagccaatgtttctttgttagagcttaaagaaattggcttagcttattaaccgaataagctatattaggcctgcttagtgtgaggtattgtagtgccctaataacactcctgttttgtttaacatcttcaaaaggttcactgtcattcaagtgcattttgttactctgaatcatgggagttagatatgtcttgacccctagcatgtgagtctttttaacgtgatgaagagaatatttggtttgatacaagtgtaatccttcttgctcactaattgtctcaaaaccaagaaaaaatgtgactaaacaaagagaattgagagcaaattgcatgtttagttgagagataatatgcagaacttgagaagtgttgttgctggtgagtaaaatatcatcaacataaataagcacataaagttgatcatcgccatgacagtaataaaagagggaattctccgagaaagagttttgaaaacaaagatgaaggaagaaagtgagaagagtatcaaaccatgcttgaggagctttcttaggtccataaatggctcgatcttgcaaacatagtgaggaaagttaggatgcgtgtaaccttcaagttgggtcatgtacacctcttcatctaacttaccaggaattgctaatgtcaatcgcttggacattccaatcattggagacaactaaggaaaggataactcaaatgatggagggtttgacaatgggactaaatgtctcaaagaaatctattctgcacattttttgaaagcctttagcaacaaggcgagatttgcatctttggacagtaccatctaagtcaaatttgaggtgaaagatccatctattatagacaacatgcatgtgatacaagaagggaacaaggttccatgttttgtattagattaaggcataaaaatttgtgtccatggcattttttcattcgagaagagcaagggaaacagtgatagagtcaggggtggtaagggataggtcaggtagttggggttcttttagaatggaagcaaggtaagtctttagtttaaatatgccagctttagagtgagtgatcattgggtaactaggtgcaggggtagttgaagaggatagtttggggtgatgaagaaaaaatttgtagatgaacttctagaggaatggcgggataggagcttactgtgcttgg

SEQ ID NO: 78772 - DNA, 934 bp, Cannabis sativa
gagactttgaagagaaaatatgatgtttgtgaatgagagggggcgaaattataataatatttcatttaaaagtgccttttgcaataaaagcaaataacaaggggctttcttcttattcttctaattaagatttttatcctaaattttagtatgtactaaatttttctccccaaactttataggccattgaaaatttgacccacactattaaaatttttgaattcaaagatttctgtctaattttattgatcgatgcctaatgtagatgaaagtttaaaggtacgtacacgggacacgatatataatcgtcacgttagtaaaattaaatggaagtgaatagaagtccttagaattcaacaatctcaatagtttaagaagaatttttaatatcttaaaaagtttgaggagcactattttgtacatatcaaaatttggggggcaaaaatcttaattaaccttattattttgaatgagttttgttacttaataaaatttataaaaatgtctataggccaagtctatagtacactctttaaagagattttttcgtagacctttatctgttatagcatttaaaaaagttttttggtctatttttttcatgaacatgattttttttttcttatatatgtggtaaataacggtttaagttttatttttggtactgtaactatttaattttttattgaaaatttacaagttcgtcctccaattattagtttataattatagttagtcaaaacatttgtttacccttctaattatctcatgattacttagttaatctataacttattatagatttggatccaactgttagcactctcagaattaacactataagggctcgtttggaatacagtattaggtcgtattgtattgtattatattgaattagattatatatcatatttttatataatactatgttaaa

SEQ ID NO: 78773 - DNA, 515 bp, Cannabis sativa
tgatgtaaaaagaaatacgagtttatcatgttcctgctgaaagccaacttgcagatttacttactaaactaatatctagttctaagtttctttttttgagagataaacttagcatggtttgttctaccaccctaagttcaaaagggactgttaaagatacttaggtatgctacaatttagtaagttagttagttacaagttgttagttttctattttgctcttacttcttgtcaactagctttctattagtggttgcttagtctttttcagctgattctcatgtatataaagccttgtattttcttctctgaaattaatgagaaaaacagagcattctttcatattgttcatcatttacaaacattaacagagacgcccagagagtatatgaagaacttctgatcagaattgatgttggacataaaggatatactataagagcaattctcttttttagaagggctcattccatttgggttgactataatctactatataaaatcctaatacgctt

SEQ ID NO: 78774 - DNA, 710 bp, Cannabis sativa
tatataggaattggattaggatggattgtgcatggagatgggcaggagatttttatgttgtgattttgtaaacaattgctctttccgaataatttccctaaatattagtattaaaataaaatctatggatgcgccgcgttgcttaaacgccacttctttaatttggtaaagctcacgcgcttttttatctttagaaaagtcagaagaatccatcctcccttccccctttctatcacggtcattttattctaattctatttattttaccttttctcttattaaaataataatggacgaataatttaggattacttggagtataaatgctttatgtttttaattttatatacttaaatattttttttacggattaagtatcttaaagttactatttaccaatttctatcatgactattccgattacatgttacactattatttatccatgacataatttattttaaaatatcttattcaataattttaaatagaaaaaattaattaaattttattttaatttatataaaattggaaaataaaagatcaatctgttagagattttattaccatgaaaaaaaaattaaaatgtattataattctattataaaataatatagtgattaaataaaaaattaattaaatatatattactacatacactatatatattgtatatactagtaaaaaactacgtgcgaggcacgtatact

SEQ ID NO: 78775 - DNA, 530 bp, Cannabis sativa
ccgatcatcaaataaaacttcttcggcctcatcatcccccccaatcaagactccttcctcctcatcatccaaacttatctgagtatattgctcattcaaatcaaaagtgtgttgaccactagaagccatgagaatcaagagacaacaaaacaaccttaaacacttgagagaacttttaccgacatgtcatacgacaagactaattattgtattaagatattaattttgactgcattaaaaaaaaaatggggtaaaagaattgatgagatacttttcatttgaaagttaataatcttcttataattgtgaagcatttaaatagttagataattacatattaaaattcttttaaaattaataagtaattttatatagtaaaatttatatggtgacaatacttgagtataatgtatatattaaatttgagcacgttattggtttacaagtatataagatactttagtttagcattagtgctatactatacaaagatatcaatattactctgttataggtacaattaacacaca

SEQ ID NO: 78776 - DNA, 1178 bp, Cannabis sativa
gagatgtagcatgggctttgccttcgcccttgtctttttgtccctatttagtccgcacgacttcagaaggctcctcttcaagagctaggtctttaggagctacatgcataggaagtgcatccagggaagacgctccaagaacctctttaagattcttgagtgccaactagaagtcactatcttcaccagacgctatacaagtggaaagaaaacccaagcacttaatgtcctatatccaaatgacaagtagggtatcggggaagggctccaccaaaattgcttgaagaggtccccaccggattcatcatctacaagatcactcttacgaagcaacctgctatggtgatgaatcggaaacccaaaacacaacagcagtgaaaaaccaagacttcctctttcacaaataaaagaaaatatatacataaagcagcaaagggggattttttctaaaactagtgtaaacccaaaatgctcgacctaaacatctagacccaaaatattctagataacaactattcatttcaacccaagctaaagggaaagtacctcagtagaggcctagctccagaggtattacgctgaagctcatgcagacaaatctcgcacatagcaaccctaattttcaagcttaaatcctacacatgcaagacaataaatttctgcgagctcgagactacatttgacaatcaaatcaggaaacgacagtttaagtggaagaaatacttacttgtagatggattaaaaggaacaaagctagtaattcttacttgtagacggattaaaaggaaaaaatgctagttgacttgtcgtcgtctgaaatttcacgggtcgcttgatgatctagtgacgccttgctctaacagtggatgtgttgtttgggtaggtgttgaacgttgagagatacagcgacgagatagagaagatgagattaggttttttggttcagaagggtgagtaggggcgaaggtttctaggttgaaggttttgtctgaagaaattctctaggcaagggattgtagcataaggtgaagaaggaaaagtgaattccattgacatgacttttatttatatgggtggcaacggttcaagcatctttaaaatatatggtccagatggaatcaattaaaagttacaccatccaacgattgaggattcaaaaggtttgcatttaatgcacc

SEQ ID NO: 78777 - DNA, 503 bp, Cannabis sativa
cccagccaagagacaaaagaaatgacccttggattccgaaagacaatgggaactcaagtaggaagtagataaggtgttggttaacgtatttatgcgcgaggcattttatccctcgtggatatccaaccctattctcatcccaaaacaaaatggaacttggagaacttgtatcgacttttcagacttgaataaggcgtgtccaaaggattactttccactacaaaggattgactagttagtggatgtaactgctggacatgagcttatgtcattcatggacacatactctggatataactagataaaaattcatgtccctaaccaagagcatacaagctttgtaaccaacatgggactttattaatataaagtcatgctgttttgtttgaaaaatgctggggcaacaaatcaatgacttgtgaatgaaatttttgcaagacaaataggaagaaacatggaagtctacgtcgatgatatgttagtgaagtcaataaagagtggag

SEQ ID NO: 78778 - DNA, 771 bp, Cannabis sativa
tctctctctctctctctcttatgaaggtggacggcgttaaagcttggtggttgacgggatgctcggtccgtgattgttagttgctcttttttttcattagttaatttgaactactctgggttctcggtttatgtttgtaatgatgttcatattttttgaatttttctaaatgttattttttgttataggtgttacgaattgttctttgtaaatttaatttttaataatagaaatgaatatataatttaacgtctgttattttttggttattatgaaaaataaatataaatttgcattaaatttattttattaattagttatgaaaataataatatatggatgtataaatataggaagaacatggaaggaaaaaaaataataaatgaaaaaacaaattatttaaatgcaattattattgtaattagataataattcatatacaataaattaatttaaatagattttttaatctacataatatttttccaacggttataaacattcatttaaaaagatttttcccaacagttataaaccgccatttaaaataacttttcccaacagttataaagttataaattgtcatttaaagtttaaagttccgcataaagttccgcattccgcatttttatttttatgacacccattatgacacccacatagccaacggttttaggaaccgtttggaaataggataaaagacacttataaatcgttgggaaaaggcgattttgtagttgttgcccctattttcgcccaaaatacgtggac

SEQ ID NO: 78779 - DNA, 1100 bp, Cannabis sativa
aacttataaaaaaaacacagtaaaaaagtaaaaaattctgcctgacagtatttttgtaaaaaaattacaaaagttagtataccatgtaaatttccctaattatttgacatttaacagctcattatttctaaaaattctaaaattataatataagtattacgtttaaaaacaaaatttaagtatctatttagaatcgagaaaataaagtaggagtccaattttttattaaaatgggtcaaacttacttcaaagcccaccaacaccaagaaaataaaggaaggagtccaatttttttttttttttaatatttgtaaaaaaaataataaatccacaagaaatagttgtggctgaggttgatcagcccagaaaatgcttggtttgttttagtgtatggtggttctgtgttactaaattcgattttaaattttttcatccccaattttctagcaaagcaaattattgaatattgatgcattgttgagaggtaaatgtagaaaatggttggtgttgttgttgagtactgattcattcaagtcttctctatcttgtttctcgctctaaaaagttttggtgagtatcctgaattaggaatttactcttactttcttgggagaagtaatctctctcaccgtctaattctattttgtactaatatcattattagtaacttcactgctgcccaaaatcaaaatgcttaatcaaaatgctcaactcactccaatgacaaattcttacctgacaatatctatggcaccgtcgcctgtactcccaaggtcgccacttttctccttgtctcccttaacgacatgtcgtttcgtaaagcctctgcgttgtgcgtcggtccaacaacaacaggtagattttgactgtttaagtttttctttaatgatgtaaatttattacatgaattacatatatttaatatcaagtcttacatattttaatttaataattaaataagaatttgctacccacttacaaggcgccacatatatatagaaatgttcgtgtttattgggttggattggtttttttgatatagtatagctgttatattctgacaatggtccagttattttaaaggttgaaggggggatttt

SEQ ID NO: 78780 - DNA, 840 bp, Cannabis sativa
atattgaaaaagtcttgaaagaccctccacacaaatgataaagagataaggtgagaggggatctccttgacgaataccacgacttggggtaacctgaccctgaattgagccatttatcaaaaatgaaaaggaaacattgttcaggcatcgctgtataagctcaacaaccgaaggagaaaatcctaaggcgatcatcatgctgcgaagaaaatgccactccactctgtcaaaggctttactcatgtctagcttcatggttgcataaccttcttttcctctttttagatgcttaagagagtgcaataactcaaatgcaaccaacacattgtcagtgatgagcctagattgcagaaaagcactttgagactccaatatgaccattgaaaggaaaggctttaaacggattacaatggactttgaaactagtttgtagagtacattgcacagacttatggggcgcaattgagacacattccttggctttttaactttaggaattaatgtgattaaagtcttgttgaaagcagatggatcagccccattgttgagaatctcaaggacagttttggtgaccaaatcacccacaatatgccaatagttgatgtagaacataatcgatattctatcaataccaagactactatcttcactcattgattttagtgcgatatagacatcctcgagagtgtatggtagggtcaagatgtcattcatatcaacagtaattttgcacggaactgaataaatgacatgttggagagcctccgaatcaataccttcagtagcataaatattgctaaaataatcctcaaccattctactaatgccttgaagagaaga

SEQ ID NO: 78781 - DNA, 3032 bp, Cannabis sativa
  modified_base (1144)..(1146): a, c, t, g, unknown or other
  modified_base (1327)..(1328): a, c, t, g, unknown or other
ttttttttattttttgaaattaagattcgttgcttcaaaatttgaagagctgattgcaaagcatgcacatacatatccagacgcaatgactggaaaagaagtaagggaattattaagggccaacagaactggctctttcttgaatggatggtatatatatatatagccttttatttatttatttattttcattttttttatataaaaattaattaattaattaattaattaattaaaaaaatgtgaaaatgaattgtagggtgggtgcaatggctgaatggcttgtgctatataatcttgctaaggacaagagaggattgcttacaaaggacacaattagagatgtttatgatggaagcttatttgaaagattggaaaaagaacattcttcttcaaaaaagaaacagtaatcatcatatatatcttcatagtattattaatatgtaataataatttttatatatatataaaaaatcatcagaattataatgtaatgttttaatttcttttatgtagttcttctgcttaacgaaaaggatgcatagattgattggtctggttctggtgatgatgctatttatcttctagctaattaagctattgcatttatttatttgtggattatggtgtgtgttttgatgatttgttttaattataatgcatgtaatttgatcttcatcataaatatatgagtgttgaatatttcgtgaagccgatcaagtggttcacttattagccaattaataaagttagtactatgtggattgtggtgtcttccctttgtacccgtgacgccattttaagtgtgacattaattaatgattttttttatttttgaaaaaataattaaattttattatttacatgtatataattagtccttattattcaaggcattattgtattatattaattaatttcatagtatgattgtatattaaaagtgttgctaaatatcaattgatatcagaatagataattgaaaaatgtgatatgattaatttagtatttttttttaatgaaaaatatgatacgttttctgaaaatatattttagatttaattagatagaatatacttagggaaatttacatggtatactaagttttgttattttttcacaaaaatactgtcaggcggtattnnntacttttttactgtgtttttttattagtttcatactgcagtatactgtgttgagttttcactggtgttctactggtattttttagttgttctactgttgtttttgagttattctgttctgtgttctactagtattttataaaaacacagtagttttgaaaacttttccgtgtgacagtatnnttgtaaaaattaacccaaattttagtattttttttttaaaaaaagttagtaatagaattgtagttttaatgtatacgattttcttttttttaaagagtccaattttaaaattttgcacgagtccccaaaatgcttggccagccctccaccctacaccattaatgtcggcaagccctcataagcactaccagccgattattgtcaacaaaggagctcaatcttggagttacttcgttcctgatcacactattttccgtcaagagataatgtttggaaattcttggctctaccaaaatttatggccatttttcattactgtcaaagcttaccgcccgccaagataagtacaaacgtaatccttgtcacaagagctatcttttccatttaattacaagcaaaaaatggtattcgtatgacaaaattagtgtcaacaaattcaatttttagtgcccatggatacgaaggcatgatttgtcctgcccttttggttgtatcaataggttcgtgtctaaaaactttaacgggcacaacaaataatatcgtgccaactgactgatctaatggcatgacacatgtagtgcccatttgagatggttaatactatcaaccatactattaggcacgaccttgtggtgcccaatgagttgtattttaaaaaagaataattttgtaatttaagattaatttatatttaaaattgctactagaaaaagggatgtttttaattttaagctaatactacccaaaataaacattaatacaattataaggagaaaataaatatttatgttatttgttgatttcaaaaatacaatttacaaagttttttatttacaaatatacggttggagataaaacccacttgtgaaaggagaaagtaaaatacacaagtagactatgcaggcgagtgaggctcacacgcgagtgaggggacaaaaccatcaaagttcgctgacgcacgcaatattatagcgtcagaacgtgccagtggctgccactagtcaatttcagacaaagtgcacttgagcgtgttggacttcttttttcaatgcaacaactaattagcaacgaaataacgacttgaaaacaaccaaaactaacttaaaaataattatatataaaaataaacatacttaaacccaaatcaatttaaaaataattatacataaaatgcacataaacttaaaatcagcttaaaaataattatgcataaatataaagacacacaaacccaaaattaacttgaaaaatataagtaactgcaaaatacttgtaggtaaactcgaaaaatatgtaccataaaaactaaaatatagactatataacaaaaaaatatgtagtaataaataatttaataacaaccctactttaacataaatagataacaactttatagtaagatgtaaattaattaggcatcaacaaatttcatcaactcaaaagaaattcaaaaacaacacataaattatctcgaaaaaaaaaacctacaaaatactagtgcattaactcaaagaaatatgtatctatgaaaaatgaaacatatactcagttagtttttacctggttgaacaactaaattacaacacgcaaacaattataacaattctattttaatataaaaaattattaagcatcaacacactgtgttaacttaaaaaaaacacaaataatcttaaaaaaaataataaaacaacattcttaata

SEQ ID NO: 78782 - DNA, 667 bp, Cannabis sativa
cttttaattttacgggttgaccgggttgggtccaggcaggttggccaggtccggatcaaaccatgtcaaaatgttcagtcctaccttgcattccttacaaaatttgtagggaagtattccttttattttatcctttaattaggtttcctttttttctaattttaataaagtaagtaaaaaaatataagggaatgactctgttactatttattcccgttacttagagcatctctaactatattctctgaatacactctagctaaaatagggagtgaaactttaaaaaacaaattccaaccataaaaaaaataagttccaaccatacaaaagttgactctctacaaggccatcatcaaggcaagcaatacaatcaattgctatagaggacccacataaaaaaactaaccaatcaatatattttttttattaaaaaaaatataaaaaatatcagttagcatggctagacagtagccacattacaacaataactcacacaatttttaagggaattttgattttttatgcatacattaggggaaattttttccctatacctaaaatacctaatataggtaagataggtcaataattactatattctgaaattacccctcattcaaatctcacctctctctttcctctctcgcatctctctctctctctctct

SEQ ID NO: 78783 - DNA, 596 bp, Cannabis sativa
aacaaatactgaacaaaagcaatatctaatttgccacacaaaacatgacacttacaggaggtactagttttgagtccaaataagtcattaaaattagcttagtggtgagcgagagatggaaaaaaagaagaggtcatggttcgaactcacaatctttaagttattaaactattatttgattgtaaaatactattaagctatactaaaaaaacattcaagtccgaattatatattttaatatataaatgcttaaataactcatttcaaaaaagaaataaaattactattacgtcatgataaattaaaagaaaattgttagagcatctccaatagagtgccatattgctatattttagcatatttaagaaaaactatacttcaatggtgttctaaaaagtatgcttaaattagtttcgttaaacggtccggaaaccaggcggctaactttttagctcgttttctggttctattccttactgtgtttcccaccggggttttgtccctgctggtttgaaagctatcttggtagctgatttgatttaataaaatttaattttttgggctaaaaaaatgtatgcttaaatttggcacatgct

SEQ ID NO: 78784 - DNA, 995 bp, Cannabis sativa
aatatatattaatattatttaataaaatttatattttttatttagataatatcagtatatatatatattaattttttattttaaaaatagaacagtaaagaaacaaaaccctcccctgtccttcgtgcgatgaaaccctctcttcccttaatctattttcttcaattttcaacttaaaatttagtatttcaagctctggtagtagtaggatagtaaattattaaagagagaaagcttaaggtaaggattggtttcgttttaagttggttttatacattgactttgtgatttagagtaattatgggaatttggacttcatgaaattgtttttgggtagttctaggactagcttttatggcatttttcgtttaagggctcgattttaatttttgttacataaggattgttgtatatatgatatatatatatatatatgtcctgtgaagtttggaatattttggagctattttggagggtttaaagttaaggaacatcgtatttcagattgttcagaaccaaaattccagatggtaccaatcaaaatatcatttgttcaattttttaggaaaagaggaattttgtattttagccataacttttcactcgagtgtctgttttagacttctatatacagtttcgaagcttgcaacgagctctacaatatggtttatgttttagagcctaaatatgtattttattttagggtgtttttaccacaaggttcggtaaaaaaaccctagattgttttatgtgagtattaggcaatgttttggaataaacacttattagtttactgttattgtgacatagggctcgggatcgttgatcgttctccatacaggtcagccaacatacctaaactgagacttaaggtaagaaaaatataatataccacttgacttgataggtttcttgattgtcgattatctaattaggcaatggtaatgtgaacgtgatataggggttgatttgattaggtgatgtaatatatggat

SEQ ID NO: 78785 - DNA, 1133 bp, Cannabis sativa
ttttttaattttttttttcatttatagtcattggatcttaggtgtcggtctagcccgctttaatttaagacgaattccaagtaagtcatacttttcagaattttttacgactaaatcctctcaattgtcgttttacttgtatttaaccctccaagctcaaattttaatagtaaaatcttccaaactactgaaccgatagaaaatttaaggtatcatctagttaagtgtcactgtgtactgcttatgtatacattcttgcatactgacatgtttatgttgatacatctaatattattatttaaaaattattttcaaaattcattttgaaattaaataaaattataaaaaataaaaaatattataaattttaaaataatttttatatttttaaataataatattaggtgtaccaatatgaatatcacacatgtataaaagtgtatacataaacagtctatattggtagttaactgtgaaaaatgaatgacaccttacttttgctactagttcagtagtttggagggttttagtcaaaatttgagcttagaaggttaagtgcaagtggaataatagttgaaaaggtttagccgtaaaaaactctactttataagtttgattgatgtgaatgttatgctcctttaacacttaggtagcgtttgggtgtgaggaatgaatatttaagaataggaataggaatgtaatgaaataaaatttaaagggtgattatatttacacccgtaaaaattataactacaccccattactaagtttaccccattaaatattattttttataactacaccccaccttatttacaaaagggtattatttgtacacctcaaaattttcttttaggttattaaaaaaaaaaaagaaaaaaaagaaagatttttgacgtctgcgttcacggtgtcactctttttttttttcttttctttttcctgtttttttttttttatttttttttttaacaaagctctttttcttttttaatcttaggagttattgaaacttattatcgcatgtgtgattttttttttcttttttatgaaagtaaaattcattaatgtctaggaaaatcttacaataaaataaacaaatctgtattttatataattcattgcaatataac

SEQ ID NO: 78786 - DNA, 553 bp, Cannabis sativa
ttacaaaactgtaatgcctttaatgagccagtatagggaatgtgtggtaatagtttagctaaagtgttctctgctgggtggccaagtttagagtgccaaaaattgatatcattaaacttggaaaccgaaaaaacttgtggagaaacagagaagtcaaaagtgtttttattcatttcttgaacattacaaggttcagatattacactattatgacaatgacaaacacaattacaacaagaattgttttccctagaagtagtagtaagatgacactctatggctggactggaggcatccccaagctggtataaaccatctttttctttgcctttaagtagcactgtcccggtttgcttgtccttgacaaaacaacaagatttgtgaaattcaagatagacatgattatcatttgtgagttgggaaacactgacaagatttttcttaatagagggcacatgtaaaatattgtgtaagtgcaaaggagaggaattgattgaggagggaatagtgaactgaccaatatgggagataagtaactgcttaccattaccaa

SEQ ID NO: 78787 - DNA, 3209 bp, Cannabis sativa
cttgctgcactgatagaaatgattggattttggaatattctatgatctataagttaaatttcacagtaaaggataagccaagtatcaggtttggacatatattctaggaaacctaaacagtttgtactaagtatctgcttacatattgaagttcttattatttttcatttaaaaaaagcatgtattacagaaactttgaccatttttcttcagaggtttttgcatgaaaaataagatcaataccagttttgtataaaaaggttgagttttgtgatgtatataacatttaggatgatcttcacaactaattaaaacttaaaaggattttgtttgctctcatcgttgggtttgcaactcttgctggaagtttaacgataacatcattgcactagattaaaagtaatactaaccctgcatgcttatctttatataaagatagaaaatatgaaataataagtgttgtagctgacttttttgacctaggaaaggctaagatcatgacatctcttactcatgtttgtatcaacattgattagaaggggaaaattgcctcaacacttatacatcaaatatcatgttagcggctactgggtgcgggtgggtacaattctgttttagatgcatatcctaatttcaggttgcatctatagttgagaaatttgccaaactaacatgatctattatttattgtggtgactcaagttacgaaactagtttgaattcaaggttctctatccaaatctacaatattgtggtgagacgtaagccataaaaactaatatatagggtgcttataggagacttgtttgagctaccccaagacccattttgggttaggaaattccttaaattttggacatgttaagaaagataattctgtgtttttttatgcatccaaatctttgtacatgaaacatgcctttttgttatctcactaactaaatatagttgtctgctgttttgtttagatacataaatgataacttgagtccagaccacttacacttacctgtcgaaccactatgtttagatacataaacgataacttgagtccaaaccacttacacacacttaactgtcgaatcacaatgtctagccacaaaatacccaagtattgttattctttagcaaagaaaaatgtactgtgtgctcctaagactcagctagtgcactgtcgagattcaagctaatgattttatcattgtttttagtggatcagtccatttttctgattgtgtttgttcaacagttacacttgttcaatactatatgttgattctgcccttcaaaaaggaacatttgcgtttatacccttccctatctcctgttgtttatgagtctgacttttttcctactctactaagtttatggctctttcccaataatcaatccattgctccctcccagttctcataaagactggcctggggacttttcatcttttaccacctggtttcttgctctctccctctcttgaaattcttgccaatagtttttctttttgcaagttagatgacctttatatctcttgcttttgtcactttgtttcagttaaaacttaaattaacacaatgttagtaaatcatataaattaccaatttagtaacacgttaaagctcacataccacaaacagtgttcttagggtcccttaaagggtatgcttgcccaagacgtgaaaagtttcataacctttataggctaaatcttaatgtatttctgctatattgaccaatcaattatgagttcggaggattatttcctaccacatgtacttgatacagttcagttcagtactcttcagccaccttttcatattttgactctccatatttctctaaatgcagttccatttctgtcacctgtgctctgtattatttatgatgaatcaatacataagtttaaacagtgttctcagaaacagattctgagtatgtcactcttacccggtagtcacactgcagattctgttgctgataagttaattctatgctttttatttcttaatattttacatgctttaggttttgtgcccaatgcccatacacaatgttatgtaaactaatattacgtacatgatataagttctctcactttctcaggtgggaagcagcccggattccaaaaatcagagtagccaagcttgatagaagtaaattaaacaaagagcagagtgagtatatgcccaagattccagagattgcaaagtgtccagaacaattgttgcctatgaagcagtgggaagattcatttcttgatgatttttcacagcttaggctggtatgatccttgtaccttccttactattattgttaaagcgaaacagtttagttggtttgcacattttcttgatgttggaagcctaaatagaaacttgactttgagactcttaactctcgattcaggatttgtctcatctcgaggattccagagatattgtatcagaaatttgtccacaacagcaatccgggggcattattttggcgagctttgaaaagcgcagaaccaaagtccagcctgaccagtctcatgattgtctcagctctgaaaatacagatgaattgttatccaacttatccactactgttgttgatggtgatgacgacgataataatgtatcatcagaatctgaaaaatcaacaccaaaatcagttgtaaatgaaaattgcaacaactacccattgttgtctgtaatattaaagatggattctgtagctcgagtggcgatgttgaagagaaggataagctctttcggtggaactaacacattcttgagggaagactgcttgtggctatttgcactgtgtgcagtaatcgacactccactagatgcagactctagtgcttcactgcgaagcctattgcgtaagagcgctaatttgttggccggaaagtctgaggttgacgatgaggttgtaatgcttaacattcttgcaacaatttcgggtcgatacttcgggcagttagagagctgaaccatgtaggtgtatctcttgttttgttcaaatattagacactattatgtgctattatttgtaatgacacaatttgaaattggtagtgtgtattaggagggagtatgtctaccattacactataaagtcaaaatacaattttgtccttagatataaaaaatcaaaattgagattagctagccaagtagactaatgaagattttgagaaagggttattagaaattccataatatact

SEQ ID NO: 78788 - DNA, 1426 bp, Cannabis sativa
cgtgaagtatacacatgattttcaggactattggttctatacctctaacttcctcctaaagagctatgcttagtctggcttccccttgaagagagttcctacgcttagtttttatctttattttctatctttattctgtcttgaatagtgtgaataattgaaatgaaaaaggctaaaaaacatttatggtgtgtaacacttttgtgaggtgtagtatctctattggtgcaatttaatatctaattccacttattttattttaatctctattggtactaattataaaataatacttcatcgtagtgctaagctccttaaatatctcataacaatgttctattgaactagatggatgagtaggtatatgaaaattgagatggagcatataataaaagttatatatataaaaaaaataggaaaggtaggtagttgataaaaaatagtaattgataaaatttaaattcaaaaatttgtactagctagatgtgtagcttttatgaaggttgagtgaaacatgtaccatataacataaaagaaaattgtaagagagtagtagtaagtactaagtagcaatactacaatactacaacataattaaatattagactttatatattttattttaatatttattataagtatcactagttattaataaaatatcatctcatgattataatgattatagtattattagacactattactactttataacaatgcaatataaattataacataatacataataaatgatgaagagataatgaaggaaaaaaatataagaacaatagtatatgtatgtataatatgattatcatgttgctgccggcacatacttccaactttcatatataataatattatatataatttatattattgtgatctttccctttcattaattttcaaagcctatatgtatttataattaaaactgtaaataaattgatccaatctaattataatagatcattcaattataattgaccatatttgtgattaaattaaattggatattatttttaaatatatatttaatttgaccggatcagttgttaaatgatgtatctaaaaatttaaggggttgttacaaaaatattgaatttttgacaaaaagtttataattttactatcatactgatttttttttataaaatactgtttttttataaaacaatcgtaaaacaacaaaatagaacaattaaaacaacagtggaacaactagaaataattgtgaaacaatcgtgaaaacttaacacagtacacagtataaaacttacacattatttttttaaaaaaacacagtatttttttaaaaaaaaaaaatttgccctacagtaaaaaagtaaaaaagttagaaattttagtatgtggtgtaaaaatcccaaaatctaatgtgtctaacatccaataaaactaatta

SEQ ID NO: 78789 - DNA, 564 bp, Cannabis sativa
tgagcacaagctagctggccaaagagtgactgtcaggctgaaaagtcctgttcaaccaagaaggcctgacctttgcatggaaaagctggcacgcatatggaaaagctggcaggcacatggaaaagatggcagtcacatagaaagggtggcaggcacatagaaagctggcaggcacatcctaaggctgcaagaacaatacctggtcagccatcggagtgtataggccggccaggccctacaaaatagggctggccggccaacttctgcatacaactctgaccagctaagaaaagttgcgagacaggtccaacaatccacaaaatagggatttttcttcgagatattagtcctattgtatgggatttagttatcctttttttgtaacttgaataatagataaaaagatgtaaatatccttattttaaagggatatccttacctacttgaattagatctcttgtaagccctacactatataaagggcattaggtccctctcattacctaagttattccaagtcactccacttgcataaaaaggactaagctacacgtgaaagcctct

SEQ ID NO: 78790 - DNA, 920 bp, Cannabis sativa
taggtaaggtcaccacatcgaagctactatacttttttttttttaaggaaagctatgtccattaaagaatagaaccaacattcaaggcatagttggaaaaagcttcctgatctaagcttaaagcattcttagctagatgatggtcgatttcattagccccttgaggaatgttggtaatattaactttaggtaaagaagataaatttatttagatgaagattgtgagaatattttcaatctggttcaatgcaatctggtttaatggaatgatgtcgataccaagtgagagcatggtgtaaggcgtgtgcttccattatcaaaggcgaatggatgcctctccatggcgttgccaaagtcaagagtacttctctattattgtcgtgaatagtcatgccaaaacccattttgttgtctttttttattttgggcagcatccaccgtaaccctgagattgtatcttggtggttatgattcattatgtgttggctgcaatgaggatgtataaatagtaggtgaaagtgaactgttatggtgctggtattggtccaagtaatcttcaacccattgtaatacattgatgggcactagaaacgaaccgtggtgcaaaaattcattgctgcaattccataatttccatagcaaacaaacgaaaaattgaaagttgctcgctgtgaaagtgctagcagctaggtgaaggaagtccatacaattgagaaatgcgtgtttatcaataaaaacaaaaaagttagttaattcccatacctactggacagttgaacacctgaaaagagcgtgaactagggtctcatcatgatagtggcatcgacaacaacttggtgaagtaattaaatttttttgcttatagttactgattggaagaatatcatgacaagctcgccaaagaaaatatttaattttgg

SEQ ID NO: 78791 - DNA, 807 bp, Cannabis sativa
aaaccaattaaacccaaatggatttgcaaagccatgaaggatgcttgggtagcttgtctccccttcactttctcagaataccattctggtttattcttggctacctttggctgcgaaggggatcgtcgcagagttgtcgaaggccagccttggcattttgaccataccctgatgctctttgccattcccgatggtttcgacaccattctccctagtcagcttaggtatatacctctttggatgcaagtgcacttcatcccttttggtaatcggtcccatggcttggctcattttgttgttgatactataggggatcttatacaagttcatctcccttctctgtatgactccatcaccccatctatgcgcattcctgttctccttgacaccaccaagcctctgtttaggggtatgaatgttcactttcgtaaactttccctcactaaatggctgaagttccagtatgaaggcattcaaaactactgctatcactgtgggaagcttgatcacacattcaatagatgtgagtcattcctccatttctgtgatactcgtgcacaccctccatctcttagttataaggatgttctaagagccactgtgaagtccttttatgagaaaagtatttttgagttgtctaactcaaccccatttgaagaaattccttctctcaacaacctatccacccaaagccttcagatgcagtggatcaaatccttgtccctagcattgctaatacttcccttgttcatactttagtcactgagagttcatctgcttattctctcccaagtgctacgattgatc

SEQ ID NO: 78792 - DNA, 869 bp, Cannabis sativa
gtatctatccaaccataagccacttctgttaatatttaccagtggtatttagctacagcccaaatggtacattacatgcctcaaaaattgcaatccttacgaggaactagcaaacaatagagtaaaaaaattggttaaacttgtatattaatcagtatgacctgtaataaacttggtaagtaaccaaagataaatacaattgcttaaacctcaaagacgacaaaaatcttaagagcaccttcaaccatgttagctatagattgttcttcttttcttggaagccattgttcttacttcttagacaaaaaagataatgattatattccaaatccaaccactccctgcatcgatagcaattgtagagaacatgaatccaagttttaaaaggacagtttgagatgaacctttatgcctaaggcggttcaaggagttgtgcctctctgatgtgaggatatgcctcaggcagcacctcacaggtacacatccctcaatcaataaatatagggtttaaatgcccatatgcaagtttttgttttaaacgtatagcttagtcttgaaccctaatacctctagttctctccccagtggaagcttcatctctaccccacacttcttcaacaaaagggggaaagaaggaaacctagtctaggtgaagcttcttctgcaatctactacttaatttggttcaaagatagtaaaatatagcattctagttctagaaacaaaaggttcatcttaaaattataattttagacaatatacgagacattttgaaacttataattattcaatttcaaacaaaattgtttgaaattagctagtgattcaaagctttctaaaaatagctaaagacaatgcttatgcaagta

SEQ ID NO: 78793 - DNA, 1179 bp, Cannabis sativa
ataattattataacaatatcctaattattgaggaaataactaacgaaggctctaaaaataatacgaatcaacaaatcacactttttgggaatcctgcctgtgatccagttaaccgattctacaatacctgtagaaccgattaaccaattcataccaggttctataaacaagtttgaaactcccttaaatcaagcccaaacttcaacaaactttctagaatacatgtaccaacatccaataacagaatccaaccaaaatgcacaaaaactcaatatgccattgttgagccaagtttgagttcttagaactcaacccaagaattaagaatcaaaaccacctcaaaccagctctaaacaacctaacataaccctagaaaacaaaacccaactactatagattcgaacagagccaaacttaacatttcacatacaacaactcaactagtaacttcaaatcttcaaacaacaagaatttctacggttacctttgattagctccacttgattttagataactcctcctccaaaacacactaacaagctgaaattcttactagttcttgctaggtttgaatagagagagagagagagacttggtttttgtttgtctaaatgaatcttgtcttttcttaattgattaagtgaaataataccaaggattttaggctgaaataaaaaagattaaccaactgtaaattccaaattcaaccacataatccaatggaaaaaattcccaaaatgccctttttcttccattgtaagtaacctttaggcttaggggtaaaatggtcaaaaactataaccccgcctagacccgacattctaaatatctcttatatttgtcccactatgaaataggttctaaacttacccatataactctattgaccatccatcacatttttcattgttaccaagcaaaaattataaaaattgcataattcatattagacataaataatactcttagagtttaataaaatctgaagaattgagaaattataactctaatgcccatttctaaaaatattgcttttcctctagctctaactgataccatttcgccattactaactttaagtttcaactctccggattttaaataatcccagtttttaagaaatttcaatgaacaacagacatggttagtagatccagaatcaacaatcgagatggattt

SEQ ID NO: 78794 - DNA, 1100 bp, Cannabis sativa
  modified_base (1055)..(1073): a, c, t, g, unknown or other
tgcccacatgcctagaagctggtacaacacagattgtgggagactgtagatatattaaaattaatgtgtatatattttaggatctgtgattagtgatttacttttattctttcctagattataagattttctgatcacacaatactctattagtgcttgtttgttatgataaaatatttaaaataaaactaaactaagaatagaatgaaaattaatttatttcaattccatttattaaccccttaccaaacgtacctttggtgttttgagaaacataatctctttatagaggtcttattgtattaaatagcaaggaacaatatggttggataaaactttatattgtattaattattacaatcataaattctaatacaatgtgaatcctattattgtataacaaatgatccgtattagcatgtattataatatttagaaagggtctgtggttgggactcaaatcccgaccccagacctggactctgacttggacccagacttggaccttggacctaaacccagcgccagaccttgactcctgacctggactcagactgaactgcaactcggtccctagcacaagtctggcctcggaccctgaccccgggtctaaggtcgaggtatgcgaatagggtccaagtccatggctagagatgggatccgggttcgggttcgggttcgggttgggatcgagtttatggtaaagatagtataattttacacaacctattaatacaagttaatatcaaagatagtattgtattaaatattactaatacaatctaatccaacacaatactatacaatactatgcaatacaacacggtgtaccaaatgaacccttggtggcgtttggtcggaggtaatgaaatggaatggaaaggaaaagaaacaatcttcattccattcttttgtttggttgcatattaaagtgttggaatgtcattctaatggaatgacctttccaccattttggtggaatgacaaatccattttgaaatgaaaggttagaccattccaatgcatgatgtaaaaaaattaataatttttttatnnnnnnnnnnnnnnnnnnnaaattttattccattcctattctcatt

SEQ ID NO: 78795 - DNA, 678 bp, Cannabis sativa
tctggtttttctgtaataatagtataatcgtatgtttggcttgggttaggtatttgtttaagtattctatgatcttttaaaggtgccttattcgcaatgtttgctattagaaatttctggttttgctgtaacaatagtagtcgtgtgtttggcgtggttgggttaggtcatgtttataagttgcaattctccttcatttgctactttcatgtttcaaggttccactgccatctcatggttgaaagttttagaatgcttgcttgtcaatgttataccagatacttttctacttggaattgaaagattttatagaattatcctttattgtcttgcaagatttcattagaactcgaataaagctacataaactttgacaactgatatttgttatcatgtgatttatcagtcctacaatattatgaaatgttaaatcccgtggaatcgagtaatattagcaatcaaaccttagattcaggcccttttatgaggtttattgttctcatatggttttctcttttttttgtccttttttctttttttcctactcttttttttataaattaacatatcactaaaactggttcagttattttcattgtaaacaaagagaatagaaacgctcatcttaggattctcacccctttccctccattctctcctcacttacacacgcatatt

SEQ ID NO: 78796 - DNA, 1422 bp, Cannabis sativa
aataacaatctcttttaaaatgcctaggttttccacagttgtaataaccattagtttcatcaggatttctagtattagaatttgatctgcctctttgttgtcctcctgttttgcttgaacctctgttctgacttctgcctctgttgttccaaggctttcttggacctggtctgcccctactcaaattgacttcaccatttgagtttcctcctttctctgctctcatctctaagtctttagattttagggcagagatcacttcctctagggttattgatgtccttccatacttaattgcagtcttaacttccctataggattcaggcaaagagtttaggataattatagcctagttttcatcacttagagcctcattttccccagaatttgcaagttcaatatgtatccttaagtattcatccaaattctgatcaaaggctttggatgaactcatcttaaaaccaaagatactttccttcaagaatatcttgttggttaaagatttttgttgaaactgttcttccaatttcttccagattttggcaggggtttcttctttgtcaatcaatctgataatggcatctgataaattgaatatcatgataccggttgctgtttccaagtattctgcttgttgaatcttggttgtcccttctggccattctatagggtcattaagcactctcagtagcttctgttgagccaatagtgactttatctttctcctccaaatcctgtaatcaccagaaccatcaaatttgtcaatgtctacctttaaatttctcatgtttaataatatcagataaagataaataataataagcaatttatataaagattaatttgagaaatgttcccagaaatcctttgttaaagatttctttagatcaagttgagttcttgaagttcttgtttgtgtttcttgatttcttgcttgagtgttcttcctccctgattattttgaatgttgaatcttccagcttaaccaagctctgataccattgtaggattttagtctttttaccaaactgccccacaccaacaaacaaactaatcagttttacgaaggtcaatatcgaccttttactagccctgacttttcagagtaagaagggatcaatacgaccccgtttttcctttgaacaaaaccaacaagggattcgagaaccttctcattcaatccctcagccttaggtttagctcgaaaccgtagcagaaagtttctctctgagaaactcgaagccaaaccctcaaaccacccagaaatcccagaacaaacacaaacacaagatcagatctgactagatttgatctatcctcaaacacacacacaaaaccagaaagtattagagttagaaaacaccagattttctcgaagttcaccaaataaatttggctacgtctccgtttgagctgctcctc

SEQ ID NO: 78797 - DNA, 712 bp, Cannabis sativa
ttttgtatactttaattaattatacaaagccagcttccacttaagaaaaagaaacatatatccccatggtttaaaatgactaaactactcttgcctcattttctaatttatgatatggcctaggggtaaaatggtccaaagccactatcccgcttaaactcaaattccctatctcaatgtactataactttgaaaaataaaaggttccatgtttacccatgtgactaaaataaccctccgttgcattttccatcgccacggagctagaattacaagaataacatattttgcatttaacataaatatttatatataattattattaataataaaattattatttataaccccattaatccatatctaaatcatgcggttattacaattattctcctgttaaaagaattttctcctcaaaatataacttgaataactctggatattgagtcctcatggcataacgcacactatatgtaacaggttacttttagaagaaaaatgaaagcttaaaattcaactaccacgatactttttcaacatgataaaatttatttttgaaaaaatacagtcacaactcaacacactcaacaatatttaatgatagatgtataagatgacttacaaactaatatgttactttatgcaaaaataaaatcaaaattaacaagctatacaaaaattataggtaaaaagtaccaagttacaatttgaa

SEQ ID NO: 78798 - DNA, 662 bp, Cannabis sativa
caagtactcatcttcttcgtttccaagcaacttcaagactgtaaggtctactttcgatagcctatgaagagtggccacaaaagatatctccacagaataaagacgcagagcttttgcctattcaacagccttgataaaatccctcattcgttgataagaagtagcagccaacctagctaaatctttggcagattcaaaggacttcagaacaatggcttcccacgagtccaattccttcctcacgcgcttctcaacatcaacgtgactcttccataagtcttttcatgcaccacggtcagttccagggagcccaccttatctttttgcgtcttcacctcttcctttagcatctgcacctctccctttgccactttgagcaacgcatccaccttcttaagtcaaagctctaggccactaatctcaagtcatttattgtggatgtccatgttcctagtccccacttgagcctcaatgagctctttttcctgtgtaaaatcgttggatgttttagtaagatacttcacttgagcttcaagcctctgacatatttcctggtcaaattagtcgacgcggtccacatactcattgtatttattttcatacatcgtgttgtacttcttgtcggcctcttcaaaggattgttggcggtactccttaggatg

SEQ ID NO: 78799 - DNA, 629 bp, Cannabis sativa
atcattcaccaaatggtatctaaagatctgacgaatggggagctaagaaggtgtatcgattccaaacgtttaacatccatcactacctacatcgtgaaaagtacttattaaaagaagggtctgcttaattgatttgtagattttggcgtttccccagcgcaaattgcaagagtcgacatttaaagctttgctagtatacatcaagaatgatatcctctgccagtgacacattagctgagggctacttgcatgacataatgaaaaacttgaagctaccccacgtgtgtaaagccaataatgagaaagcaaataaacattgcaagctcctggaccgctagacgtcccataagcttagggggtaaatgctgtccaaatttttataagcttgacacgtggactctagtccaggaagccaagatgataacggacaagttcgtgcctttgaccataattcctggaaggggggagccctagctcttggaaagggctctcgaaagggctttcgtgaaggatactcccacgtaaggagaagatacaaggaacatccacaatccatgatatctctctcagtcccaggaattgaaggaaaaatgcctcgcgaaggctaagggcttcctagagcgtgccaa

SEQ ID NO: 78800 - DNA, 566 bp, Cannabis sativa
gtgtcttgaaaaggtagaatatttgcttcatagatcgttgcttgcacttggttcccctatatttttatgagagataaaaaaagttacatagtagaattttgtaggaaaaacaacacaatgtgaaaaaccaaatgattttttcatatgaagaaaataaaatatgaaaagcaaaaaaaaagttatcacatgaacaaaacaaattagagagagtgataatatacttgtggatcaataagtgtcatattcatgtatttggttggactatgtattgctgtttttgtatttgatttttcagcaacaataactttggcagtccaattcatttctccaagagaaatctctggtataagtttataaagttctgccattgcaaattttttcctgcaacatatatcaatatagtttacatagaaaatataaactatataacattgagatttttttgaaaaaaataacataagttagaaaatgtttatacattctgttttgaagacaagttttctctggacaagtataggagagttcaggcttttttcggggagaaatctaaaagggtgtagagttca

SEQ ID NO: 78801 - DNA, 647 bp, Cannabis sativa
aaaatttcaacataaaaagaccgtatttttgttatttttttttgttgtttttgtgcatttgtgaaattaaccctaaattttattatttaaataaacttaagacataaaatgtcttaattcaattttagttcgattaaatgataaaaaaaaattattatttaaactaaaaattatcccattaactaaaagtattttaattttcaaataaaataatataataattatctttttaatttagttctctttaaataatctatatatataaaagaaagatatgagacggtaatgtgacgttttaataaaatcactcaaaatacttttatatattctattcttaaaagcaacacataatcaatataatacaaatataaagtagcataaaaataacatagtataatgttgttgtgaaagcaatttgtaaaaactatcatccgtattttttgtaagaaaaaaagtttaaatctgtacaaaaattgaaaaaagttataaatttgtatttttgtaattttctttacaactaattaatgtatgaatttctcactctaatataggtatatttatatcaatttataaatagtcataaattaaactattttttcaatcattataacaaccgcgtgaggcgcggtgatgtgacactctaaaat

SEQ ID NO: 78802 - DNA, 641 bp, Cannabis sativa
gaagagtttgccatgaacgttagtgaagagctctaataccatgaagaagtttttctagagagagagagtgagagagagagagagatatatgaggaagactttagaaaagtttcaccagattgaaaactgggaaaaaactttagttatactgaggtgttatcttatattgatcaagaatacaaaacaattagttttaataatcatgactttaacaacctttaaccagagtaaaaaattgaagctagctaattctaaaacaactaactaacactaatgatattaactgctttatgactcgtttggtatgtcgtattgtattgtgttggattatattgtagtagtgttatttaataaaatactatgtttggtattaacttgtattaatagattgtctaaagttataatacattttcaataaactcaacccaaacaccgactatgggtagggtctgggttcaggtccgggtccaattcgggtcggggtctaggattgggtccagtttcgggtcttgggtccgagtttgggtcttaggtttgggtcccgagtctagtctcgggtccaggtccgagtcccgggtccggtcctgagttcaggtcctgttcgggtccaggttcaagtctcgagtcccaggttacggttt

SEQ ID NO: 78803 - DNA, 2427 bp, Cannabis sativa
cagctattatgtctctattattctcccttactataaactcaaagtcccattttatatattttagcatcttgagtcgcgttgatatttaacttcaagagacctataggtggcgatacacattgtgatgagaaaagtttagttaattgcactaaggatgatgggaaagtcatgttatgcagctggtactaatgaaagtaggtcattgtccagtgtagcactgtgttaggatctatgattttctgatggtgaagcacttcattcctgcaatgccataatttccacaacaagcaaagagaaaactagaaatctctagtagggaagtggttagaaatcatatgcattatatcaacacatgatattaaactgtatttattgatataatcataaaatgtagttaattagtttccataccttctggattgcaaagcaaccaaatagtgcatgtgctagggtctcttcatcacagtggcagcgacaacaagctgaattggtaatgatttttcggtgttgaagcttgaatccagctggaaaagcatcgaggtaagccttctaaacaaagtgtttgactttggaaggtattggtagatggcaaagagatttccatcatttttgttgtgaaaatgtattggaagagaaggctttgtttgtgttgctaagttgtgtgcttcatgaaaacctgagtttatagtgtagtgcccatgtggtgtatgagaccaatagagagaatcaagggtttgattattgggcaatgtgatggaaagaatggcttggtagatttcgatatggaaaagtgaatgaagttgggctaagtcccaagtaccattgcatgtaattaagttagacacaagtttggtgcggttagaggggtttgtaagatagccaagcttaccataccccaaaatctaggtattataatagactaaaatagaggtgttgtccctaattttttcttaagtcctgacaggaggagctccctaccccatgaaagactagtccaaaccagtgaaggacaaggattcttaccaacgtcaaggaaagtggaatggggaaataacaagctttgagcaaagaagcaactagagattgaggagtttgtagaagacgccaagcttgcttcgctagcttagcttggttaaaggctttcatggatcgaaatctaagaccaccatggaacatggatttataaagagaagatcatttcatccaatgaattttttggttttgttcagtgccaccccaccagaagtgtgccaccatagattttaacttagagtgaaaacagaaaggaagtttgaaacgcgtcatggcataagacggaatagcttgaaccattgactttagtaagacttccttccttccctttgagaagaaggtggagttccacttattcaaatgagtccaaacgtgatcatagagataattgaaggcctttttttcagagtgaccaaaggactaaggaagacccaggtatttctcaaaggtctcgcgaataggaatgttaaaggtattggtgatggacgatttaatctcctcatctatgttaggggaaagtaaagagaagatttggcacaattgtcctatctttcaaaagccaggctatagtcatataatatctccttaataaaagcaatcgcagtcaaagaagcatcattgagaagaatattgtcatcagcaaagaaaaggtgagagacaatgggagtgttgcgagcgattttgagaccaagtgcatgcttcttggggacctgctgcttggtcatctaagtgatgagggaggataagccctcaaaaagagaagaaaaaggtatggaaaaactagatcaccctagaaaattcctttagtggggataacaatcccttgatcttgtgacagtgagagtctcgtgatctgcaaggggaaagactaagagttgtgcaatgccacatcgcctggggaaagttaagtgtgatgattctgagactgtgtaggtatgggaccacatagttgaagagagcttaaatgaatttattggtacactatatcaacaagatatatcttctttatggtagcccatcatgaaacaactccaaagttaagcgtgcttgacctggggtaatatcaggatgggtgacatcctagaaagttttctcagaaagtaggcaagtgaggaaaaagtatgttgaaaagactcgtgttggtctgcagggtcagtcgtcattccatgaagcaaccaagagtggcatacccatgtataagaatcattagtccgtaggggaaggtccaatggatacttgaaacagggacgttacaaatggtatcagagccttgatccattcgcaagtgtgatcgacaaggatgttggtgttggaaattattttcccatgatcttagatctactcacaagtatgttgtttaacaccctaaatatgaactttctaaaacgataaaat

SEQ ID NO: 78804 - DNA, 650 bp, Cannabis sativa
gtgatacaaatttgacacatatcaaactatttctaatcagaaatgtagacattgtgatatgtttagtacaaaaataattttgtggtatatttgcatctattttaagaattgtgtttcaatgtacaattataaaacttaatgcgaaattcaatacttttatggtattaaaaaaaaaaaaaaactttattaaatactcagatatcagatgttttggaaaactagaagtcctttacttgttgttgagggaggtgagtgttggtctaaacttgatctcaataaaattaagataaatatagatctgacattatttttagaagaagtgagatatggcttcggttttctggtgcggaatgacttgtgggcttggtttttgctagtgttttctgtataaatgggtcggtcactcctcaattggctgagatcattggtataaggaaggtgctcagttggttgaagagatttcagttctcaaaggcagtgttagaatcagacaactttgtggctattctggctattcgtagttcatttgtgatgttgtctagttttgggctagcttatccttgaggaatataagttgctttactcgacatcttgacccatctgtagtctgctaatctaatcccaatgtctttgatcctgacaagcttgga

SEQ ID NO: 78805 - DNA, 1079 bp, Cannabis sativa
ataaaatatttcttatctttattttataagattaaaaaaaaattatatctatgtcattataggtttgacctaaatgagagataacataaaattgatataaaaatggaacgacaaaatttttatcaactcgtgctcagtctctgtccagattcgtagcataatctgtctctctcataatcatagtgtttcttgagttaagtagacactgtgatagtaaatgatcatctcttagaataatcttacaagcctacacttgtcctgtagtgttaatgattgatttggaagatactggtgtgaattcttcacaaatcataggattgttaaattggatgatagttgacttatacgaaaagaaaaaaagataccctaataggcttcgagaggtaaaattttatattcatgtagtgtagatttaatctatgtaaatatattgagatcttggatcttatggttcagatcaattttatttaaaattattttctaaaaattgcttttgctttctactctaatttagaccataaaaactaacagattataagtagtaagaattagaatatagagtacaataaatgtttcttatgctaacaagtgtggtctagtaaattttgtgttagttgttcacacttattaggcacaaatcataatattgtctgagtatattttgaagaaaataaatggcatttgtgtgggtttcttatggaagagtacatcatgagtctgcacattctacaaaattactaagaagtttgtttgtcaacctaaagatgaagaaggtttgggttttaggtgtatagaaagctagaatgttcgggccttgggaagatatgtgttacactatgaaatagcgtaaggatttattagtaatttgcaaagggtgtgaatcactataaatatgtaattgtatagctattatgagggagggaatgagtaaatagaactttggttcaattgggagattggcactgtctcgaagagtgcatttcggagatttgtcctgtctcgaagaggactattatctaacaatatgtgtgaaatatagctttgaacaaagaaattttttgggtgagataggtccattc

SEQ ID NO: 78806 - DNA, 537 bp, Cannabis sativa
ttacaattttggcgttagaatagaggggctcaactcaattatttgttcatttatagttttccagtttatcctttttccacattcctttcctcaaatctgtaatctgtatccaatgaaatatttaataggaaagaaaccccattattggtttctgtttttgttttatataatggatgaagttataatattctactgctttctttctctggtaaaaaaaaaaacattgttttgaagttttgggtttcagatgacaatctttttaggctatattatactctccagattatgctggttaattagctgaattcataattatgtgatcttttaatcttgacaggtgaagttgtgactttacctgatatctcaaagggcaaaaggcaaatggatcttgaagccaaaagctttggacatggtaataggctattctgattatctgatagtttattgtacttgtgtttggtggattttcaattttgaaataattggtacttgacttatggtccaaacattgaagggtgtgagtttatttgtttgttt

SEQ ID NO: 78807 - DNA, 885 bp, Cannabis sativa
tcctttaaaccatcttctctatcaacacatcacattattcagttgtagggagtcttctagtataaattagtattccaagatattgaaatggaaagagaccacttgaaaaccttgaagcttccactactatttgcgctttggtctcttccattttacaacaataaatctcttatttagcctcacttgcatgaagacttgaagtttgaaaaaaataacttgaggccttgtagcatataatagattgatttaaagtcaccattacagaataataagacgtcatctgcaaagcacgaatgattcatcttgggtggagcacatctttcatggaacttgaagccttccttattcctcactttcattattattcgagacatatattccattaccatcgcgacacataaggagtgaattactataaattctttgtgtttacttgaaaactttctctagtaccatgaacatcaatgtttaacacatggcaggaaagaattaaaacatcccggagctgagtagtcctgagtcaaagcagttgacttgggaggagtccctagcctgtgcccaggttgactcggagaactccagaatgggtgtttgaatctcaccaagttgtttaaactcaaaatctttcagtattttgaaacaagatgacaagaagaaatcaagtctaaggcctaaacactgaaaagagacgaaataacaccccgaaagttaagccgagtgcctagggttttcacccagcgcccacgttgacattcaaactagggttttagatttatggtccatcttagtgcaattggctcaaattttgtactttggcataaataagacctgtcgcaaacatgttccaagcgccgagggcacctagtgcaccaagtcccaggttga

SEQ ID NO: 78808 - DNA, 1219 bp, Cannabis sativa
catgacttgtttttaaaaacttcaaaaactattttttgttcttatttctaaaaataattttttgaaaataaaaaacaaaaaacaataccaaacatgctcttattttcggtctgtgcctgatcatcaatttcttattaatgtgccttattgtatcattatctcatacttatacatacttaaacccattttaatttaatcttaagaattataatgattaagatcatttattatcttctcaactgttgtaagtgtgcatatatccaagagattgacaatccatctaaaaatatatgtcagtgaaaaaaaaggaggtggggattggggcatgcgtctctcttcaacgaaatggttgggcgatattacgggccgactaaaaactcaaaacagccctattaaaaccacaacgaataagaagtgcgaaccgagttcctatgattaagttaagaaaccaaattcatggcagaaatcttaagaattgatgcatagaattttctgaaaagacaaagcgagaggagggcaaaattctctcactgaggaccactgagtgtggcttaatgcactgatcagagatccaagaaacgttttccgagttgatggtgagtactttgtcattttcaaagatgattactctagatatataacttaagttagaaatttgaaatgtttgagaaatttcatgagtttctagcaacggctaaaaactaattaggtaagttattaaagatcttgcaaactgataagggtggagaaaatatttagatatacagttcaaaaatcatttagttgaacttcaaattgtatcccaacttacctcccctgaaaatcaaaactcgcatattgatggaaatggtaagatctatgattagttactagcaatttgaagagtccttctaggaatatttcttagaggcaacaaacgatattctagatgtcatcccatctaagtctggtcctaagacaatcttggaatgatgcaatggtcatatacttgatgtacactattaatatatatggatgccctgatcatgtccttaagaaaagctagaacatgtaactgaggtttgcatatttttttattggctattctaaagtgactagggtagactattttgtatttatcaagacaagaaagtgtttatttccgtaaatactacttttctaataatatgactatatacgtaatctcaaaatcttttagcatagtagtggagatactatt

SEQ ID NO: 78809 - DNA, 1000 bp, Cannabis sativa
ccctacatatatatagtagaatttcgttacaatataaatgttggaaaattttatggtgcactctcaatagggtattgtttttgataattagataattttaatcttaaattttttatatctattacacatcttgattatttaagatactttataaatttttcaaaaatttaaaataatttaatgtattaaaaataaaatttaaacagtcgtgtttattttattttatacgtgtttgaattttactttttatgttttgtaaattattttaaatttattaaaaatttacaaaatattttaaataactataatatacaatattaatatataaataaattaaaattatagcaattcggatatcaaaaactataaatagagtgcatgatcatgcatcaatattacagttgaaataacttatatcgtatatatttatgaagatattttatatatatacacttatatgtacatataaatatatatacaccaccaaatccatggcctaattatatagtcatgagtaatattgatttagaatttttatttgatgggagcttaaagtaaaaattatatgtactaagtacatgggtcaaggcctgccctaagctaaggtaagaggacttacctatcttagaagcctaaataaaaaaatgaaaaaaaaattaaaaatattatttatttatataataaaaatagatctttttttcttaacacccattttaattaggatcggccttgattaagtagtattaattaataaatataaaaattataattaccatttctcaacaaaatctatgtgcaattaatagttgtaaaagtatatatatttttatgggagcttttaattaatatttggtgaataattaataaattaaatcaatatgatacatattttttttttaatatttttcaatttaaattaatataatattttttatttgagtggaggcttgagtccctataagactcctaaagtaattccgtctttggtggtaccctttgt

SEQ ID NO: 78810 - DNA, 700 bp, Cannabis sativa
ttttaagaccaataataaaattttgagcaagacggattttcggatgcggatatatgctgtcttcagattaatactaattcaactcttatttggttagtttttcctaaacacttttttctctctcttctctctcaagggaaccaaaacacgtttttttaaaaattgaaaactgaactgaagtaaaaaagttattggtaaagaatacacttaataatttattaaaatatataatgcatgcttatttatttattatatttacttttttaaaaaaaataataatattaatttatattatcatttaatgtttttgacaaattatttactttacttttataaaattgttttaatttacttagatgaattataattaaatatgtagcttttttttcttcttttttatttaagatcttatatatataatcttaaaaatttatgtataaaaattattgagtttgccaaaattattaaaacattacacacaaactatttattttagaaaatacctactattaagaaaaataccaacatttcttacaaacaaaaaagctgaaagaataacaatgtatcattaatctatatgtataaataaaaaaagattgaatgcataactgttctgtctgctctgggaggcaagcattctgactttaattttctctattgcctcattggtctgctaaactgactccggacctaggtatct

SEQ ID NO: 78811 - DNA, 1119 bp, Cannabis sativa
gcagatgataaccttgtgttcattaattcaaatgaataataatgtcactgtctaaaacgaattctaggtcaatatgctaacttgtcgggtcaacaaattaatctccaaaagtcttacatttgtctgggccgccaaatacattaggtcgagggtcattttttggtttctcttatgggtgtaaagctggttgattgctatattcgaatggcttgaccttgtctcaccttttgatgctctttgcactaaaacatgcaatcgccttcaaggatggaaagcaagccttttttcccaagctaggcatgccatatttcttaagacagtcatactggcatcccttgctatattatgagtttctttagactttcaaaagagctgactatcgatattcactggatgatggccaggtttatgtggggttcctcgaacagcaaacgaaaattcattggggtcattgggactgtgtggaaagctaaaactaatggtggattgggattccgagacatataaaaatttaatcagaccctcttcgccaaacaagggtggaaagttattcactctccccactctctgctagtaagagttctcaaagaatgttactttcataatggttcattgttggaggcaaaaccaagagggttcaactcatttatgtggcgtagtatcctttgggagaggaaattaattggtaaagaggttcgatggcgaatcaaatctagcgtgcaagttaagattaatgaggataaatggattcctcatcccttgaccttcactcttcgcgctcttgctgcggtggctactggaacaactcttagtaccctcaaatattcaaatggtacatggaatgaagcattaatactcggtaagtttcatggtgatactgctccttttattaaggggttggctccatttaattaaagtgcagaagatgatgtggttaggcattacactccctcagaccattacacagttagtagcggctataaagtggcatctaaaaatgagtagcagacctcgccgctaatgctctgcagctaatagttaataaatatttttatttttttaaatattttttattattattaccggcggggtctgtcactaataccccgccactaataa

SEQ ID NO: 78812 - DNA, 518 bp, Cannabis sativa
gtgaaccagaatatttaatccagccacaatatgtgttggggaataatgacaaaaatgcagcataggcatatgtatgtatgtttgtatatttgggttacatatgaactataatttccaagtcatctgaatttttaatgtactattgcttttgccgggtttgttcaggcatctttgtacccatcatgcaacatttgtaaaacagacagtttaatttctttaccattgcagatgtgcctataaaatatggtgaaagagtcaatggtagaaaaatatactagaatttaacttcaaaaaagttgataagactcgaacctagtagctcagcaaacccaatagagcagtaacagaactatagaataatagctagagagcagtaacaggagtattgaaattagttgtggaagaagaggagaagctgagatattattgaatggcagaaaatgtcaagagtcacaagttccacaggaattcctctccatgatgctgtgaattactttcactaatctcagcataacata

SEQ ID NO: 78813 - DNA, 619 bp, Cannabis sativa
  modified_base (406)..(408): a, c, t, g, unknown or other
ttaacaacaaacgtattaaattttgttagggccttttaagtcacccaatttaattattctcattgcattaatgaaaattgtaacaattataataagattaatgctaaaaggcgtcagtagtgcttagtatcaggccgactcaagtattgagtagtttagactattacataaaattcctatattcactacaaaaaatcttatttttagtcacaacaaaatttgtaactaaaagttaaaaatttgtgactaattataaattatgattcttatgttgtgactaaaatattcgtggctaaaagtattagtcacaaaagttaaaattagttgtgactacacgtatttttagttgcaatatttgttgtgactaaaactaaattagtaacaacttataactaaatactatgtnnnagtcacaaataatattttgttgtgactaaaagtcacatttagtcacaaaaagtatgttgtgactaaaaagttgtcactaaaaataacagtgttttgttgtgattaaaaaaatgtagcaattataataagatcacgcgtgatgtctagcactaagatcgacccaaatattagatagtttggattattacacaagattcttatattaaaagac

SEQ ID NO: 78814 - DNA, 1357 bp, Cannabis sativa
ttagttggaattctattgagagaatgctatttttttcttttctagagaccaattagcaataaacattgttcataatcataatccttgtgtataaatctatgaaacagtcttaactccccaaaattaatctctctcttcattgctctattgtttatacttattaatgcttattttcctacccaactgacaacttctttgagtttcattctccaaagctgtttaagaaagaaaggatataatttagtacagttgttactctcctgaatcttattttcatggcttgtaaaccttaatatacagtacaacacaaaatctcttttttaatgtgtgttcggcctgtaaaagatagtttattcgagcaattcagtgttaacttcatctttcacattgtttactgtttgaatgttttagcatgtcagctatagacttctactgctcggttgacaaagtgaaaggtgtcgatggaaaggaccgtgttgttgtgacaatggatggaaagtatttgccttacaccgagcaggtcggtatcttcgtagtttgccctgcaatattcttatattaaattgccttagcctaagtacttaacaatgcagagaccttagtttttattgagaatgtccatgcccttaaatgtttaaacaagagtatatctcttgctttggatttttgaactagcttggatagcttgctacattaatctgacatgacaaaagagcctcttttgttgaaagttgacctgtaaattagttgtttaattttctttggcatattgtgaaatgtgtatcacatttgttgatgagccacatagatttggcctagaaagttaataaaaactttcaaaagaaaacatgatgacctgaaagttaaaacttattatatgatatgatttctttcttcttggatattcttcttcattttctgtagtctgtgccattatcagattcaaggcaatgaattatgaatatgatcatgttcttcattttgatcatggctaacattttttaagttatttctgaacagaagttggaggacatggcgtcaaagtctcgaacgagttagtaagcagcctctggtgtttttcaagtacttgtggtttccttctttgattttgtattgccatgattctaaatgtacttatgattgtatgccttttcataaagccataaacatatgaaataaggctatgaataaagcacagttggttgtgtatcaacatgagacaacttgtaagtaatactcttttccaatttttaaaagagtatgcataataataatactaaatttgacctgtaagtctaattatgatttttaccttcttaattttaatatgtactaaattatgttttctgaatttttc

SEQ ID NO: 78815 - DNA, 1957 bp, Cannabis sativa
gttaaaccaagaaatgccgttagatatgcacttttaatatataaagatatataactttaaaacaattttttttttttgtcatttttacggaattctacatataaatctttattagaactagcgttgcaatttaaatttcaataaaaaatcgtacgaaaacccctatttcaactaatgctgcaactacttaagaaatccaaacagtaaatttaaaaaaaaaaagttaagaaaaatattataggaagtaattccctaatatagtaattataaatgacatatttaagttaaggtagttgttaaccaagaacttttgacttaaataataacaaaaaaaaaaaaaaaaattagaaaaataatataaattaagcaggacataccaaatagctaaagcatccaaagcgatttccgcattttccaggtttcccgtcattagcatcagtattctatagtaccaactttccaagctgttcatttttataatttacattccatatacaaatagaaaagacaactttagaaaaagatgataatataaacatatctctggaatttaagaaagatgtctgaattttaccaaagcatgaccccagaagaagcagagagtttggtgaactcccaaaggccagagaaggcttcacctgataacccagtccaagtagagggacaaccaccgcggacggcgtagcccataagcccaaacgtcatagtccaccatgagaaattcatactaagagccgtgccgataacgcccaacttgagttggtacacaaataaccaactcacaaacaggtgcacggccaaggctgccagcgacaccaaggctatcaccctcgtcttcagctggctctgtagaaatctctgtagcgggaactgaaatgccaagctgaagtgcagcggaatcatgcacatcgccaccttacccgataactccgccacctctggtggctggcccaacaattttaagaccggcgatgcgaagaggtagagagggagtagcaaaacacaacatatagataaaacgatccacgaacgttgcatgtacacccccagcatggcgtatcgctttgccccatatgcttgaccgcatagggtttccaaggcactcgccatcccgagctgcgaaataaaagacaatacaatataataaataaaccaatggggaaatctttttgactattgtaatgataatgtgaaattttattactagtagaccaaaggtgaagccaatgatgatgttaatggctactgagattgcggcgagctcaaggtctccaaggtggccggcgaaggcttgtgtgataacgaaaaatgagtatgcggtgactcggctgaagatagctggaccaactatgtgccacaacttctttgattcaattttaacccttttccctagagaaagttgtcgggtaatataatcgttcttttcatgaacaacaacaagattattatgttttgattgctgacgatgatcgtgattgtaattgagggaagctttgtgatctgctagtagtgggacctttacttcttcctctattatgtcattagagctctgcatttttaaacacttctttcaatatttctaaagatttgtttctaaggtatcataagaccaagaaccatatagaaagtacacttatatatatatatggtataacttttgggagatgcatctcgtggcatcaacctagcttgctaagggaggactacggctgctagctgaatacatatttgttcatacatctttatgtaacacattttattttataaatatatttttttggaaagctgattgtatattatttttgatttaaaacaaaacagtggcagaaaataattaaacatattggctactgacatgtgaccttgcgatacggttaatataaaaatatataaatgtattgcgtgcgagtatttaaaaaccaagaacaactcaattattaactagtataaaatacgg

SEQ ID NO: 78816 - DNA, 807 bp, Cannabis sativa
taatatataaagatatatattatgaatgtagtatgaagaatctaaatacaatattttcgttttctttcctaattgcctattttaaatatgttgtagaaatgctattcattttccttaaacaattagtaattttgtttgtgattatgaaataaaatatggttattaccaaagtgatggagagaaacaagacttcatttctctgttgatgaatttgaaaacctggcatactattttgttcctaaggtataagaattgtagcttcattaatgtggagacatgtttcagagaagtttgatatgcgaatcgtatgattttgaaggctaaataatccattcgatatagtaattgagcacaattgaaccaatagaataacagaattttatgatgcgaaacttgatcgggctttttgtggcaccgatatggaagctgttgagatgtcaacgtcagttcatacttgtcattgatctttccttatcattattattgataatgataaatgctaagaagtactttaaggtgccaagcactacaagatgtaaacatcaaaatttaagattctatgagaaataaaagagtgccttataattgtgatgagtacatttttagtaaactatagttttcttttctttttaccaaagcaaactaatagacaactatataagcagaagtttgacatgtaaatttatatttgtacaaacaataatattaagaattacattcatgtatgactttaaagtaggtagtcaacattcattttagctatcataaattttgttttacacgtataattaatatatttatttaagc

SEQ ID NO: 78817 - DNA, 718 bp, Cannabis sativa
atggtctgcttgtataattttggtatgtacaacaaacatcttaaaaaaaacgatttagtctgcgatttcaaattatattttcattccctaattttgttcttatttgcttcagcaataataattttaagacatgttttgtttataagattgttacattagtaatcattttattttaaggctaattcattcaaaaagaagaaaacaaaaaatattatttttccttaccattaaaaatgttgcatgtgatttgaatgtggataacatgttatatttaaatgtgtgaaagaagagagagagagaaacaatctaagaaattcgaaacttggtctaaaaatgattttttatgcaaaaaatttatccgcttatttagtgacctttatcacttctataattctaacaaaaatggtaaagaaaattgatcatatgactatgacaaaactaaaactaagaagtatgatgtgttatcaagttctaatttactaaaataaattataatgtatgtttaattattaacatgataatttcacatcgtaaaatattatttactaaacgataaaataaatatggcagagttttgaatccttacatttgttatagcgaaataaagcgactctttctattgaatcactctaacccttaatttctaatttgtagtagagtattgccaagtgataaacctagatgtttttttttctttttttggatttggtaacagtta

SEQ ID NO: 78818 - DNA, 688 bp, Cannabis sativa
ttggaagaaagatcttaatatcgtcaagcttctaagagtagaagaggatgaatatatatcttaggtccaagaactttaaaggatgaaaacttcttctgttaaggaggctaaagagtccgactcagaatctcaccttccgaatgatgagcccaatgtggaaccctctcttcctacttccaacacagatccaactactaatacctttacacctttatccaatttcacttctgaaatagctaggctattttagttctatttatttatataaaattttaaaaaaatgttctgtgaatatattttgttttttttttcaaataaatcatagaattttattaatggtaatcaactaaaataatagcctacaatccaattaggacatcttccctagataagaccagggttagaattagaaaaacgagtcaaataatcaacatttcccaaatcgtttgacaaaaacataaaataaaatcatatgaaaaggattgcatcatcacaattaatcttaagaacacctatattttctttcgtccactgctaagaagatacagcagtagaaactgttgtagcaagttcactcaacctcatagcttgaactctcaactattgtgtatagtatgtaactgcactactaaccccttcagtcgcggagaacttgttataactaaccaccaggcccggccctgggcat

SEQ ID NO: 78819 - DNA, 964 bp, Cannabis sativa
gggaaatggttcaaacgcccagaaagaacacgacacaacaccatctgtaattccatcatggcaggaaattttagaaagattaaagtctcaagatgataaaactgcaactcaaggagtggaattagtccaacaaaaggaacatgtcaagaaactcaaaagtgaaaacaactagatgaaggtggtcctggaggataacaacgccccccatagctggaagaggcaaatgaccagtggcaagcgaaaatagtgggaaaaattaacaaatggaagcgtaaatcacaccaatccaacactagaatggtcatttggacgagaaaataactcagatggagaagtccaatgctctcaagaccaattaagaaggaacaggaaagacgtagaagtgattacagaagcagaagcacttcgtgcaactccaaaaagacgtgtcatcgcccctgcaacacctaaaagttctccagcgcaaaccttggaaagcagaaaaacaagacatgatctagaacaagttgttggccctagaagcaaaaagtcatatgggaataagcagtgaatgggaaggatccactcagtctctatttggaaaccacatcctacgggtggaagcaccacagcagtatgttgcaccaaaactcccagagtatgatggaacaggtgatctttcagaatctgaatgccaatttgaataaaagatgcttacaatttcagttcctttggaagacttaaaagccataaagtgtaagatgtttactcaaggtttgaggggcctgcggtggtttcataaccttactttgggcacaataaatttgtatcatgaattaattttgagattccaaacgagctttgcaataagtgtcagatcagcaaaggtagatacatatatgatgttgatccatcaagggccagatgaactgctcaaaaaattcataaacaggtttagcatagagtatgtaagcatcccaaaatg

SEQ ID NO: 78820 - DNA, 501 bp, Cannabis sativa
gaccgtttaatgacggttttaaccgttagcgtttttttcgattttcagttttgtcgattttgatttcaacggtgtccagtaagtcgatttaaacgatttattcaattttttgaattttatacttactcttgaataaaacatcaagcctatttaaccatttaactgatttggttttttttatcacatacaaagctctaatttattataattcaagtagtctgaaaaataagaggaaaagatcaagcctcagatttaaaaatatgtggattgtaagagagtttgtcttcaacttctgcatctccactaacttcagttatcactaacatacaacattgctccactaatctttcattatgaacattgctagttagtgatacttcataaaaattaataagaagagaattaaaccaaatactaccgatctctaatactcttctcggtatcatactcttcggtaccatatgtataattaaatatgatattttatataattttaaaaaa

SEQ ID NO: 78821 - DNA, 737 bp, Cannabis sativa
ataaaccttctaaccacgaccttactactaaatttttgccttttagcaccatgacattgaatttctatgtggtggcgctactacaaattattcagatcttcaatttcgaaagctccaatcacatcaaatcttttgaatttttctcgaattgatctcttagtgctctagcgataagacattatttaattcatcctctttgcacattttattttctcaaatttattctattcttcttcactattaaacttgaaaacattaataaccaaaagcgtaaaatggcacaaaacacaactaaaacactctaaaaatactttaaaaatctacttagtattaataaagtcctaactgtaagtacctgaccgttacgtgtcacgttattatttacatgccatttttattagtagctatttaaattaatttttaaacaaaaaataaaaatttaaggatctggaccaatcaggaacaacaacgtggtaatttactttacttacttaatgaccaaatacactaaaacacactaaaaacactttaaaatcttacttaaaatagtactaataaagtcttaactgtatgtatgtggccgttaagtgtcaagtcattatctacttgtcattttttattggtagttatttaaattaatttttaaacaaaaaataaaaatttaaggatcttgaccaatcaagaacgaccacgtggtaatttacttacttaacgatcaagtacctacagaaatttca

SEQ ID NO: 78822 - DNA, 858 bp, Cannabis sativa
agtcaatgaatagtcttttggctcttatccttttgaatcagctgtttgccacaaattaatagctaaaatagataaataatagctattgggtaccgtactctttgagacagtgctactctcgtcggtacaaaccagtttcttcattcaacatacccctttacaactctatagcagtttccaggtgaggtctaatttaacaccctccttacaacattcccactttatataggagtttcacaaattacaaatgaatagaaatacaatattgcataacagaattgagtgtaagttgctgtgttggtgatgtataacctgctgtcgaatggctttctcatgggccatatgcttagcccaagcctttttttattcttggaccaagttagtgtccaaagcactcgacctttcctatcaccaccccagtcctagaaaaacgaccttgaggacaaggccagaaacaccataaaacttactaacagactaaagagactccgatgtaaaattgataggtgtactgagagagcattggatgaggacctagcgctgaacgatttgaccagtgaagacaacaaaggttgtgagcaagagcaaattgacaacaccagttgcttcagtcccatattgtgctcgtcctttgtcaaaaaaccaggcaagtaaagagttattcccaattgcaatagaggaaaacgactcctgctaaagaggaccaaggtaaagaccaaaacaagttgaacaaaacaaatggagtgcgcaccttggcatgctattcaagcggtgagagcaacaccaccactccttaagagcaaggcggccaccatcgaaaacctagtccagcaatagtatgtggtgagccacctcatg

SEQ ID NO: 78823 - DNA, 661 bp, Cannabis sativa
catagcaatactcttttaacaagtctctatttaaaagtcgttaggataaaagtcaacttaggtgtccacgtgtagtgtatgccattggccagttatagttttggtgctcacgtggaacttagtagatctcttcctccaataaaggcattttcacatggcatgcatgatgtctctatctttctgcccacgtgatcattttttttacttggaaaattgtttaaaaaaacaaatgaaaaaaaaaatgaaagcactattaaaaaaattaaaaataagttatttctttttaatttttcctaattatcaagaaatgacaatgtttatttatttgacgttgtaattaattgggtaataataataatactctcaaaagataattatataaaaagtaatattgtataataattaaggacttttcttaagagaattacaggtgtatataacatattcatgctttagtcatttttcataaaatttagggacgaaagcatggaggaaatatatatacataaggggctgggatgggggcaatatgtaaaattcaaattaagaggggttattatataaatttataaagaatacaaatttacaaaattataagtaaaaaaaaaaaatgggggcctattacatctatgcattattaaagttacatcattaattagtg

SEQ ID NO: 78824 - DNA, 616 bp, Cannabis sativa
tcatatatatatttcaatcatacatttagtattatttatttaccaaaaaatttacgagtgtaatataaattttataaattattcacacgtgaacaatgtaggacaaacatatacataatttttttttaatatatttcaatcacacacataatatttattcaattaccaaaatattaattacaatatttattattgtgttttagtgcacaatagttctaagagtattgctattgggctccagtagtccctccctaacaccatctagaagtggcgctctacgattgattagtgatattccataaaagttattaccttggggaatatcactttaagcatctaaatgttaaaagacaccagtagtacttagcaccatctccaatgccatatccctattagcaatactctggtattttaagatgcaaattatgacaaaaaattaaaatatcattaatgttcattaataaattaaatattttaagaaataattaataccaatattgtaattaaaatgataaattacagcctatcatgatcaatgataaatatataattaaaaacaaatggatttattacgggttaaatttagcaaaagattaggcactctgttagagatgcc

SEQ ID NO: 78825 - DNA, 786 bp, Cannabis sativa
cttatgggaccgacgagccatagttacatctttccctgattatcaaccaaccaccatgtgtgaacgtttgaagcatccccaagaaaattgagttcatttaggtggcaacgagttggctaccatcatgataacctccacctcccgttgctggagaagaccaaagggtgaacaaccaggctattactcaaggagagcgcccaatacaacatgaattaatgacaatgttggtggttgacccaatcagtaaaagcattcaacaacttggagggccatctttggcgcacatccaccactgcttgtgtcacaagaccccgccacttaaagaggtgaatccagaaataagaagctagcataatttgtgagatcaaactctcaaactttccactacgaagatgagataaatgatctctgctggaagaaccaaaggctagaaactacgatgtcaagcatgcaaaaggtattgaagggcatacttaaaggcaaaacccaagtctttcacttttagtacaaaggccaccagtaaggacgcagggtcccaaccgctcatgttggtgtaagggactccacatcatcaatagattgcaccccaaaagatgagagcagaaagggcccataacgagacaaggaccctataagttgtttaagacaactcaaaccaaccaaccgtagtaagaccgcaatgagggaaaaatcatgtcatcctaggaagggacttcacccaaaaagtctcatgttgggggtgttgggttttatgccctaaataaaactacttttctaagataatga

SEQ ID NO: 78826 - DNA, 997 bp, Cannabis sativa
caattccaacactcttatgatcttcgagtttaggaaattattaaaattccttgattttgaccttctatttctggatagtttgaccttctgcatccattccctctggtcgaatttctttctctcgactttgtatgtaaaactaaaaaagttgatgattcacccgactctcttcgttggatctcttcactaagaagagatcatgaagatcaaattttaacttattgcttgtcaatgagctactcacaggcgtgacaagcatttcaactatctagtaaagaagacaaaagtatcagtactcatatttctttgtgaaatccatttccaaccaaattcaatttggttaattgtattgagatgttgaattaatgatgcgctttctgccatccgctaattgaataactgtctcatcaaataaactttattagaggatgatggcttgtcgtatattggagagagctgccataaaacctgtcgtggtcttttcttttgctatgttaaaagtaatattgaacggtaacgtcaatcaaataaccctaagggcttgtatgtgaagaagattccaattttcttctttcataccttgggacttctttttttttttttttttaagaaattgataaatttttttctaatataggtaattttcgatttgcatcttccaatctgcaccatcgaacttcttgagtttcactacctataactattattctggcgattctactctaaatacttacaaaatttaccaaatgttctgatactagttattaggaaaatttcgcaactttccctatgaatcatattagtgagaatgaaaaataatagcgcaaattacacacatgcacaaatttgataaaaaaaagtttgtcaggtttctatgtctctaaatctacggcaaatttttgactacaaagataagaaaaaatacaaaatgttcacaacgcttacaactcaacccacaccccaaatttcacccaataatttttcttaagaaaattct

SEQ ID NO: 78827 - DNA, 1140 bp, Cannabis sativa
gcaggtattataatttatgtatctaccttgagatcgataatgggaatcttcacaaatttgacataagatttagttaggattaacataacaccatgtggcatcaacctaattaagtccaaaataatattgctagggcgattcaagttgataccaactaacaacttgcatccttgattatttcaattatggcaggatccccattattatttttcactcatgtaaatgcatgatctaattgaaagaacaaaataaaagctctgaaaatataagatattcaataatcgaataacgaggcgcaatatagcaaaaaaagtgtattcatgatttactaaagagtaattatttacaagtatatatttgtgaacatttttttatctacactgtcaaaattttagatgtattttttcatctaattgttgatgatgttgagaatggaaactctggttttgattaaacgcctgaacaagcattctagtctctcttcaaaatcttgaacacacatttctagactttgcatctctatcacagcctggtcagtcttccttgtctcgttactcatgaggttgtgtagtgcagcatctacctttgcaaattcattaacatcttcatcacatccaactcttttgctttgcataagcttggaaactaaagaccaaccaccaagcttagaatgtgtctttggtccagaaataaaggacaacaaggactcaaacgccgcaagagtgacagcctccacctctctcataacactaaccaaagctgtgatttcaccatcattgttggaaggagagactgagctttttgattcaaaccctttcaaactccccaaggccttttggattgcctttttaacaactttccttgaggcagagtattttctaatctcattctcaaggctaacttttctcggttgattgaatatctcgtgcgcattcctttgtatgcaaaacagcatctttggctgcactgcacatgtctaactgcttaagagatccatccactaatgcatcaacccatttctcttggcggccttgggaaaatgcttgttgagtgaggggaagctgaagcaacttctcaacacaaaggtgcaagtcctcaagaccattgagttgatgggcaatggaagatgatgatgaagtt

SEQ ID NO: 78828 - DNA, 2789 bp, Cannabis sativa
ttctatcctacatgcataaaataggtaatacaatttttttagaatcattctaatacaagaaacatacacgcacacacacacactctctaatatatatgtgatactttaaaaccttatcaatattcaaatttctgagcttcaaatcccaaaactatcaaacaaaggcaaccaaggcgaccaaattaattgccaaatttttatgtacattcacatgcaaaaataataagctttgcaatttaaatgtttcaaagagtaatctatttttaaaggcctccatgcaagtttacatcatcacataggtgagatatttgaatcatggtgtagttacatggtgcaagacaataattttatagaagtctcagcagaacccctactcatttgtttcttctatataaagcaataagcattgagatgctggcacatatttggaattttgccttaaaatgaaagtgtgcttgagagtaagcctcacagtcatccatatttctaactcaataagtaagcctcaaagtcatccatatttctaactcaataaggcatcatactcttaaaataaagcagcacatgctttttttaatctcaaaaatccataagctctccttgcaaatcagaatttggatgggtccaagccttgcaatatttgattcacaagtatagctagctaactttttcagctggctgttatcctaattgtacctcatatcagaaaagatttagcaccctcaactagaacagccaaaacatgggcgaccccttcagctggaaatggcccagctcaattaggtgaaaagagaggcaggcaaggggaaaaaaagaactttgaaagtagagagggatttacattcggatagctatagctatatggcttagcaattctaaaaaccgagttttgtttgtttacagacttaactaggaattagtgttctttttagttatttgaaaagaacacccattccaagttaccatcttttatatcaacaaaagccgaaagagtttctgttttttatcaagatgagaagtggcaaggaaatgattaagatgctcccaataacaagagagtaagacatgagctgcataatctttccaattctttccctagtgccctatgacactaatcaagtaatgaaacctactgatttatgggatattcaaacatttcaagaataaaaaacaaaaatcgcatcctcatctgaaagttggatttcaacatacaaatcagtgactgcaagagaacacaaacatatactattttctttattaccaaaataagatttcatctcatgatatgattatttgtcagtcaaattcaaaatctaaaaatttataaattcaacatataaatcaatgactgcaagagagcatggagttcatgaacaaatattattttctttgttaccaaaatttgatttcatctctttctcaaagaaaaaatgatttcatctcaacctcatgatgattatttgtcagtcaagttcaaaacctaaaaattataaattattgatcaacttacaggggatgacagaggagaaggaagaagaaacatggagtaggttgaatcaaggtcctattctatacaatgaatatctctattatagtcttagaatatacaaaaacaatatcaaaccataaagaaacccataattgtatagataactcagcataattgaaaatcatgaatttttaaggaccatagtttcaatcaaacaaattacatttttccatcctcatttaggtctagccactcaaacaaaagtataaagtcaataatttctaagtctttgtccttgaacaatgttttagtattataccaaatcatattattaacccaatgaaattaaaaacccaatacaaaatttcaactccctaactttcatctcaaaaagctcaaacccaaatatttcatacatatttgttcttaaaatattcctctctatctctattctaaaatcctctaaattcctaattcaacaaacaaccctaataaaaaccacgaaaattaaaactaaagatccaatttttaacgtacctgaagaggtagattcgcagagatcgatagcgggcattgagattgaaactgaagaacatgggaaaatgaaattgactgttgtaaatcgcataaaggcagagaagaaactaattgtaacgcataaaaaactgttatagaaaggagtaaacgggagaccgccatagtcgaaggaagaagaagagggtattacagagaaattagaagggatcagaaggggtaaaatgggaaaaacagaaaattgtacagataaagatagagaattgaaattgggttatcgtgaattgaagatgatgatgatgatgatggtgatgaagattgactgaagggatgggttggtgactttggttattggatttggttgtgagcttctaagatcctaccaccaatttttggtcttttttctttattattattattatttttcacctaattaatctctgtaaattatatccctttcaatttattaatctatatatataaaaaaaaaaaaataataataaataataataatctttaggttatgtttggtaggaaggaaagagactagaaatgataggatggatgcacatgtttctaatggggatagagttggagccgagcccgagccgaccctagccataggcaggctagggccctaggcatgcgcccatacttttccgagggcaaaataaaaaggaatttttacaaaaatattgaattttggcaaaaggttataattttacaatcacacaattttttttttacaaaaatatttttttatata

SEQ ID NO: 78829 - DNA, 1449 bp, Cannabis sativa
gcaacacaaaaaatcactacactatttccatttgatttagcttttctttttttactttttcactttttacctttgttttttactactataactaaattaatggaagattgagttttgctctattagttttaatcatttttattttttttctatgaactttgtgaaatgtgtatcacaaatgtgtatgctgctaatctaaatctaatcaagaagatatgactttgtcagttatttgaagtaagcaatttggtaattgattatgtaagctatatttgtatatatccgaataatcctacaccattacagataaagcgttgatataagtattatctttagcattttctacttaaaatttacgaagtggttggtgatatagagattgttttggatatgagaggaccagaagggaaatttgaaaagtttggttataggaagaaggggatagtttgaggaaagtggtgtagagagaggggcaatgggaagtgacagtcattgaacttgcattctcaactacaatagtgattaattagtgaggatctacaaacagtgagcaaatagtgagaaatatataaatatatgggagatttataatgtagtagattatttaatgaaccaatccaaaatgttgtatttccctcatagaaagaccataaactccataagtaattccaaacatgaatcagaagatattgagaatttaaaaagaaagaaaatggcagagagattcagagaaaatggagaaaaataataccagatatattgtttctatttatttttttcttaaaaacaagattgaaatggagattgatgcatcatctataccaataaacaaagtcaataaacacatatactctgttgatgatactaataaacagactcatcaaatcaaatttatatgagtttcctatagatacatacaaaataaaaaataataataaaaaagtcttttacccatactactctgtaatgtgttgttgctactagtttggcaagaaagtttctgggttctgttcttagtgtttgaggcgtgagattttcaaggttgttttctgggtaagagtgatttgttgttgtgggttgagacagcagaaaagaaagaaaacctagacctataaccctaaccatttcgtgggggtagaagagaagacgttagagaacccatagaaacaatttcccaagctttgtctcagtagtaagaaccctaaaaaagccatagcggtgagtttgaggaaggagagataggttgaagaattgagagtcattaattgactcattagtacaaacaaggagactcatttgactcttatttgactttctcttattgggcttgttttgggccgaatcactaaaggggagggaggaagactcttgtttggataagttgaggaatattttttgaaattttttcaataacataaggaaagaaaggagtatacaggataataatgt

SEQ ID NO: 78830 - DNA, 626 bp, Cannabis sativa
  modified_base (590)..(601): a, c, t, g, unknown or other
aattgttgcatagctaaacacgctcggtagaagccttcctactttagaggacattgcagcttggaattttctttatcaactttctcaacgaagacaagtttaaatttatagtacttcttgttttctccatgtaccgtgatattatctttctcatccagttttcaaatatgacatacccaaatgaaactaagtcgtctccttcgatgttgggatcaatcacatgcaaactacactttttttttcttcatttgcaaagcatacaatacacaaacttgtattacaatatgaaaattaagcaattgagatgtgactagtcactaaatagaatcataattatttaaaaaatacaagtgaaaaataccttatgtaaagtatctattgacgttgctggtggagaaaatgctctgaggactattggtggtcatggaggagaatagtccttggtagcagatgctggaacagaggtagtatcaacacaagatagttcaacacctagtgtagagcccctggtagcagaagctggttcattggatgctcctccaacacttgtaccagatgcgtgtgaggtgttggatatttattttaccagnnnnnnnnnnnnactcacaagtatgttatttaacacc

SEQ ID NO: 78831 - DNA, 1011 bp, Cannabis sativa
atatatatatatatatatttagggctagacatccgactcaatccaatatttttcgcttaattcgatccattctaattagtaaatggattttaaaaaaagaaaaacttacaaaaatattggaatttaggttaatttttataaaaatgctgccacatgatttttttttttttcaaaaatactgtgtttttagaaaacaacggtataacaaaaaacagaatgactaaaaatccaccgaagaacaacaacgaaaacttaacacagtacacaatataaaacttacacagtatttttttttttaaaaaaaaacagtatttttgaaaaaaaattccgccccacagtaaaaaaaataaaaaaaagttaaaaatttcagtatgtggtgtaaataatcctttaaaaaatcatcagccgacccaatacaattagacctcaaaatctaattcaatccaatcaagttaccaattgaattagattaattttttaattaaatatttaattacacacctaatttttaatataaacttaaaaacatgaagaaaaaaaatacctaaaaatattctatggtatcaccatcaacaattcaaaattttagaactattgctaaaccaatgtgttgctatatcgaaatttttcaatagtacaagttaattactgttttatttttggttgcttaatgagtaggttcacacttcacattgattatcttgaagctgatacagatattataattacgatatcttataagggaagttcttttaacaaatatttatttgcttgtttcatactccctggaattgttacattaagttatatgcacatgtttgtacacatgtacattaagttatatgaattttggggaactaatttatgtatctttaatttgatttgtctatttaaacttaatttcaataatttatatactttgagaaatgctttgtttctgagtatgtttttcttaacaaattaatattagaatatttttatttttggaaattattttctaattaaggaaat

SEQ ID NO: 78832 - DNA, 1695 bp, Cannabis sativa
  modified_base (1159)..(1160): a, c, t, g, unknown or other
aggcataaaggaacaacttgtccgcatcatccccctttcgccttcaagttcgaaagaaatgctacccaatcccaaactcggctccctgaatcaagaaccagaaagactccccaaggggacgctcgccaaagatggtatgcaaagttacaatagaggaagaggtgctccgtagattcctcaccatccccacacaaggggcatgacacctcctcaatggtaattcttttagccaggaggccacggaccggcagagcgtcagataaaatgccccaccaaaggaccttatgtctctccataacttttttcagtgtgctcacatactgagaggatactacaaaaaaagatattaccttcgcccaaaacgtcaattttttttcaagaattgatgctaatgaaatacgttatatgttaaaaaaatactattgggcaatcaatagcatcgatttgtaacagatgctagacaatagcgtcgattatgaaagaacaaataacttaaatcaaaacatgttttgtttttgtataggcattagtgggtccttctcggtaatagaattactgtcgatttaaaataatgactgcttacatgataacgaccattatgaatcgatacactaatttaaaaaaaaaaataccctaacttttacaaaccctaaacctaaacacacacatacacaactctcaccaatctccattgtctctcattttcaatctatctctccctcactctcaatcttggtctcatctctcattctcaatctatctttgtttttgtttttaagatatgcacacttaaaaaagcatgatgatgacaactaagatgggactcgataatgatggaaacaacgacgaagaagggacagaactatatccgaagtgatggacgatgacgactttggctttggattttttgttccataattgttttttttttcttgcatttattttaatttcagatcgatgacaatgatgacttttttgttttagatctgttttttattttttctaatttgttttaattttgcgatcaacaatggcaatgtcaggtggtggtcgtcgtcgtcgctaatggatctagcctttttgtttttctattttggtgttggttggtatgattttgggtagtggtggctgtcactaaataccgatatgggtgtggttnnatatattgtatttttaatttttttttttcttgttagcatcatttgagaatcgatgctaatgcccaacttccgtcagctctcaaccaacgccaattatcttttttttttacgtcgctagctagtatagacgtcagtgttagaaactaatgctaaacgtctgtttaaaaacaacacctaaactcctgaattacctgccactactgctcctcattgtttgttaggctaatttttaatttattattcgtgtcatttttagagcttattttattctttattgtaactttttagaatagaattacacttgttttctttaattttaggtgttgacacttgaaatgtataaattggtcaagttttggaaaatggtgacctataaaatagaaagaatttcgcaagaaaataaagctaaaactttaagcttgaatttgactattttctgatcaaacttttgaaaaagtcaaaacataaaagttatagatctctctttcaaatttccaaagcatcttgaattgtccaatttcaagcaatatcgaga

SEQ ID NO: 78833 - DNA, 674 bp, Cannabis sativa
ttatggaggattttgggagttggaaatgttaaaaataccgatcaacacctgggcaacccgtttctttttgggcgaagtaagagaagagattttaattttatcaagacaaagttgtgtgatcgtcttgagggctggagactaaaacatctctcaaagattggtagaatgacttttatcaagtcggttgccctctcaattccttcttataccatgtccacctttaaacttctaagcctctcttgcaacgaactcgatttgattgtgagaaggttttggtggactggttttattgattctaaacactttctagccacgaaatcttggaatgcactttgccaaccgaagcagaggggtggtcttggattccgtcgcttcgaggatattaatgaatcctttctctcaaaattagcctggcaacttgccaccaatgataaccggccttggtgtcaagttatgaaagccaagtatttccctagagagagtttctggtgtgtgtcggagaagatcacggacagttttgtgtggaggagtatcctcaaagctagattgggtgtagctgaaggtgcttgttctatcattgtcactggggagtgtatcgatatttggtggcaaccgtggatcccgtggttggggtataatgaattcagatctactatggagaaagtgagagaaat

SEQ ID NO: 78834 - DNA, 761 bp, Cannabis sativa
tttgtcatttaacaaaacatagggtccaattgataacttttgtaaaacagaaggtccaaaatggtatttacctttttattttttatatatacacagtaatgaagctgaggtggttcatgatattttcaaatctgtgcgagaaaaattaagatctttatgtcatcatcataatttaaagcaagaaattgttggaatggacaactcaattgcagatctccacaaacaattgtcaaattctccaaataaggtaggcatttgtggcatgggttgaggttaagattattttattaaacatatcatatatttttggagtctttacaaaaatattaaattttgggtaaaaatttataattttactgtcatacagaattttttacaaaatactcaaagcaaccgtaaaacaacaaaacagattaattaaaacaacagtggaacaaactaaaaaacaatcgtggaacaatagtgaaaataacttaattcatacagtacaaaaaataaaacttctacaatatttttttaaaaaagtaaaaaagtaaaaagttaaaaattaatgtaaaaattcttgtactttttttataattgtaagatatatgttttttttatttattaattatatatttatttagattgagtatatccaattgaataattacctaaataaaaaataaatttaccacctagatagaattgtatatttttttttttttgaacacgatagaattgtatattatatacacaaataacataaattcgacgagcat

SEQ ID NO: 78835 - DNA, 652 bp, Cannabis sativa
ctctaatctctaagctataattaacatatattttgagacacttctaataacgttttagtatgacaatacacacttctttggaaaaaaaagaatttaataaatacctcaattagactataacccaccaccatatgacatttttttttaaaaaaaattatgataacataaatattatataactgtattaacataataatttattttcatataattataaattttatttatcataaaaaaattatttttaatttatcatacaatatatatgataagtgtttgattgatctatttattctaactcattattataactagtaaatgtacgtagttgtgcttcgcaaaccgcgggattgctatcttgccctttcactttatattctttgacgaataggtaggcatacgaacaagacaattcgatcaatatcttcttagcctagttcggtttatagtgccccctgtcggtttgaattttatgtataaataattgaagccctgaccaaaagactactcaaatacttgttttattggcatcaagggccttagcctaagcctcataaccaagagcactcgagtgggctgcttactttcaagggctaggatttccctacttcaacatgaggacgaagcgaaaaatccattccgttaggagctt

SEQ ID NO: 78836 - DNA, 610 bp, Cannabis sativa
agtttgtgtaatgttgtttataaaattgtttccaagtgtttgacggaaagattaaagttaagcttgcacgatactatctcggggactcaaagtgcttttgtgagtgagaggttaattcatgacaacactatcattgggtttgaaggaatacattgtatgcataaggattgatttggaaatgggaagaaggtggcttcaaagttggatatgtcaaaggcgtatgaacaggtagagtggaaatttgttggagtgatgatgaaaaggttgggatatgatgaacggtgagttgctaagataataaattgtgttactgctgtatcattttccttccttatcaatggggaagttaagggtagtgttattccgagtcgaggtctacggtaaggagatcttttatccccttttcttattctgttttgtggagaggccttatcttgtttgattcaacctgcggaggctcgtggtgatatggatggagaaaaaaaatattctagtaatattttttaaatattaggaaaattttaatatcttaaatattttttcataataaaataaatatatgttgcgatcataatataagattcaaaactggtctgttttagtaaattat

SEQ ID NO: 78837 - DNA, 517 bp, Cannabis sativa
ggaatgtcattgtgctcgagcaatttggtttagcagtccattcgcttgttttggaaggaatactatgactatgactactgtcaaagacatgcttcaggggatgcttacttgcttaccaaatgaacttaagggaaatttccttaattttttaggaagcttgatcgaaggagtgtggcgagccaggaacgagctgatctttaagggcaaaaggataaatatagaagcagttaggtgtgcgatcctgaggaaatataacgattgtctaatggttggggaagccgattcaacaattggcatgagtattaagcaaacaagagctggagggaagatcactagtgctactgaagttgttgtcgtgtgtgatgcatcgtggaaggaaggtgaagcaggcttagcagtggggatgatggaaaccagaggaaaaaaaatctgctggtttgcaaagaaagcgaaggctgagtcggctgctgaagctgaaatcaaggcgatcagatgggcgatggatattgctgctaaa

SEQ ID NO: 78838 - DNA, 1192 bp, Cannabis sativa
  modified_base (1129)..(1133): a, c, t, g, unknown or other
ccgaacggtctccagacccatgaggccatgagggtgggtgggttgtgggtttggaacctttgggtctctcgcacggcgcaaagaaaaggaaaggggaactcatgggtactggctaggttaggttatgattttaggttttttagtttaggtaagtaattaaatgtaataacaaaatatatattttttaaataggagcggtcaacggccgggtatggattatatattcagacctgagcatgtgaaaaattcgaacccgatcccacctgttggtacctcatgtgtcaacccgacccacgcatgaatagcaagcttttcctttatttagggttttgcgggtcgggtttgggggtgtttggtgaagggggtagggattagatgtgggtgaatgtgtagtttacttgttgtttggttaaacattttaggtgggtatgtgtttgctttttgtggatcccactagattttaaaaagtaatcttaacccatttgatgacttgagtattgcattcctccacatgttaactcttcccacactttattaggctaatcaaaactagggttgttcatataattcataatctatggtttcaaatcccaactaatttagaccaaactatttgagatcagactaaataattctgttgtcaatggtttagtcaatttagaccgtttataattctctggttcggtcatggtttaaaaattttcacatgtgattccaactaaatcaaattgcctgattcttgatatatacttcatatgatttttttttactgaatattgatatttaggaacaattttaggtatagtattaataattatctttatattgtgttaataatatttgtttttattgttatttacatttaagtattataaactttaaagtaaaaataatttagtaaaaaaatattaaaatatatacaaattacaaattatagttttaaactaaactaatctacttttaagtggattgatttagtttaatttgagcatttaattaagttcgattttgaatttttaaaaactaatattattggtttggttctaataaaataaaaactacctgcgctctaacatttttgtatggggcctcaattgaatttaacttttttttcctcatccgatccaannnnnttagtaattggatttgaaaaatcatcatccgatccaatccaatccaattagacctcaaa

SEQ ID NO: 78839 - DNA, 618 bp, Cannabis sativa
  modified_base (523)..(525): a, c, t, g, unknown or other
aatttacccggccaaattagcggcagacattggggttcgccactaataccctcattattagcagcggattgtgtccgccgctaatgccttaaattgttgtagtgctaccagcactatgatcgcactacgggatcggtactatgttctttccactatgatagtatcaataacacccaaaagtacaattggtcatgatatcactcttaactagtactatgctcgtactgccgaaccgacacagtggtacaaaatggtttttctgaacgtttttaaacagtcatttaaagtattctcgtcaatttctataaacgtcgcctatacgaccgtcgcaaaacgggcaaaataggcgacgattaaaaccattgctaatttggacttctcgacggtttaaaactgtcccctataccctgttatatgcgacggttttaaaccatcgggaatgtaaaaaaaaaagaaaaaaaaatacagatttttctgtaaaaatctgtattttcctctagttttttcctgcattagttttatnnntttacctaaattaaaataaaacagctaattaagtttattataataacaactaactttaaaacacattaaatttatacaataacaaaataaata

SEQ ID NO: 78840 - DNA, 524 bp, Cannabis sativa
tgtaagggcccaatggagacttgaagcgaggatgttacattaacataacataataatatcaccgtacaaaataacacaacaatatataaatactcgcaatgttaggacaaataaaacactcacgattagttaattattacttagaagttattttttttaagctatatataaacaggtatttaatcaaaccaataaatatcacattaagaaatgtactagacaccaattttaactccattcaatattatctgttttcttatttctcaataaagaaaatctcatattatttagatattattgtggatcttgtattataaactataaataaatgactaatttttatattattcatctgagtgattaatgagattagtattattttgttttttctaatgatattagctaggaagttatactgtaatcagggccagccctaggcataggcgggctaggcccgtgcctagggcccacactttacggggctcaaaataaaaaaaaataaaattattaggcttttatttaag

SEQ ID NO: 78841 - DNA, 919 bp, Cannabis sativa
ttttttttttttatttatatctaccgcactaaggcggggtaagttatctaatttccatataatttaagaactcctcctactaatcaaccttttgagaaagagatatgtctaacaccatcattcgctaatattcattcataaaatataagtaccaaccttttagtataagtttatagttcttttattaattttattaacttaaaaactttgtttggatgaaaatttgaaatgaagggtcaaaccaaagagtgtgacccgaattgacgagcggcggcgcaggtgttccagcttgccaagaagtacaacacacaccacacccatctcccttcccaaacaaaattagtctcattcacctgattttcctctctaaacccacacggggcggggcccactcttcccggttttaacacgtgtcgcccttatactcttccactactcagctgtcaactttaattaaaattaaatttaaaatatatattatattatattattctcaaatgcgaaaaaggatgttcactgtgactaaagtttgatcatcataatcagagttccatttccaccattgaaaacacacacacaaaactcaaaagggagagaagaaagtaaggttctttctctcccctctttcaaagctatctcactttctctctctcaaagttcgtacactttctcagaatcttatcgaattcaggtgagatcgccctcttaattggattttcattttttttttttaatttttgtgatttttatattacagcttgatttcggtggctttatctgtatttgattttttttatgtgttttgtcaaattgggatcaattctagggtttctttttggttgcttatggatttttttttaatcaaaccctaattctcaattcttagttgtatttcagataagtgaatagaattagctat

SEQ ID NO: 78842 - DNA, 705 bp, Cannabis sativa
cgacggaggaaatgatgggcaaatcgatattttgtgtcagaacattttgaatgttccaatttggcacttttttgttcctacagagtacagtacagacctacactaaccatatataaagtatatacgggaattttatagttacactcgacaggtaggtgtttttcatttttgtttttggtaggtcaaacaaattataattgcttatgtatctataccaatttaaaaaagaaaaatcaaatagagtaaatatgagtcgggttttttaacacggcacgagcgcgacccaatacaaaaaaatatgtggttagacacgacacgaaaaaaaatatggaaatagacacaatataacacgaaaaatatgatcttaggcacgacatatcacgatagcttgaaagtacgacacgtaagcacatatagattatctcgaaagcacaatacgttaaaatgtttaataatttgataataataacaatgataaatatttatttatcaattaaaatgatagtaatatttaaattataataataattattttttgtttgattgtgtgtaaatattatcgaaaaaaatataaaaataactaaaattataaaatatacgtaatttaatatttaactcattaattgtaataaaaatataaaaatataaagcacgaatttgagcacgtataaaaaaaataaattggtctattttagaaaaatggat

SEQ ID NO: 78843 - DNA, 705 bp, Cannabis sativa
ttctcttttaattaacattagtattttatttgttgctgccatttttattatgttattttcaggtaatagcttttataccaaatattgttatttagtaattttttgacttgtttggtaggtcatataaaatcgtattgtattaaataaaaaataatattatgtttggataaaaaatttattgtattaattattacgattataaattttactacaaatgaatcatatcacgtacttataatatttagaaataatttgaggtcaagatctggatccgaatctaagttcaaaaagcctcaagccgaatttggggtctggataaagatatgtatatttttatcaagtataattttacataacttattaatataaatcaataccatatataatattatattaaataatattatacaatacaataataatgtatcaaagtgatccttattaaaatatttaatttcgttgtgagctaatattatactttatgattagatgcatcaatatataataacatgtcattttcttatcttattattaaaacttagcctttttttttccattttgacagcaaaaattaagaatatttttatttaaaaatattttagaataataagtctttctccaataccagggccggcccaagcattttgggggccttgtgcgaaatttttaaattgggccctttagaaaaaaaaaatcatgtacatt

SEQ ID NO: 78844 - DNA, 661 bp, Cannabis sativa
gaaaatactaaaaaaatatgtatatttttgaaggaaaaatattttcttgggcctctggtttggtgggtcctaggtgcgggcttagcccgccttagcccaggtctggccctgtactccagcccatctcacgttcaaccatctctgtcacctccaggttgctctagcttcaatgacttttgttggacgcaccaccaagactatagcttgaaagaaagttttctcactctcaaatgaacaccccatgggtttcctgatatcccctttgatctcgaagtcgaagcaccaccgtcatgaagtggtggtgtcatcgactcggatccgaacccgaactcaacttaaataaaatcaacaaataaaaataaaaaaataaaatttaaacatatttttattttctgttttaaaattaaaaaataaaagtgattatagaatgaatttttattttttaaaaatatttttttttaaaaaaattactttaatttttgtgattaaaaaatttaaaaataaaaatattactaaacgcaacggtgtatcactttacaacaaaatttgttaaaactgttgggtcccgttcttccaccttattgggctgctacctcacattgactcttatattagtatgatattgtctgctttgggtctaagccctcacggttttattttc

SEQ ID NO: 78845 - DNA, 755 bp, Cannabis sativa
ttttggcagagacgattccagcattatgtgaccttgctgccaaatttctgcacctggcgttgaaatctaatgttgaggcacactccttactttctaattcttcaacattagaaggagcctcaatcaatctagatcatttggatttctttcttggattattttctttgtgttctatcaacaaaacttcatttaattaatactttttgcacatttttttttctcaaatttgctctattcttttctaatactaaacctgaaaatattaataaccaaaaaaataaaattgcacgaaatacaattaaaactaattaacaacacttaaaaattctaattaaaataggactaactaagtcctaataatggcctcctttgggtctcaatttgactcctcaatcagtcaagcacgacaagaagcagtaggtctaggcttcaatgctccaattcctcctctagctccgtctgtcgtcaaaattccaactccgactatccctacgattcaacctccagtcgtccctttgctagcactcattaccattcatctcgacatggaaaactaccctattggcagtcttaagtgttgcctgcggtttgtactcatgaatacgatgggattctgttgggcgccaaacccggccctgtcctcctgaatatctcaacatttaggctaatcaaaatcatatattaccaagggagtaaatactcaaggattaaaaattaccaggctgttttgagttggctcttagactcatttcata

SEQ ID NO: 78846 - DNA, 1033 bp, Cannabis sativa
cctattgaagtcgattctatgattaattacccattactaccaataatgtcttgggttttcgcttttcagtgtgattttatttgcaattgtttaaggagcattgttacactttgggtactccttttagcatttctattgtttatgacaaaaattgaaagagtgtaataataaaatagtttatgaatatttgaataaattaattttttttttcgggaagaaaagggatcaccacgtgcagatcctttccccacttatttggtaggtgggattcaaagaagaatgccagtaaattaatttttgtttacacaataaatcaatttttgtttactttattacagcgtcacttttcaaaaataaaatgtagtaaagttagtttgggtcgttagtgtgtggttcaagatggtagattggtgaaattctccgattttaattaattccacattttatgaagttaccttgatataggtatagttaattttaattaaaaaaaaatgtcattatccaattttttttgaaaaaaactatgaagacctttggagcttaaccgctagcaacattattaggattttcttattgtaaaatgtaaactgtataattagcctatttttattgatcatactatattaacaatattattcatcatctaatgaattgtgtaaaatttctatttttctcccaaaaacaaaaacaatcaattcttttggtataaatcatttttcttattgagaatttgagaaaggtttaggggcgtgtggactgtggagataaaaaaaattaattttaaattttttagaaaaatatataaataaatatcaacttcctagtatatcttcttctctaaggcgccactgccagcaaaataagcagcgttggagctaatgtaatgttataagaacttgttggaggactgttttagtactaggtgctgatacctcgtaggcatattgtctgatacatatcagacaataccaaacatatataatataagtacaattacaatatcatataaggcaaaataacagaccccattaaa

SEQ ID NO: 78847 - DNA, 523 bp, Cannabis sativa
tcacctgctgctgtccccactccatttgttgctcctgcatcaccctccagataccatctgagattcctgtagctcccgcacctgttctctgtaatacacacaatatgaaaactcgtggtaaaagtggcatcaaaaagcctaaagtttatctagctactcaagttcctacatctcttcaacatgccattcaatagaataatggaatagtgctatggctgaggaaattcttgccttgaatagaaacaaaacatatactctagtcaaactaccctggcagaactgcaattggaagcaataggtatacaaaatcaaagaagattctgatggcagtgtcatcatgttcaaagccagattagttgccaagggtttccatcaacaacctggctttgactacatagagaccttcagcctagttattaagcttgtcaccataagagttttccttactcttactttatctaaaggttgggacatcaaacaactcgatattaacaatgcatttttaagtggtgaattgcgggaa

SEQ ID NO: 78848 - DNA, 627 bp, Cannabis sativa
aggagaaggcaggaaaggaaaagacatcagccacgcgtaagttcccttttttggttctaaactccatgacccttggagccaatacctctaaagcccgtaagtcccctttgaaccttcatttctttccttcatctcaagattactcttacttaaggctagtgggttctaacatgaggctatataagtttcggatcccccatactcggtgggacaataatgtaaaaggtttatatttttcaaatttgagccatttcttgggtcgatctcaaatgggctcttgtcctcatgttcccatccttttggatcatacctactacatgacctcgagttggttccttccttcagatatttttttaggggatgacgacaccaactctttaatttatgaattttctaagacagagttagagcatcagggtaggtttatccttccttcctgtattatacttgtatatgtggttcttatgtgctttctttttcacctttaatttattttgaatagcaaaacccaaggataatctgctggccatgctagccaccactcatagtcttgagtcggaggtgcataatcctccccaagtggtggtaactcccgaaggtccgaccgaagaggcgcccgggaaccag

SEQ ID NO: 78849 - DNA, 1179 bp, Cannabis sativa
gttgagttatatgtcaaagaaattgttcatcttcacgtttctccaaagtctatagtgaatgatggaaatttaaagttcacatagagattttgggagagtctgcaacgagctatgggcaaacagttgaaattcagcacatctttccatcctcgaacttatggacaatataaaagaacaatcaagatattagaagacatgctacgggcatgtgtattggattttgaagtatcttgggtaaagtatctttcagctatcagtcaactatcgggatggccccttatgaactgctctatgacagaaagtgtagatcacatactcactgagatgagttaggtgagacaaagtttttgggtcccaaagctattcagaagataagcgaagcaattgataagattagaactcgaatgcttactgctcagagtaggcagaagagttatactgatccaaagcgacaggatattgactttcaggttagagatacggtatttctctgtatttcacccatgaaaggagtaaaacactttgtcaatcgaggaaagcttagctcgatgttcatttgaccttttaaaatcctagaaaggataaggcaagtggcatacaggttggctatgcctccaacgctaacagttgtacacaatgtattcacgttttaatacttcggaaatatgtgtcgaactcatctcatattttgagttacgaaactttagaactttagcctgatctgtaatatgaagaacaaccagtgcagatactcgatagaagagagaatgttctgaggaacaaaacactggcattaataaaagtgttatgaagaaacaacaaggtcgaagaggcgacatgagagttagagtctgatatgagaaagagatatctcgagttattcaggtaaattttgggacaaaatttctttaaaaagagaataattgtaatattttagaattagtaaaatagcaaccctaattaaaatgaattaattataattgtgtaattatattattatataattagttatatgaaattatttgagaattattgcattgaaggtcctatttatgagttaggggccttttttgtaattttgacccgagaaggataatatcgtaattttattttattttgtgctaaaggactatattattatataatatgttcattttgtcttattggcggtgatttttg

SEQ ID NO: 78850 - DNA, 964 bp, Cannabis sativa
aacataggaatgatgatttataattagtcacaattttttttacttttattaacaaattttgttgtgaccaaaagtaagattttttataatgacagtattttagggtgatgtgaaacgttaatttttgcttaattgtttatgtagagttattattgtaaataatttccagattatgtactatattaatgtgaagatccctattttattttattttggttaaaagataataagtattatacatgctatgatatgataactgtgcttgactgggccaagtcaaaaagatctatgatctattgtagattctattcatgaggctaaattaagcccacaagttttcagttttgtttctcagtttcctatttcaaccccttataatattcttcctcattttgtgcagtttctcaagtaagaaaaaaagaataatgtaataatttccctatatataatactcatatagttaacacatcacaagcacaaatactgttcaagtaattttttcccataattaattaattaaatttagtacgtacgtacgtagctataaccatatggcttcagccttattattcattataattttcatgggagtttgtggttctcaagtgtcatattgccgagaactccatgatagtaacaataataatatagaggaagatgggatcaaagccttgtcgaagaggcatgaagagtggatggtgagacatggaaaggtgtacaagagtgcccaagagaaggagattcgtttcaacatctttaaagaaaatgtcaagtttattgagtccttcaataaacatgagaaaaagtactctttcaaaataagtatgaacaagtttggggacatggctaaccatgagtttagggctcttcgtaatggatacagatcaacggcagccagtagtacttcatcatcatcatcacggccaacatcatccatgttgttcaagtatgaaaatgttactca

SEQ ID NO: 78851 - DNA, 845 bp, Cannabis sativa
actgtatgcaacatataccccattcctttgatcgctgatttgtttgaccagctaagtggggcaaaatacttcacgaagttggactggagatcaggctactattaggttcggatcgcagaaggggatgaaccaaagactacttctgttactcagtatggggcattcgaattttgagtcatgtcgtttggattgaaaaatgtgccaaccatgttctgtacactcatgaatgaaaatgaagtcttccatgaagacttagacaagtttgtggtggtgtacctagatgatatcgtggtctacaacgtcactttagaagagcatcgggaaaacttggctacgatgtttcggaagttgaggaaagaggagttatatgtgaagcgagagaagtgcttctttgctcaagaaagtatcatgttcctggattatgttttggaacacgggaagatccgcatggatttggaaaaggtgcgggcgatccaaaagtggacgaccccagccaatgtgaaaataacgacgctagtttctcggtctagacaattaatatagacgatttgtggagggctattcgagaagagtgacacccttgatagagttgttgaagaacggtgttacatggacgtggtctgggaagtgcgaagaagcttttcaaagtctgaaagaagccatgattgaagatcttgtattagccctgtcagatgtatgcaaaccctttgaattacagatagatgcgtcagattattctttgggaggggtactcatgcagagggccaccccgtggcatttgagagccgcaagcttgctgaagcagaaaggcggtacacagcgcaggagaaagagctcctagcagt

SEQ ID NO: 78852 - DNA, 809 bp, Cannabis sativa
tcttgagaatcttcaaatgagttgtgattatgaaaagtttgagcctaatcataatcttgaagcagaccttcaaccttaaattcagtagaggaaaaggaaatccttctcttgttaaacaaagtaatatttcgacgattccaaatttcccaaacaattccaatgaaaactctcaagtcagctttagacaaatcttggaagcctcttaacagatattccctaatatcacaattcctagcaactcggtagaaatctttaaaccttgaatctttccactctctcaaagctctggaacactctaatagtgcatgagtaacaaatttaggacctttagagcagagaacaaagaggggttgacaaaattttcttatggaaaagattaagagctgtaggaagactatggtgaaaggccctccagataaaatgcttcaatttaggaggtatttttaaattccaaagggtcttccaccacctgaccagagaattactgctagaagaggaaggtaatgaattaacagacttggccaaatggtaagctgaattaacagtgaacaaacccgaagaatgatgctcccaaacaagagtatcatccagagaaatatcagcaagaggaacagtcaaaataacctggattacttcctcatcaaaaaacattgccaatttctctctatcccaacacccatcaacattaataaaataagaaacagtagactcagggggggagggggggcgatagcatctttgaaagatacaaacctccaaccaggaatccaataagagtcaatagaagagatagatctgccattcccaac

SEQ ID NO: 78853 - DNA, 541 bp, Cannabis sativa
tcttcaatccctagtggtcttccttcgatattcccgaaagtagaagctcttttaagagaaatcacttggtgctttgctgtggattttcctattgattgtattgtatttgattgttagcatctaatcaacaaaattaagcataaatggcaggacaaatcatccctttctgatttagttcaaaagattgttttctttttctcttattttcctaatgtttctcttcattatgtctctaggaactataatgttttagcttatagtttagctcaaaggattttaagaactgataaaaaaattatttggaatgggtgtgtttcgaatgtatagttgtttaatccttgtaacatgaattttattgtatatccttttggagaaaataatcaagattagaggtgattgttgaccttgcgacagtggctttggatgagtttcccgctgctggtttttctgatatgcagcagcgcctggggctacgaggaagggaggatctaggtgaggtgttggaggctggttgtagggactcggggccgagctttgttgc

SEQ ID NO: 78854 - DNA, 520 bp, Cannabis sativa
ggttgcctccgcccgtactgtccttctgtccttccagagataccttccgtggggttcacgttccccacaaaaaccatccccttgacccgcacgccatgtagggggagagggaaataaaaaaggctttgggggagcgtctagaagtagataagggatttctacgcaggcgggccaacgtgctttcggctgtgagaaaggccgaaatctcggaaggccttcatgccttaaccccaactaggacaacagttgaagtggaggctttggagaactgtctggctccaaaggtggggagtgaagctgcaccatttacagtcaaactcttagattgggtaactggtaatgcttccgagttgcccctggaaacttgggcaacatgcagtattgtcgatgcctttgccttagcccatgccgctaagcaagaggcagttggggtaaagttctgaatctcttcattctgatctctatcattgtattcaacttttttctttattttgcatattgcagcaggtggctttgttgc

SEQ ID NO: 78855 - DNA, 635 bp, Cannabis sativa
  modified_base (480)..(489): a, c, t, g, unknown or other
tgatttggccctggtttgcatagattgtatgttggttgttggggtaggttgaagtgtctggttaggacatgtgggacagatttctggtgaggtatttggtgctggaatgggtgctgagactggtgctaagacagatggcaggttggttgtaggatcaggtatagagtgagagcttgaagttgaatgatgtcgtggctcttcagtcaagacgacagcaggttgttcctcagtaacacaatgagacaaagtattaggtgctgtgttaaatgttgcagtagcaaaaatttgagatggttgtgagtttacctggtttgtagtagatttgagtaatgcaggaaactcttcctcattgaacacgacattgcgagtgacatatatttttcctgtttgtgtttcacacatgtatcccttatgctgaaaagagtaccccacgaaaatacattttttcagatttcatggtcaaaagaccaaaatgccccnnnnnnnnnnctcacatattcatacatacaagggcataattgtcacttcacactcatttatttccaattaaaattttagatttcttactatcaaataaaatgccaattaattcaattcaaattgcatttcgggcccaaacccggttcggcccgaaa

SEQ ID NO: 78856 - DNA, 1092 bp, Cannabis sativa
gctctattccattcctctacctttctgaacccgattcccccttctgacttggcttggcaaacagaattccaagctattagacctggaccagtcattgcatgctggcccttccatagaaacgctctacaaatggcttctatctcattcactgttttcttgggtaaaatcattatctggctccaataagagtgaatggacatgagtactgaattcactagaaccgcccttccagcaaaagagagattcctagtgctccaaactttaatacgggaggtcattttctcagcaagctctttacaatctgtgcttgagattcttttggcacatatcggcactcccaaatatctaaacggagcatagtgcctaccaaaaccagacatatctaatattcgttgtatttccctgtcattcattccactaaaatagacagcagttttggtaggattaggatgcaaacctgaggatagagagaatagtttcagaccttgtagcatgaggtagacacttttgaagtcacctttactaaacaagagcacatcgtctgcaaagcttaagtggtttagcttgatttcctcacatctttcatgaaaccgaaactcttctttggaaccaattctttgcataatcctggacaggtattccattcccagcacaaaaatgagaggagacattgggtccccctgtcgtaatcctctctttgactcaaagaaaccatgcagggaaccattaaacatcaatgagaaccttggagttcttacacaattcatcactagctttatatactgactagggaattgtaaggcttccaacatttcttctataaagtcccactccactgtatcataagccttctgaaggtccagttttatcatgcaattagccttggcattcttccttccatagtgtctgatgaggtcttgacataccattacgttgtgagcaataagtcttccttttacaaaaccactctggttctgagcaatgaggcttggtaggatattcttcaatctagcacagatcattttggtggccaccttatagacaacattacagcacgcaataggcctgaaatctttcactgtgttcgggcac

SEQ ID NO: 78857 - DNA, 550 bp, Cannabis sativa
ggccttgaacctaacctgttcaaaaccagggatgccatctttgaccctaaagatccatttgcatctgattagcctctgtccaggtggtctcttgactactatccatgtcttgttcgtgaccagtgactgcttttcctcatcaatggcctgcaaccatttcttgccatcttttccatttacagcttctagataggacttaggcactgtgttgtcaacttcatcagtgacagacaaggcatatgctgagaagtcagcatagccaaatttctcaggtgccctgatttctctccttgttctatccctggcaagttggtagttatctaggttacttgttgtatctgtttctatttcctgatctgttgaagctagatctagattctcagttctttgttcaagttccacttgaacactcctgggagcagcacttgagctcatgggaatttctctggtgagttttagtggcatttcatcttctctgaagatgacatctctgctaattatacatttcttgtacccttcctccaagcaccagagtttgtagcccttgatt

SEQ ID NO: 78858 - DNA, 721 bp, Cannabis sativa
atgaaaaaaattagactaaatttttttttagatgccgaaacaagtaaagggtgtatcagtacatccattttaaaggagtgtattgtaaaattacccaataatttatagttctactatttattcgcaagtccgaaattcctctaagggttaagcccaaaaatcaaatgcagaagagaaaaatatcatatgtaacctgttttggaaaatatcatattcaatttatttctcaaaaatattatattttaaatttttaccattatatactaagaaatacaaatattttttcagaaaaaaaaaacacatgctttgattctttcaaacaacttaataaatgcattataatgaatttaccaaaaacaaaaacaactcagtgatttaatagaggcattactacataaagatatcatacatatatatgtattttatttttcacaaagggacaaaattgaaagtttatatatttatatatattatttagtgtattgtgtatcttgtctcatttatttttctttattttctttttccaggtgaaataagatttctaatgttcatttttctactagctagtgtacttgttgtaggagaaataggaaaaaaaaatgagagatcatgggttcaaacttaagattttgaaactattaagttattaactaattgtaaaatatcattacgctacattaaaaaaaaaaaatgaaaatgtacttgttgactttgaaaaaga

SEQ ID NO: 78859 - DNA, 622 bp, Cannabis sativa
taattttagttttacatgttttaaaagtttaattgtaaaattataatattaagtattaaattttattattattttatattatttataattgataaatacatattattattattatgtcttacgagacttttcaggcttgtcgcgtggcgtattttttgggctagtttattcgtatttacgtgtcgtgcctttcgtgtttctcgtattgtgttccatattttttcatgtctaatcatgatcgtatcttctgaacttgtgttggtttcgtaccgtgtcaaaaaactcgactatagatggaaaaatcatagttataaaaacttctttctttttacattcagaaagatctatttgatttcatttattaattaagaattttactccgcgaactttgacatgtaccaaatcatgttgcttgaacttttaagatcgttaaaaatactccctgaactattgagattgttggatttaaaaatttttgtttaattttagtaaaaaaaagtttaacatgaatgaaagttcagggactatgatttaatatatgtcaaagttagaggggcatggtttggtagatttaaaagtttagggagtatagtttagtacataaacaatcactgaaatagta

SEQ ID NO: 78860 - DNA, 563 bp, Cannabis sativa
ataatatatttttaataaactcgatcccaacactgactacgagtcgggtccggtctgtcgtccgagtctaggtctcgagttgggtcccaattcagggtccaactccaggttcggagtccgagtccgaggtcccgagtttgaatcgagccccgtggtctgtggtccgggtccgatctggggttcgagtttggggccaggtccttagtctcgggtctgcgttccaagtccctggtcttggtccaactctagatcctgagtctgggtctgggtcccaagtatcaagtctagatccaagtccgagccttgggtcctgagttccgggtttggggtctgggtctagtgtctgattctcaagtccgggtccaaattcggtctgcatcccaggtccctggtcttagtccgactttggatcccaagtcctaggtctgagtcccgggtttgggtcccaaatcctcgtctgggtttgaatttgtgtctcgggtctcgatccctggatccgggtcgaaaattaggattgaccctggatccgggtcgaaaattaggattgaccctggatccgggtc

SEQ ID NO: 78861 - DNA, 766 bp, Cannabis sativa
agtttagctaggaaaagcttagaaaacaagctaactcaattttttgtaattcttttccttggtggttggctgatttatgtatagctgatctctccccctctttgtagttgctggtgctctgttaataaagatgttctttttcaaaaaaaaaaaaaaacagttataaataatatttatacatatttttatctctttagtctttatattttgtgcttatccaatagaaattgttggcttaatttttttttgttatttttctgtttaagttaacagttaaaactaacactattacaaaaaaaaaattaattttcaaaattaggataaaagtttaattttaattttaaaaaatatgacagtatttttatttaaatatgatgtaagtataaatttaaatttgaatcaaattttttatatataagtttttaaaaataaaattaaattagatttacattttgcattgttatttaaattcataatttttattttgtaataattgttatgcttattagtaatttttttgaacttttattaggttgtgatatctccagaacttcagcatgttcctcttgttcatttcccttttgataggaaagggtttccggtatgagatcatttcttgagtggcgatgaagacagcctcaggtttctctgttaggagggtaaagcaagtgtacttttcttcctttttcttctgtggcatgggagaagtgttaaacttcccctttttgccattgttcctcctagagttgttggtgttgcgcttgtt

SEQ ID NO: 78862 - DNA, 798 bp, Cannabis sativa
gtgttcctttcttcaacatcctttaaggtaacaagaaatttgagtggatagaggaattcaagaatgcctttcaagaattaaaaagaaaactagcaaagcctctcgtactctataaacccatggacggagaagagttaggaatatacttagctattacataatacgctataagtgtcctgctgattagagaagagaaaaatgtccaacatccagtctactatatcagcaaaagactcattaaggctaaaggattgtatctattaatagaaaagcttatttactgcctaatcttagcaacaaggaagttaaggccttattttcaagctcatcctattcgggtatacaccgaccaaccattacgccaagtattgcaaaaacctgatgcttttggacgattactgaaatgggcgatagagttgggttagtacagaagaatctttccacccggaatagaagtcaaggaacaggccttagtagactttgtagttgagtgcacgggcaaagaagaaagtagcacaagggacaacctaaagccaatacaagaatccctaccgacaacaacgaagacagacctacctggaaattatacgtagatggataacctacaaatcaactatttggtgcaggaattgcccttgtcacaactgaggggcaacctctgcacggggcagtcaaatttggatttaaagcttccaacaacgaaacggagtatgaagccttcattgctggcttgaaacttgctcgggagcttcatgctgaatacgttgaggtctgtagtgattcataatttgtagtaaa

SEQ ID NO: 78863 - DNA, 558 bp, Cannabis sativa
  modified_base (463)..(473): a, c, t, g, unknown or other
gtaatgttttaatttttttttaattaggtaatggattttttttagctattgcggctataatagtgttctctttgaatcagggctgggcgtgagctaaggcaggctaggcttgcgtctagggcccacccagtccagggtccaaaaaaatatttttcatttttttagtaatttttaaaaatatcacatgtttttttaataaaaggcccaataattgtctttttctaaggcccacccaatctgccttgctttggatgcgattttacatgtacaataaaactcaagtgggatatcgtagtgaatcgttgtgtgcccaattgagcgaaattatctcgtattttaattcaaagttaaaccaacaaacttaaaaacatagttaaaagtatctataatattttaactaattttaaatttaaattaaaatttccttatataaaatatttacataatttttatttttaaatannnnnnnnnnnattataaaattaataaaaatattttgttaactaataatatatacatagataattaaaaaaccacaattaaattaagaatttcatt

SEQ ID NO: 78864 - DNA, 509 bp, Cannabis sativa
aagacttatctgataaattctaggtgatttcagatttcagtaaaatatgttgaaatgacataacatttccaccaaacatatcaaaagtagcaaaaaaattatttttaatatatggagcgaataaaatatccaattatcaacatgttaatgtaaatttaaggatgaatttggagtgttttttttttttttttgaagtgctatattttaataatgcaattgattaataaagttttcattacatttcaaaaaaataatgcaattagaggtttgtatatctactgctcttataaaagcgaaagaaaaaatctcttaactttttcccaaaattagaattctgagaacaaaatagaaagaaaaaaattacaataacacaaaaggtttagaaagcctataaagtaaaacaaagaaataaaatgaaataagaaatattgtttttgatataaaataagatatattgttgctacgttaaagtaaatattttttctaaaaaaaaatagaatggcctttgt

SEQ ID NO: 78865 - DNA, 3391 bp, Cannabis sativa
acaagaaaataaaaacattactatttgctgtatgttgtattgcgtttgagaaataagaggacgaaagttaaaatgactcgtaagaaaacagaaacaaaaaaaattgaaagcagaaaccacacctcccataatccattaaatatagggaactgtgacaagattgtatatcgaacaaggaaaatcctacttattttgatatgatgaataaagaaccaatcacactaatcctatacataactaaatataaagaaagggctaagaattcttcatcaattattctgatatgcaaagccaccacaccatagtagcaaaataactcattctttgtggatgaaccaaaacaattatttttattttatttttttgaaaaagagaaagggtcctcttgttttagacaggaccctccccattatgtattgaaaattctcacttgtggcggaggaaaaccttggttacaaaaaacgctcataaacaaataaagccaataacagttagcactcagcaatgctaaaagaaaattgctaggccacaaatatactgctaatacatcaatgatttccattctctacataaatctaaaaaagacaattcctcaaaaaacctggtcttaaattgaaattttcaaccaatttcaattatcaaccaatttgaaattttccacattgatatagaacatttagaagagcaacatttcaacaaaactacagcagaaatgaaagatgagacacggcaagtcaactgtaaaactttctttatcagcccaaactcacaaggccagcaaaaatcttgagccttaacaagcaattgagagaatccttcaatattatttaaaattaaacacttgtcgttgttaacaaaagatgatagacataatcaaacttacaccctagtacactattcacgatctaataccaataaaaacacacgcacatgcacacacaacaacgacagcaatgctggtgccaaattatgaaaatgacaaatcattaagcagcatggtaaaaggaaacgttttcttagcactgaaatatagccagcccatgcctttctctttcccaaataaaatagcacatgcattttcttccatatctttgaagaatctgctattatctataaagatagcaaaggttcccacattccacagaatccttcttcccaaaacaactccattcctactaaaactctccacttgttgcagaataccttggcaatgttctagccatactcaatcaactcacatttgttgtagaagtaggaagtttgcacaaacaaccccagtatttggggttgtgatgctacatttgaataatatatcagtgtttatatgctattgtttgaataatgccttagtgtttatatactacatgagcctcttaattagatttcattaaacatagtctatgtagatagtcgctatatttgaagctctttgaggaagaaattgtaagaaaacggcttgcatcaccataaattctcatttgtcttcaacttattcaatgttgtcatttgtcaactacacaaaaatcttccttatcagagccaaagatttccgtacgaatgagtttgaatgaaaagtgttggatctaggggtagcaattcatgtttatgggtcgtgtttatgctgagtcgagacttaggtattacaagcaaatgcccaactcatttattaatcatgtcgaaaaataaaacccaaatccaacctctttataaaagagttgacccgacccgacccgtttaacacgtttatataaaagatcgtgcttaattttggtcaacttatcaacacattaacatatttataacaagtaatttttgcaccattttacgcatatttatgagtcatttaacatgtttatatcctatttaactagcttaatacaatttacatgaaataaatataataaatataagagtgtatacttttaaataggtcgttgtcttgccatttttagttaggcatgtcaaccccaaaatgatcaagttagtcatgttgactcaaaaatgacccaaatctatttaagggaaacccacacccatttattttgtgcgagttttgagtcgtgttatcatgtttgacccattttgccacactagttagatcccaataatgtgtacaacttcttacgcacagagtcacaaaaaccaacttcgcctcatttatcttacacatcctccaatcaaacaatgaagtgcaacatctaattattatgaaactagcactcaggcatttaagtttctaattaattttagattttaatttgcctccaatacgtttcatgtatactaggcaacagaagaattagggtggaaatacttaagtattttgtatagggcattaatcctttgtccctggttggttttgtagccagcaaggtgaggtgtagtggcagttttgcattgagattattaaggaaaacatattctgctcttacttgtgtggtgaggtaggcatttggtgtcatgattttaaggaagctttggctcaagtgaagagttttaaagatctctcgaacaacttggcaaactttgtacgggtgaagagtcttgaagttctctaaagcaacttggaaaactttgtaatggtgctcaagtaaataacacagcctactgctatactacccagatatgtgttactgtttgatagaatgttgttctattgtttctgaactctcatctgctgtaaattggtatcagattccatgagaaaccacctgatctacccatgtcccaattaacttaaagctactctagaatcaatttttaaataattaaataaaattattgatgtgtataactcatgttaagacccaaaaaaaaagcaagtacaattgatatgaaggaatatttatagcaaaatttcacaagcctaaagttgagatcgacatgcttgcaaagaacaatcaatttcacagatattatatcaaaactcgctttcaataaaatcctatagtgtgtgttgtaaattttgtgaaaatacaaaagcaacaaacaccgacaaatgcaagtactgataattcagagttatgacatttatgatacatgaataatacaggctaaactcactccttttcagggctaactgcaacaactgttcagtaacatgcagcactcacttcagtttcaattatcctgtgcctttaaaatccaaaggaaatgataactctacattatgaaccataaaacaggcaataaacaaatatataaaatcactttccctttaaacaaacaagaatttaatgatgtgaaaactaaaatcttctaaacatgatttgaaaggcaatatttgtttgaagaataattagcttttttagtccctgtacttatgacactatactatgatgccccttaatttataagtgtagttaaaaataccccctaaaatatatcagtt

SEQ ID NO: 78866 - DNA, 557 bp, Cannabis sativa
tactttggaaagtgatgatgtaattggggagctcctttcaatccaaacggtgagggttgaaacctcaccgctaacacctatttcacttaatgctaatgaggtgttctcagcattccctatggaatgccacaataatgtaatggatactccactacatgatgttgagctgcattccactagtaatttgggggagggttcatgtgacgccatctccccatttttggaggtgcatcactcttgccctcctaaacaggtatctcattgtgctgagttccaaatgcctgctagaattaaaaagtgtgataaaataaaggctattacatatttagaggctgagatggttaaattatttcaacgtacatttgagcctattatcaaagcacactaaagaagacttggaagaggtgtacaatctcccttgataaacatggggctagtagttcgccagttagtacaaagagaatgagtcagatgtctacacattcaattgatggtacatatcctcctaatggtgttaagagggagaatgatgttattattacgatggaagagagaag

SEQ ID NO: 78867 - DNA, 540 bp, Cannabis sativa
attttcatcactttaatttattaaataaaaatttaaatatatagttattagaaaatgatctggttgggaacgcgaaacttacaaaactaccagggatgaaagttcccctaaaaactcaggcacagccccagtcaggttattatatgacaaatctctacatcaaaatacatatgatgttagcggtaattatatatatagcggaatatattttctgatttgattctaatcatttttattagaatttgataaagaagagtggtgattgagatgaagtagctattacaaatgttgtagcattttcagatcggcaatagaagaaactatttctccttttactccacttgacgataaattcctgatcattgtatgttcaagtaaagtgttagccctagcatatatatcttgatagattattgggagattattaaacaaaagacattttttatttgttttgataaatttcagtcactcccataatgaacttacaaataaataattctaggctgatcatctttgctattgcatttgacaccatcccac

SEQ ID NO: 78868 - DNA, 588 bp, Cannabis sativa
aatggaattaatttgtacaaattagtgaaggatctaaattttgatattgggagttttattagaggcaaaaaaaatgaaatttcctaatgattattatagtcacaaaatgactataaatttataccgtaaaactatcatgattgcataaagtaagttaagtaaaaccgttcattataatatttgataatgatgatagtgtaaaccgttcaaattgcactgcaccacactgcatttttgcagtgtgatttttataattttaaaatcccacagcacatttgcaatttggtttaaaaaaaatactacaactcgcaccacccgcactgcgaacacccgctaccaaaaacagcttgatccacatcttaaacaagtgccaattacaaacactctcttacacttctcattgaaaaatcatgcagctacaatttgagtttcgactaaaaaaaatacaaagttcccattatacatatatatacttatttcatcatcatcatcatcatcatcatcatctaacaataaccattgattttatttcacattttctatgagtttagaactctaatgctcattattatgataaaatgacgatca

SEQ ID NO: 78869 - DNA, 580 bp, Cannabis sativa
tttatgggccaatggctgtttgattagctgtatttttctttatctgttgaattatggaaaaagaaaggccagttgcatatcatatatagctcctcaaatatgtttcttcttgaaattgtaatatgattgcattttctgtgcagctgcttgtatcttcagcttctgtaccgccatgcagataacctgtctagagaagcagttcctgaaatcttcaggcagaagaagacaaagaagtacaaccatattatttcttatttacattactgctgtatattggtctttgcagaaaaatgctcatgccctttttttcagaattggaataagaagtgatgacttgaaggattcatttgagaaatctatcaagggtagtggtatggctctttcatctccaaggcttgtcatcccagcagcaatatatggactttggattctctctcatcaatatatccctaatgacttctttgatttccaagtaagatatcgaagtgttatttcgttgaatggaatactttcttccagagactgtttataatcaactcgtcacacacctctgattttatttttgtgtaccatattttgg

SEQ ID NO: 78870 - DNA, 559 bp, Cannabis sativa
gggatctgtcagtgtcagtcaaggagcggtcaataccttctagaaccgattgcatgtctgcactggaagggttcgaggaagaaaaaagcacatgaaagtgagacttaatttcgcgcattatgtctttctcctccaaagcgattgtcccattcggcaaatgaagattttgaattttattaatctttttcctatgggacgcaaagcgatggaaaaatttagtactttgtcaccctgagccaaacattatgttctagctctctgtttttagtaggtttcttctttgtaaaggagggcgtccaacctggattgaagatcttttattttcccaattgtgctaatatcccaaacgggattagcacgggccctctcaagatctttttccagattgtttatgcgttttttaaactgaaaatcttttttgtggttccaagaactgagagaattagcacacacctattgcttagcaatcagtttaggaatgacagcttgatgatttgcaggagtaacccaggaattttcaaaggtgcgagcccaattcgggtccgagagccacacattt

SEQ ID NO: 78871 - DNA, 728 bp, Cannabis sativa
ccaataagaagaaacaaattgatgttccagggaggctactaacatgatcaaacaattcactcaggagactaggggcaggggcaataggatcaacctctaggacaagattcccagaaaggaaaaagtccctacatctcgggcaaaggacaagagtacagatcggaggaacgtccaactaattatatgcagacgcctgggtgggatagatcgtcaagatctaggccccaaaactaaactatttgtcgacctaaggacggccagactaacttctgaccaaaacatgaagggaggaaggattgtatgcctcctcggcaagctggaggatcttaggcgtaaattagtgtatacaatcaggatggaagagttaaggaatcaatatggcaactaaaaacctcgataaggttgttcaagattccaaagtgggcagtcagtctctagcaaaactgatgacagagccaatagtatgccccgataagataattgaaggtgtcagtacctccaattaaaactaccaaacaaaggaaatccggataacgtctacaacaacaagaacattcctaaacaagctaggtccaccaaccaaaacacagaaaggaggaccaagggtgactcagtcttccaaagaatgggacctagggctaggaacgaccttaaagaatatttaaactgaaggagaggcaattgggatggacatttttcccccacctaataatcagttgatcaatttg

SEQ ID NO: 78872 - DNA, 657 bp, Cannabis sativa
taatgcctttatgacatatacaaacatttataatctattaataatgccataaattaactttaaataagtcattaacggattaatttcgagtttaaagtcaactcaaacatgatccattcattaaacaggtcaacatgaaaattgactcgaactcgtttaaggtaaaccaaaacccgctaactttcatgcagatttcaagtcatattattataataataagatcaaaaactactcttgtaccaagtttttttgaaatatttaataaatattataaagtattagaaaattttaattcacttcctaaaaatgatacatcgatgcacttttatctattttggcaatagagaaatttttttagtctagtttttttgtggtcatgtacattataattatttaagacatcctataaaattctgagaaaataaaaaaaaactaacgcactgaaaataaggttcaaactgtctgttgcatgcatgattattttttttttatacgtgcgggaaataaactatttaaacattctatattataaattatttcgaatttatcaaaattttacaaaatatcttaaacaattataataaacacgactataaaaaaatttaagtaaaattttgttctaaatgccaaaatagatacatgtgtatcgatataccc

SEQ ID NO: 78873 - DNA, 533 bp, Cannabis sativa
gtagtatttcaggatttcttgctaatggagtagaagggattacttcattttacccttaaaatgtcttggtttaataatttcctagcaatataatcacattcaggaatactactggagtacgttagtattaggtatcttgccaaccatgtcatttgtaaaacgcttgttgcattaaggaagtatttaagcaaaaatagtaagctttagcgtcacttaggagaaagggtttattatccaccatcagtcatatatattaatttagcataaagtaggaatatccattgttattgtttttctcgaagttaaactgtttgtcagttctttacagaatatttgtctgtttttcatttcaattagcttaggtcatgaacttattgttccttactcttctttggactggattttccaggttttacagcgtcatttctcctggagatactgtgaatattattggggaatttgatgaccagggaaattgtcatgtgaatcgagaaaagaattttctgattgttcatccaaatttactattgtct

SEQ ID NO: 78874 - DNA, 659 bp, Cannabis sativa
tttcttctaaattttaagaattttctatttttggttttattaatatcattgttaggatgttaattcatctttcatttttaattttgctttatagatattttatggacttatcatgtagtttgtagtattggacatgctagctactattcttataaaagtattgtctaatttttttgagagatagtttatcttttgtttgttcagaactagtcaaaggaaaacatctttagctagttgttttttagttttgactttcgatcttgtttcattaggtttgattttattttatttgaatcaagtgatagaaaatgaaaatttagtatgttattaatatattattttgttggtacagtcattctaatacaatttattttttgatttttgttttgagatatctcaggtactatttcaggattacaagatgaaactctagccttttagtgtgtcgcttgattacgttatagttttattgtctagatttttgggagaattttgtcctatgtgactcgcttacttcatcaactcatggttcggcaaggcatgccttttggttaagcgaaacttcaacgagtacgacgcctatgacgaaagtagttacacaaaactagtgctcttgagacaaaaggttgctgatcatgaagctgaaatcacagcccaaa

SEQ ID NO: 78875 - DNA, 1139 bp, Cannabis sativa
  modified_base (298)..(299): a, c, t, g, unknown or other
  modified_base (512)..(515): a, c, t, g, unknown or other
cccggaaggagtcttctggaatgatagttgagtctgaaacagagttcacagatgactatcatatccactctgggttcagtctttgggatagctagccctccttcgaaaaggagttatgggcagctagttattctcccgagaagtcaattctagatagtcaagtctagctggttcaatccttccggaagcttcgtcagcgagtgcctttggtccgtgatctcagaagctcgtatatgttcccggatgcactaagactgaagctaacgtggagacttcgctcaaagaggagttggttaanntagttatttctaactaacttaacaacctcgtttcttgcagccaccgactttaagatcttgatcttaagcctataaatacaaccttgacttcttatttcaagttacgaatttttaaacacagttcaaattgagattgagagttagagagaggaaagattgagtggtagagaaaagagagagattggatttaggttttgtaagaagaatcttctnnnnatgaagaagattcttgggtgtaagtgtgagagttgaaacacttgtgagaactcatcagagaatctgtctcgactgttttgtactcgttcttgctcaatcaatagaatatttcggaagtgttctagaactagagtagagttcatagatcacatcgatctataagacttgaactagtatatatcttggtgttaatttttttacttttctacatttactgattctggttttccatactgttctctcctatttttcattcaattgttgttcttgatatattaattttgtcattgctaattatttaattatttaaagttttaataatttaattctgcactattaatcacaattttcctgcaagtattttatttatcatgcagtgattgttcaatgaaaataagtaaaagctacacaagtctaactatgtaaccaacataactaactgtgacacgtggcatagttttttgtgaagcattattaaacatttcatctgactccctaattttagtatattgctaaagaaacaattgcatcagcctcagcctcagcctccagttcctctatcacaaaattagtttagtaaattaatattagtagtattggttgatttgcaatctgtggatgcgc

SEQ ID NO: 78876 - DNA, 678 bp, Cannabis sativa
ccaaggaattgaaggtcgtgtgactacagattttttgtgactctcaactagtggttttccaagtcaggggagaatacaagcaaaagggccgaagatggtggcatacgtggctaaggttaggagttatctagaacgattgtaatatttcacgattgagaaaatcccaagggaaagcaatgccaatgccgatgccctttccaagcttgcatcaacccaggaaatcgatgctttagaatccgtactggtggaattcttagcctaaccaactatcgagtgtaactaggtgttgtaagtggaagatgaagcaccctcttggatgatgccatacattgagtacatccaagaggggaagttgtcgacaaataagaaggaggctcgaagaatccagtataaagacgctaggtatgtctttatggatggagttctatacaagagaggatactctacgccactcttgcactgcataaaggaaagcgaagtgcagcaagtgttgtctgatatacatgaaagagaatgcagtaaccacgcaagagggtattcaatgtcaaggaaggtattaaaacaaggatactactggcctagcttggagagagatgcaatagcattcataaaaaaaatgtgataaattccaaaggcacggtagctacaaccagcgcccccaaccgaattcataagcat

SEQ ID NO: 78877 - DNA, 533 bp, Cannabis sativa
tcctcctgtagtgcctcctctacaagcaccagctgttatggttccaatgttgccagtagagtaacctattgctggtagctgtataaagcctttatacaaacgatttcaaaagcaggtacctcaaatctttttagggggtctcgatgttatgaagtcagaataatggttgacataattgaaaggattttgaattttataggagtcatcgagattgatcgagcgacatgtgctacgttctagctccaggaaaatccccttgtgtggtgggaaatggtgtccctcactcgagacgtcactacaatgacttgagaagaattttaagatctgtttaatgcaaatactataataatgcagttcgtagtgccaaaaggaaaaattttactgacctggtttagggttagaacatgtcaataatggagtatactacaaaatttggtcgattagccaagttagccactagaatagtacctacaaatttcagtgaaaaggaaaagtgcttcatgggtttaaatgccaagatcaggcacgatctg

SEQ ID NO: 78878 - DNA, 612 bp, Cannabis sativa
aatagtctaaattataaaattatatcattttgtattatatttgagtttaattatcattttcatttatatgtaatggatatataaatatttattatcattgtcaaaattataattttttttttaaatttattgtgcttctaaattagtctatttttcgtttacatgttgtgtcaggtttaagtttatatttttttttctcatgtaatatcatgtcaatttgtagtattgtactggcacatgcatattcttgcaatattttttatatggggtcgtcttcatgcctcctaagtttttgtcgattttgtatcgtactaaaaagcttaacttgtatttagagcactagttaggagtgctatcatggtattgttagaatagccctaacatctaagtactaagaaaactccaattagaagtctaaaaaaaattaatattaagtatttcattcataaaaaataataacattatactttgagatgtacttagttatactcaaaataataattatattctattttaaaatatataatgtgtattaagtagatgtcaaataatgttatctgtatttttctaaatgacacgccgtatgcacactttctacttaacacatttatc

SEQ ID NO: 78879 - DNA, 680 bp, Cannabis sativa
aaaattctaaccttaccgtatgcacccaagtcaccctactaaagtagtttctagccacaaaccgtgatatatatatatgctttccatctctactttaataccacaatttaacttaatctactcttgaaagagtggtcgccaactatccagtaaaatcggaaaaggaatagcgaacagagaaactctataatttacataagagcaatgaataaagtcaatagaatatttcacattaattaaaattttattgtgtatcttattattttgagtctatgatatagtatcaataacaattgacacataaagaattatgtcatattaatgtcttgtttttctagataaatttatcatatcaaatctaacaaccccacagagaggactgccacaaacaaaaagctaaattacaagtgataataggtaccactatttctttttattgtttgaataaatacaaaaataaaaaataaaaaaaatccgatccttgtatagtttttttcctttaaatatcttctttttttttacaaaaattctacgaaactataaaaattgttacatattatcttttctttaaaattttgctacaggtataagtgtggtacaatagtttaattaataactttaagctattggaaatataatgtattaacatcaaacatataaataaacattagacataaaat

SEQ ID NO: 78880 - DNA, 720 bp, Cannabis sativa
cggggcctttgagctgggagctgggtaacttcccaaacctcgctgtgtttaacggccccggcgtagcgctttagttccttttgagtggtccctccgatatggggccctccagagatcatagctactctttcgttgggtcttgaaggcaggctgggagcttgctaaggtcctcccaagcatgcggctggtgcttgcgctccgggcgcaccacctggcgccccttggggcagaggtacccttgccagaaccgggttgagatggggcagcaggttcttgatccactcatagagatgacccaattgaatcaagttctcgatatcatctttaagatttttgaattcattggtgttgtgtccaatgtcgttgtgatactcgcatcttttgttgggatcccttcgggagctatctgtatacagaggaggcggtctctggtagtgcgtatttcgcctcgtggtgaaatacacacgctcttgggagtccgtcagctctgtattttgggtgtactggggagtatacccccttttttagtgcttgtcctccgtctggttgctaccttttgaggacctcttgctccgagagccttgggaaggtccgactaggcttgcagcgggagcggagtgagaagggacttgtccgcttattgcttattcatgaggggttcccatagtgcgaagatgcgggagccaaggcttggctctgattgtatcctggagtagcgga

SEQ ID NO: 78881 - DNA, 535 bp, Cannabis sativa
  modified_base (34)..(39): a, c, t, g, unknown or other
taggatgttaatgaaacataattgttagtaaatnnnnnncctggtaaaatatatccaacattgatgtccatgtgctagaaaggtcatgacaccaatctagccactccccttttaaggcttccaagcttttatgttagccaaagtctggaagccttaaggggagagtgataagacagctaccatagacgagatatcataatagaacaaaaactagctactattgctgctaagtctctccacgctcttttagtgagtgagctaaagaccactttgttaggccacaagacctcttttccctaatttatatctttgattctgggatgagtggcaaaactgttaagaatactgtaaatctgtatatatccctaatttattcatgagaattaaacaatagaattatagaatagcggaagcgtactggtgtatatagaatcgacctttgattggtataatctttaattggtatgatcttccaatttgcatcaaagcctttctctaaaactttttctcttggtgatggggatacaagagtgaa

SEQ ID NO: 78882 - DNA, 556 bp, Cannabis sativa
  modified_base (483)..(494): a, c, t, g, unknown or other
agtttaacctagtgcatacttgagctttgctacaaaaacccctatagtgaaaattaaattagatttgttacgtcttaggtcgtattgtactgtattacggtagaacctctatttaagaatacacttgagaccaaacaaattatattataattgagaggttataactatatagagttacactaaaaaaaatatcaatggaacaacaatgacaataaacaatctttaatactatattataataaaattatttttgagtaaatataatctttatacatgtattacaatttagaataaaatcattaattttatataaataagtttatgactatatgtatacattttattaagatattattattcttatatagatgtatattttcttaatacgaaacttaaaaaatgtataattaattacaatttagtggttattcttatttataacgggtccaaattgggatttaatttttttaggggaattacccnnnnnnnnnnnnttttttaacttttttttcaaatttacagtttgggtttttaaagtggttacactgctagttgc

SEQ ID NO: 78883 - DNA, 4867 bp, Cannabis sativa
taaatatttataccacaaattactgttataaattttgatatctttctaatcttttgtattttctttttctttcacataatgaatcacaatgtttaataatccaatatgtacctttgttcacttttacaaaacctcttttaagattattaacctaaaacaagcaaacaaacaaaaattgtaacactaaaccaagtcagaataaactcactgcccttaaacttttactcttttaatattagtaataataatcattatcatattaagaaacaaaacactgaacaatcctatttctttccaagaaagtgaagaaccaactccatcaaaggaatataaattggaagagagaaaaataaaactgaatataatttacaataagtaacaatctcatcaaaaatgaaaaactagaacgattactgtacattaatccgacaaggaattgcacattctgcctccttcttcagatgacagaagctcccctccactgtcatttacaagagccaagaaagaaaaagaaaaacaaaatggtaaaaaaaaaggtttcgattatgccaagtagttgtaaatttgtgggttgctcttgtctcgctctaggtactctctgtcgatgaggctttcgatcctcttcttcaaatcagctggttttatcggaaacttgagctgctcatatcacaatacagcgattattgccattcgggttagttacaaacattgttttcggtgaacttgtttttgaaaataaaacgacggtggtttacctgttggaagagttcggtaatcagaagtgtgtgacttagcactttcctagttttcattatccgaacaatagcagcatcaacctaagggattagaagaaaatgtagtttggttaggccacagattcttttaagaaaataatctctttcgggttaaaaaaacaataacataatcataaaacgaaggtaacctgatattgacggtcttggaatactctttcagtggtgctcgtgttttcctctactgtttccttcatctggattgcatttacctgtacacgaaaagattgttagcttcaagatctgccatacaaactggaacaacaacaacgggattttgacaatcatcacaaagattctctggaccgcaacaatttaaaaaactgtaccttgatacggtagagaggagcagtaaatccgtcattgaacaaaaatgaatcattgtcctccacatctctccctttaggcaactgcagaaatcatgttcaaagggaattgaatattgaattgtatgataaaattcctacgtaatataaactccggccttataaatcctgtgaaggaattatatcgatgaacctaccttttgaaggactcgaacctttccacaagcaagggactgcaaagttcttcttagttccttatcctcgatgcctgtggagtctttaatatcttgaaagcttagcttctcggcatcattaaacagcataagaacaacagtctgcggtataataaattcaacatgagcacacgaacaatctttagtcatcacacatttgggtaggcagaacttgagaaggaatatatgctcttatgaaaactgatgaagtttagcctataaaccaacctgaaaaagagaaactgcaagctcctttttgcctttaggaaactcggctttcaacacacaatgacccaatgaattttgccacatcaaacgccttccactgtacttgctcaagtaaaactccttgaaaatgtcctattaaccaagcaaaagaataaaattaagaaaaaacataagattaaaaacacaagcattactcatcgtgaagagaatccgtactgcataaactacctgatacacattcagttcatgagggagtctaatatccatgggagggtatgttggccagtacctgaagcaaggtatcgtagcgattaagcttctttggattaataatgatgcacaattatattagatgaagaaatttcttcaacctaccctgtggttaggacatgaacactcatctcaatccctgatgggagtttcgtccttgcttgggatgattgtttgaaggactcatttatctctttcgataactcaatatcctatagggatataaacagaatacggtaagaaaatcttaactggtacagattgaatctgagcaagaactggttgatgtatcaatcaagctaaactaaaaagcctataaaatatctttgatacgaagaactggatgttaatttggacaaaattgtaagcctatagaaagtttcccttcaacatgttaatttgatccacaaaaatcaacacataagacggaaaataatgcagttgaacaattaacagttaaaacataacccctactcttgggaagaaaaagtttagtcaagaaagagaatttcgtctgcacacctcttttggcaattttcaaggcctagattaccacaattaaatcaaactaccaattttcgaaacaaaactttgatatcgattaatcataactgctgaactgaaaacagaaactagcaaaccttaaacattccctcgagtttatttgtaaattgacttccacactcagttttcagctgcatcagaaattaagtactgttaatacaatatttaggttgaaaatagaatacataacataggtagttacaatcttcaaaaaaaggaaaagggtagttataatcttaaccttggagatcatagacttctctgcatcaatagaagcactcttccccaaaagcagcctttttgcaagatctttcttataaaaggcttcaaatacatctttgcccttaattagtaaaaaagagaaaagcaattgccgttactcattattggtatcatcttgaatacaaacataaacaaatacaaataattgaaaagcaggaacaaggattgggaggaatataattgactattccattcataaaccaaatactagcatacctgtataaacctgaacaacaccaagactttgtcaagggtgccttccaattcttcttcagaggtacctttattcccagcccgaagtttctcatcaagaaactttgcaatcagttcagcaggccggttctgttatgcagaaaagaaatttgtactcttacaaacaggatatatgtccacatataataaattgcaccggcataatatgaaaggaaatacatgatcaatcaggaaaatgagagtaagaagcacaaatttaactatgtctaggttgcctaagtatgaagacacccgaagttaatttcgtcctgttaagtatttcctacttttgatttgagtatcttttctttatttcagttttctaagccaccttccattgtaaaattaagtaaaacagccagagaatagcaggagaaaaaaagtatgcgaggggtcaaaaatgtaacctggcgcagattaatcaaatactcaaaagcatcctttattgtgttgcaaaacgcttcattcttgtagaagctttcttcccaaatcgtatcaagagcagccttgaaatccaaaaggcaggataccatatctttatctttctcttcatccatgacaatgccctggcctgttttccgaacatataagctaagggcttgccttagagattcaagagcactaactctagataacagattgtatgtccttctaaggtcttcaatacgattcccatccatcaacaacatgaacccctagaacacatccaaaaaaaatgcagcaagatagaaaagtgattacattaaggtaaaaattgacacattacataaatataaatatatatatctacagtgaaggataaaatagatgattcaatcatttaacgttaaacagaaaccttatcgagaataacagatatatggcgttcaagaagctgcttttctgcagttgctattaatggttttcttgtagtagcatccaggtagagcaagcatctctcgtgttcttcatgtaaccttgtctgtaacaaatcaccaataaatgtaaaataccaaatacaggatttgtttttctttctcagattaggtcaatatcacgagagttaaaggtcatgggaccgaagtaattgttaaatcattgacaggaaaaggaaaggagaaaaaaaaaacatcgacagtcatttgaacaaataggagtggaacaaatatgcacctctacatgctttaagtaatctggaacatctgattgttgcatgtatttcatgccttcagcagcataaaattcagaagtgcgctcaagaaatggtttctcaaagctttctgcgtaaattcctagtgcggtaaacatcttcagaaggtggttaagaagtgctctatccactgcttcacctaatctgcaaaccaaaaacatatattgcagattataagttcctcaaatgataaatcacaagcaataatttgaaaattcaagttaaagaacacaaatcttaaaaccatatcatgatgtttttactatagcatcttcaactatgcctcaataagtccacatagactaatcctacctgccccactagaaagtaattatacaggagccagtaaaattaaccgataaataaacaattaaaggatgttacgacaaaaacaaggaacgagatcctttgttcgataaaaaaaaaagaaagagacccttataaaataaataaaaataattgtaaagcaaggacctaactagagaaactacaatctcttgaaaattgaaccttggaaatacaaagaaaagatattattgaatactgaagggagaaaaaatccaacaaaattcttacaaaaaaaaaaaagtaagcttttatcccttctttcaatgtagctgtacccaaattcacagcaacaataaaattgaatagtcaatatttccacatgcatcatttttttattctgtatcttgcatagcatctctattt

SEQ ID NO: 78884 - DNA, 1450 bp, Cannabis sativa
gcaaaaacagtttgacccagaagaagaaaggcaaagacaatctaatagtttcccaaaattgagccttcccattttcccaccaacacaaatcaaacccagaaattagattgtctttgtctatatatttaatctttcaaaacccagatcagatgtgaaagaatctaaggaaaacaactgagttagtgagtagtgacactagagagaaagagtaagatagagaaacaggggagctaaaggtcaattttttattgggagaggaaaaggtttgaatggactccaatggaaagagctatgaagactaaggtatatatattatatttatggatgaggtagtcaagaaaatgtggaagggaatcaagcaacccccaacaccccccaaaaaaaaattaataataaaaacatgggcaccactactctagtactagacactagttattatatatacctagggatacgattttgtcttgttagtgtattttcacggaatgtattttgtaatgtacggcagcagttagatgggtctcagggtacgtaataatgggtctcagagtacgatactattttttaaccctaattacccctagatctaccccaactctcagatcaaataactcccccatctaacggctgtcgtatatcacggaatgtagtacactaacgggacaaaatcgtgtccctatatgtataatacttttttattagaaagtgttttttcacttgggattactagatagattttgttatgtgaataagtagttgtagtacatctaaaaatatgagagaccagcaatgagtgaattctacacataaaaggtaattaaaggaagtggaagcttcttcttttccatgtgagacaggaactttttttaaaatatggttacaaaagttaggttttcatacatgtgagtgtgacaattcttttggggaagaaatgaaagaatcactcaacaattaattataagcattaaaaaaatctggtaatatatgattgagagagagtgaaacaacaaatgcattaatgacaagtatcagagatagtcaccaatggagggagtaaaaactgtgtcatgtctcattgtttcatgtgataacttctaagttggaggaaaataatactttatttagatatttaatttttggataagaggaaagaaaaaaaataaataaattcaaataattgagaaatttaatataattaatgtatcacttgtacgctatcagaaatgtttaattgatgtgacccatttgaagaatttaatttataaagaaaactatgccatatattacataatgtattttgatactctctcaattgattaattatgtattaccatgagtgacaaaggcgcatgcttaacattattcccttaaaatagtggttatatttttaatgtcatataacttattaacatgaataaaacaattgttacaccaaacaatattaaaatta

SEQ ID NO: 78885 - DNA, 4352 bp, Cannabis sativa
  modified_base (748)..(749): a, c, t, g, unknown or other
  modified_base (780)..(782): a, c, t, g, unknown or other
ctctctctctctctctctcccaaagggccttatatcttcctctgtctcacacgtcaccaaggcaatatctctctctcaatagagactggcctacgtgatccattctttgtaaccttatagagacctatatcagatcccacttatagtgattttaatagtattatctcttggtatgaatacaactaaaaggggagtaggacattacccgctaactaaggaggtcaaacctctataataatccttgcattatttagtttattgttcttgtagtgtaacacgtgacaaacatcagattcatacaacttcgctgtcgggtggccaccaatagtaattttaatagtattatctcttggtatcaatacaactaaaaggggagtatgtaggtcattactcgctaactacgggggccgaacctcttaaaaaatcattgtcttatttgctttattgttcttgtagtgtaacccgtgacaaacatcagattcatacaactttactgtcggttggccactttttgcggtcaacactaatatactagaaaaatacaaagacatattataaaattaaatgtctaagaatgttaaattaaataaaaattaaaatattacacattatatattattcaatatactaattattatacaaaacataacttaaaaaaatttaaaaattatactagtatattaaaaaaatacaaacacatattataaaattaaatgtataaaaatattaaattatataaaaattaaannattacacattatttattatttaatatactannnattatacaaaacataacttaaaaattattaaaatattaatatactaggaaaatacaaacacattttataaattttaaaggtttaaaaatatagctaatatacaaacacttaattaaagtaatgtaaatatgtatatttatttatatttttaattaaattttatttatgtttattatgtataatttatacttaatataaatatatgtataataaaataatattatatatatgtataaaaattaaaatttcaaataaaaattataatttatacaaaattcaaaaagaaaaaaatataggaaggctctatgcatcggttatttaataatgattgacggcatagggatcctacggtattgttattttataataaatgggatcataggatttctatgccgtggttaattttctgccttacgatgtaatttgaaataacgttagttagtaaattttgctaaaattaatagtataagaagtaaattattatttttaaagctcatttttctagtagtgatagttgtttatatattaaaaattattttggatttgcccatcaaatttgtttatctggagaacggtacaatgttttcgaacttctaactacttttcgttggctatatcattctttatttaaactttttttaaaagaattctttgtattattattttaacggaaaaaaccgctccaaaacgcatgggaaggaagaaagtattataggtagtctttggtattatagctaaaaatatttccttaaattttaacagcgaagaattaattgtaagtgtcacaactattaaggaaggcttatggaattatctaaagtttttttttaatcaaatttagttctcgaacatgaaaaagaattcaaaatagtaacaaaagagaatttttctctcttcaattgttttttaataaaagagggaagatgtcaagtcaaatgtgaatgattgatcaagtggatttacactatgggctatatataaaaaatttatgaaatgcgggcaaagttttctaaattttcgaaatacttcgtggtactctagtcatgtttcatgtgcctaatttgtttcttatggtgttgtcttcatactgtaaggctgcatgtctgacaaaataaatgaaataataaaaatataaagcactaaatattaagcttctctaacgtgtcaaacaagtacaaaaagataagcctacttccaaactatggtcaatcactaaatggtgccaaattaatcaacactgcggactcatctacatgacgttgcattacatataatcgttttaacattaattattattttaagttgtttttggcaaattgtctatcccataactgataagaatctacatgtctttctagtaagcattactattgtgatatgccataatagagatattccttcatgaagaaaaacaaaaaactaaaccaagccaagacaatgaccaacatgtcatttgaaatacatttgtatcattcttatgatcattattctaatatacacacacacaccacatatgttatgtatgtatgtgtatgtacatataataacatcattatatattgattgttctctctcatctagctaattgttaagccaaattactaccaaaccttttcttctttccccatgaactctaatatcccatctgagtttcaaattccatgttcaaatcactccccaaaaccatatattgaatctgaaaagtttcatggtagtgagcatcatcatagctctatgcatccaaaaagaactgtcatgctaaaaaatagattaccaagaaggtatctaggcgtgagacagaggccatctgggagatgggttgccgagattaaggactcaaatcaaaagctaaggctttggttagggacttttgacacaccagaagatgctgcgttgacctatgatagggctgcaagacttttgagaggtagaaatgcaaagaccaacttcccaaatcaaggaattacgacttcatctgaagaaaatttcaacatcctgggaaagaataacccgaggctttatcagcttcttcagcaggcagtcatgaagaacaaggccaagaacaactgtaacatgaatatttcattatggaataacaataaagaccaaaatatgggagaggtagtactcgatcagtattttgattcttcctcagttcataatgattttgatactttggttgaaaagaccattgtttgttcttcatcaagccacgattatgacaatggggataataatcgtgatcaagagcccgatcattatcatgatcatcatgatcagacgcataataagaagaatagtactaaaaagctttgcagcagcagcagtagtggtagtaatatttcaattggtagttctaaggtttattcttctgttgttgtagctccttctttcagtgcttccaatcaatgttagaagaaaaaattgtacgatcaagaaggaaataaacaaaataatgtcaactatagtagactgttcacattttatatatctttgtttacagatagttgatgtcgatatgcttagttatgtcgtggaacatttatggattcttacataagtgtatagcactttggctatataggttgatatagcagccgttaattctgtggaaaaattaggattcaatgtgcaaaatcaaaataataaaaacttaatcaacaaacaattaagaatgacaagaatacatggaggcctctttggtgctcttaggatgtatttgtttgttttggagtaatggaaatcctgatttatcaaaaaaaaaaaaaaaaacaatgacaagaataataagctacaaacagtaatcagaaaaaaacaaggatgtacagagtaatgaaaatcaaaaaagataaagtaataaaataataacaatcaacaccaagatatatattggttcaagttctatagatcgatataatttgtggctctactccagtttcggaacaccactaaatcctatttgttgattgagcaagagtaaggatacattacactcgaggtcaattctgtgttggattctctcaaagtgtttcaactttcacccattaatcttcttcattttcacaagattcttcaaacaaaacccaaacccaatctcttttttctctctacctctctccactacaacaaaaatggcattttgcttcaattttaagtgacacataatgaatttgcgtctattagtgtaaccgaaactataaacatagatgcaaatagttttattttttgcctcacttagtaacagacgcttaaagatatttgctcagttcataactgaagtaaatattaaagcatgtactgatgcagattagtttttttacgtcggttatgaaccaaagaaaaagagtaaaaaaaaaaaataaaataaaaaaaaaaaaacataaaccttcagaccatcacaacccttcagactgccacaacaactcaacaaccacaataaatatttccaccacaacaacctatcataccaccaaaagcatatcgaaccaccagaatcccatcggaccaccaccgttgcctacaaaaaaattagagagagagagagagcctgaatgagagagagagagagag

SEQ ID NO: 78886 - DNA, 7114 bp, Cannabis sativa
cccaatgactctttttataataattttagtttttggtcaagattcaagctttaatgagaattaataagaaacaatacatttttttcattgaaatataaaatactattgattattccatttaattctcataatttttttggcaatcaataaaaataatgatttgggttgaattgagagagaactatgtatgaaatgttatatactttaaagatcattcctttcatttttcattggcattaaagtctctttctttagatgcttaaaaaaaagccatcaattaattatgctcaaccttccatgatttgatttgtctaaagttgagtgtgtcctatccttttagggcccatggtctatggcacaatacaaaacactagtacatcaccctccccaaaaacatactaacaattcttttattaattttttaaaaatttaaattaatttacagtatcaaaaataatttttttttaatacaaaacatctgttttgagttttgtttacaaaactataaacaatgacaggcctaacttatagattactataaaataacaaaaaaatcccatagatagtttttataacaattaaattcttataaagttaaataaatttactaaagtcaaatagattttctatatcacaattaaattcttataaaattaaataaatttattaaagtcaattagattttctatttaaagaaactataaatagttttgcagcaattaagccccataaaataaaaattctcaattagtcatagtctataaattattactgcgaacgaatactattatgaaaaaaaaaagagaaaaaaatatatcttttattttttcttttatcaaacaaacaaatgacttttgcaatagtattttctctagtcaatctcatggaaaatagtatggagaaaagaaaagaaaaagaagatagacaattttctaggcatccaatcacttttaactaatttgtcctaatgtttgggcgttgatgtagggagtgagtagatagacaaaacatcattcttagctgtctttgaatttactcaatttattatttataggctaattaattaaattgtaatattggaaattatttgactttgatgaagtttattgtcggttgtatttggttaatgaagtaagaaaataaattcccataaaatgaaatgattagtaatttaattgaaaagagccaaaaaataaaatgcaatcatttcattctctaatttaagctataaattgtacaaaattggccaaccctactaaagggttcttttttcttctttaatattttctatgtgagggttgttaaaaaattctatagagagttttagaggaaaaccttacaagaattttagttgtattatacataaataaatatttatagtaataaaaagtttgtttactttaatttgtagactttatgtgtgcacatgataaaaagatgtaatgtttctcaataataatcaaattgatgcttatcctacttttctttggcaacacagcatggtgaattgatataatttataaattataactatacactattgaagatttatatttttatatatatatatgatgattatattgcactgttaagtatgcaatttaaattatttatcagaataattacttaaataaatcgtcaagacagggtcaaatctgaaatttactagatcttaaaaaaaaaatatatattattaggcaattactaaaaaaatatgtgaaaatattaaaattatattttaaaagaaaaataataattattgggagcttactggatgaattttaagtacaagtttagcctatttaaacttaagctcaattttgaagctagacgaaataatctgtatgataaataatcaagaccgtatacaactgaataattagtagttaggtttagatgaatgattaagattgtacactactggcaggtaagctttcttacctatttatatataattttaaagagaagttcaaatgtataaaaaatatttaaatgtggtttagtttggatgtgggaaacctagttaatattgtgattataagtcccacttgagttatggccccccatgcttaaatcaatctctccttgttgtaacaaccaaaaaaagtagtaatgagtggaataatgtacatcacaacattattatacaacactctttgatcattggttgaaaaccatttgtcatacacattaacatgtgaattagctatgcatgtaccctaaagctatcacttcttagttgttttgacattgtttagaaaattcctacttagatttattatgctaatcataaggttttttaatgttaaaaagggaattggtgtaatcacattctctatcaaatattttaagaatctactcatattatcattagtgggataaaagggacttgatacataatttctctatgaatattgaagaaattcacttaacaaagtcattttacattagatcattagatttattatttataattgtatttaaatacacaagacaaatttaaaaaataatgttaattattattgatggttattaagtatttattgagaatatgcaaacaaatattattaattttattacctaaataataattaatgaaggcaataactagtggaacacttttttagaacaatattagagtgacaatttttagaattttgggaatgcttaattttaaatttgctattgggtagacatgattagagcacataatttataattttacaagtgtttgattaaattgtaatttggtagacatgattagggcacataatttagatagacaccaactactacaattaggacacaaaatgtggacttaaaatttgaatccttcatcttaaatagtttaacgtgggtacctattttatgtggtttaattatgaaaaattaaagaaaaactatgtctagagattatggattatatagggaatggactttgttgatttttataataaaaaaaagagaatacattctcttatacatcacaagctttctttaaagttctctgaatttgatatgatgtactatgactctcgataacttatacatgttagatcaacttaattgtaatccaacagttataataataagcaaaatatattttcttgagaagccactcaattcacttatgatccacaaaatatattttctcgagaagccactcaattcacttatgatccagtagttataataatagataaaaaatatttttttatgaagtcactgaagctaaattagtggtgagaaaaagaaaaaaaaacatgagtttcaaaatctctagattattagtaaataaataatatcattttgttagtatagcgtaatgatattacaataaattaatagcttcgtagtttaaaggtcttggattcgaacatgtcacttctctctttttcctattcctctttcactattaaactagccactaacttaaataaataatatcattacacaatacttttttttttatttatttaagcgtttatatattacaacatgttttacctgggactcgaaccaggacctccaacactcacacacccatctatggccacttgagctagcctcaagtggttcatcattacacaatactaatatatatattcccttgatgggagaaaattcagtatgtattatacacaaatttattatggaaagtagactttataactcatttttttaaatgtctatacataatcttgtaccaaacaaacataaaatttaaataaaaaaagaagtattgcaagttggtaatttggcatataaataacaagctagctaggagtaggactagggttaaaaaaataaataaaaaaaggtaaaaaataaacaaactgacatagtatgggaatgggaaactttgcagcttttgttataagaaattatttaactaactttatttgtaaatataaaaatggcaagtactatacactatcacctaattaaacaataatacaattcattcatttgttttttagttattgaatactattgaaacctttttttttgggggggagacatttctttattaaggtattatgttgaacacattattgagaatccaatgcatattgaaaaccaagaaattttgagtctttttttttttttgcataataattttgttttgatactttttataaaatggtcttccaaacattcctaatatttcttggcactctatcctaataaaagtcttttttacaaaaacaatagaagaaaaaaataacattataaattggttcattttcattaattggtcataaataacattatagaaaaggatatagatcaacttggacattcacaaattaaaccaaagttgtttaaccttactgcccacattgaattcaaatgaattcaaatgtcattttctaaaaaaagctgtcacatttaattttaattccatattaaagttagagttcctctaataattataacattaaaaaaaaagaaagacttaaataatcaagtaagaagctcagcaccacaacactttcttgcaatcctcagccgtttcacacaatctacaaattccctgttaaatgtcaaagaataagactttttaaaccaataaggtcaaagttgtaattttgtcggtaataattagtaaaaacacaatttttaaataatattagtggtataaatttacaataaacgtacttccatgggatatcaccgacacttctccaattctcatatctgtctttatagaataacgtaaattcagatctatcttgaaataatcttaacccagatactgtttgtctacctgcaaaaacgatcaatattataattcattcaatttttcattttcaaaagaaatcttaaaaaaataaaaatctaatttttatgtgcttaccaaacatgtcctctagttgaagtgctaggcttgagtagctaccatgatcaagtatacaaacttttctaccaacaatgactccatccatgttaaccttcacataaacccacctctctttgctttggattccttccccttcttcctcacaatcttcttggaaattatttttatttggttgttgtgtattattaatgtttgaacatttcaagttcaagtttgattgaggccactctaaaagatcatcatatccctccaagctcactactattaatttcattcaaaaaaataacaatgataatctcaactactattatcaccaaataaacaaaaacttttaacaagaacttatgttacaataaatgtttgaaaaagaaaaaagtatacaatatatcattcttgactttgatcattttcaactttcttgacatggaagcaacataattaatagtaatttttatccaaaaataaaaataaaaatcaacacccttttagtacttagaaattttgaacaaatatgaaatattgtgataacatttgtaatgattgaaaccaagtacttcatacaacattttttatacttttcttgacatggaagcaacataataaccctaacaaaaaatcaacgctcatttataatacttaaaagttcgtcgtttgttaaattctattagctatatttgtttactttttattaaacgatctgctaatatgattgttctatgctttatttaaatttcatatattcttatctaaatcgagttttcattagggttttcgatgtctttattgagttacaatcttattttgagttacaaataaataaagttctaaattcgctttcaaaaaaaaaaaaaattatattgaagtgaaagaaactatttggaccccaaaaatgaaaagattaataagaaaaacatacaatgtgcagcagagggatgatgattataagcctcaggttgcaaagttctcaaactaagaccaagatcaattacaccatcatgaccctccttagcttgatgatgataataaacagattgaagagttgaagggttaagaagaaagcttgaagagttagaatccatacttattaataagaaataaaaaatatatatatagtcttgtattgggtaattgggatatttggattggacccaattgagtagtaatatttgaaatgaacaagttttaggacatgtatttatgtaaattttgttagagcacaaaaaaaagttgttgaagaagaagaagaagaaaaagtgggccctttgttatttaacatggaagacaaagaaagccttctccccactactaatcattcaatgttgcttatcttcattctgctacaaagaacatgcaaagtacataaaaagtatatattgcaacaaagaacaagggatggccaatgtgattttggtataacttgggttggattttgcaaccccaatttgatacaagggttcacacttttcagaatccaatggtactaattacaacatttgtttttatatttatacatatagttagttatatatataacaaaggtttgattgaacttattcctctccattaatattatgtccactaaacaaattattgggagtgtgtgacaaactccaacattagtactataagtactatataagagaaattgttttcttagtgtaggatcttattagcaatttataagtaattgtaagtggtgtgtagagcttataaatatataagcgtgtaatgattaatgaatatgaaatgataaaatagaatcttagttaatttgggagattgatattgtctcgaatagtgtattttaagatatttgtcctgtttcgaaatagatctgcattaattatcaggggtcaatcgtttggttgactgtataaaggtcgtattgtattaaataacaagtaatattatgtttggataaaacattctattgtattaatatgaatcgtattatttaatacataacaaatgatctatctggagttggggaacccgaaaccggaccctagacctagaccccggatccaaaccctaagccgaacccagacttggaccctgaatttggcttcggccctagacctcgagcggaggtcggagttgggctcgagcttatgattaagataatataattttacaaaaactattaatacaaataaataccgaacataatattatattaaataatatttatactatacattaaaattaaataatgaattggtaagaaagtatattattgtattgtaagaa

SEQ ID NO: 78887 - DNA, 1502 bp, Cannabis sativa
atatatatatgatctcccatgtagatagttatctgcaaaaattcatggggaagtagtatataataaagactataaagagtatgacactatacatcttctcctgccttgttgtgattaccacctctccaactatggccatctgatttttcatcttcttcttcatcttcaacttctgtactgttcccgccagtatgagaaagtgctttattagagccgctcggtgctagaggaccctgaggagaagcagattggtgtgagctatctccacattgatcttgactcatccataggccactgtctggctcggtggaagagttgggaagttttctcacatggagcctgtatttctggtttatagcaaagaagaaaaaaaaaatgttaacataagacaatcaattaagaattgagaacaagatattctcaacaaatatgtatcaaacacttgcctgcaaatggctttttacttcatcattagtaagaccttcaaccctcataagctctcttatttgtttaggtgtagctactgcaataaacaatgaaaaccaaatagttaagacacacataacatcgatagattagataattgtgtattgagatataaactaaccatgagaaccaccaagctggtgaattgcatcaacaaaacgacgatgaagttcaatagaccaacaccttctctgttttctaaagggttgttgttgttgatgatgctggtgttgtgtctggtgctgcaccagttgtgatttgctcactaacttaacttgctcggtcaagaaagatgaagcagaaccagttttacaactatggctgctcttaggattagaatcaccactagttccacccatctcagatattggagaagttgtaggcaatggagttggaggcatgagactcagactaggcacccgtgaaagtgaaacctctttatcttctttcaaactagtccttattataacaccactaggaggactaggttgagccttgaatggtacaaatgctcctcctctgtttctataatcagaaaccccaattggttgtttttcagacacatgccgatccactgctacttcttcaattctctaaacaaataaagataaagtaaaaaagttgtcttgtttgagaaaaaaatccaaaacatgaaaagcccagaaaacatgtattgtttaatttaccggtttaagttcagaaactgaggtttgtttattatgagaatcacaatcaacaacatttgtactccatagctgagcagagctcatccagcttttcttatcacaagaatcatctaccaaatttgtcgatccattctcatctgaatttcccttaaacgatgtgaactcatccatagcttttatggctttctcttcctccttcaacctctcaatagctggaaaaatggaagaacaaaaaatcaatcaatatcaccaaaataacaacagacccatcttcaaaaatcatcgaatcaaaatacccagaaagtagaatataaaaacaacaacgaattc

SEQ ID NO: 78888 - DNA, 3263 bp, Cannabis sativa
aatttttacactattaaacgaaattatcaaatattttttttcttcaataattcaattaaagtacataaaaaaatattagtgtattgtcattattaagcaaagttctcctgaactaaaaaatgaagtggtggactggtggtggtgtggtgactgcacaaaataagaaaagaaagaaaggaaaggaaggggtcgatgtggaagtccccgaagagttgggggacctgagagatttaacatacatgacaaaaattgggggtccgacccagagagattttacttagcagcatacactacacaaatggcaaaaagacaaaaccaaaaaatagtggtctctttccctgggcctttaaatggatacacacgtattccttttcttttccagacagatgtcactacataaatacacatgcattactatttctatttccctatttatataaaaacaaaatataattcacacacattccatttccatatatgtaaaaaattatataatatactctgtctctattctgtgatcatataaacaaaccccctcttgcctctgctatttctcaatttatatttctatgaaccaacctctccaatttcagctctgaatttttgaacccacatatatatatatatatagataataacctaatatttttactaacgaaaagaacaaaacaaaaatcttagtcaatggtggtggtggtggtgactgacgactccagcggttgttcctctcccttatcgaatacccaattgcctaataaaatatgggaggctgagcaaaacgacgtcgttccattacagcaaaataggcataatctggcgccagaagtggtagtgttactagcttcggtgaaagaagagaaagaagaagaccagacgactgcttgtgttattggagctagagatggcggttcatcttcgtcgtcttctgatattccctcattggaccatcctcctcagataattccttcatcgccttcgtctccggtactgtcgatggaggcttttgttgatgaggagaataagtttggtcagttatcagtcaaaattgaagaagaaatcatcggtaataatgtgtatgaaaataaggagggaggtagcatcgttaatggtgggtgttcttcttcgtctcctctcgattctccggcgccgatggaagggttacatgaggctggaccaccgccattcctgaacaagacatttcagatggtggacgatccaggtactgagtcaatcgtttcgtggagtccagctcgagatagcttcatcgtttgggattctcatgagttctccaaaaatcttctcccaaaatacttcaaacacagtaatttctcaagcttcattcgccaactcaatacttacgtgagtagtaatcttcctctctggaaatatatgtatgtatatttttagttttgaattttaggttcttatgatgatgatgatgattatacttcaggggtttaagaaaatcgacccagatcgatgggaattcgcaaacaaaggttttcaaggagggaagaagcatttgctgaaggacattaagagaagaagcaaatacaataaacaaccaaacggagccataattcctcccacgtacgattcggtggttttggaatccgaaatcgacaatctgaagaaggatcaaaactcattgagagacgaaatctcgaatctgaaaagagaacagaaaaattcccagaaccaaatcatctccgtagaagagcgaattcgatgcgccgaattccgtcaacagaagatgctactcttcctcacgaggaccgttctcagttccaagttcgttaatcaactcatccagaagagaaagcagaagaaagagaccatcgatgctagccaaatcgccaagcgtcgccgagttcttccctccggcgaagaacaagaacaggttacgattcaatctatccacgccgaaacttttccggtgactgataatggtccggcgccatttttgagctccaccgaagaggaatcagatagtggaagcggtagtggttctggtccggaggtgttgtcggtttataatgtcgtatctgaggatcttctgaacgacacgtcgttttatgatgaagaattggcggtaaacgactcaacgatttatcatgagttggaggatttgattgatgagaagcatgaggtggactggaatgctggttgtattggctcaactttttgagtttggttaagctcactcactcacagttagtttctcttttaatctttttcattaaattaattatttttttaagtaatacttttcactttatttattaaatgaatttatattaattttaatggtctacgcaggtgacggtcagacggtatgtttttgaaattgggagaacatattacgatatggctttctctttttctttttttttgtggggattacatctagcttttcttaacagtgtccaaatcttgatatcataagattatagttttttgggtgctgtcgtttaatatgtagattgtcgtttaagagcatgaagttatgagcatatataaacttcagctcagatgtctgtgcataatgtttaggtactttatgaatcaagcaagaatgtgtaatagagatatattccaatatcatgtctcgtttcgtagatgaaatctttacaattttgattaaaagagaaaagaagaaaaaagtgcagaatatctgaatgagaatatgaatatttgaaaatatcttaataaggtaattttgtcgtattcgataaagacaatttggaatgatatatcatctcttttttaatttttttttctttacttcctgacatccaacatctgaatttttttatgattatccactgtctctatccttcaaaccaaaacataacttgatatagaggagagggagggagcccactagaagggaggttgaagccagaccacatttttaatgggacaacaaaactagtgttcattaaagttgaaattgatgagttaatacatcgtgtcaatcaaaatgtgggatatacttgaatataagcaaatagatgcccaaactcgatcctgctccaattgaggcgatgccttttccaaaaatttcaattctaatcttaaccgcacacataatatatgttaaagaaaaaggaattggccacactcacccaacagcaaatgttcatttacattttacagtaagtctcgtgatgaaaacagtcacaactatacagtaggagagctacacaaaatagcttgttaattatttaactacttgcatagaagaggaaaatgaaattaaa

SEQ ID NO: 78889 - DNA, 6547 bp, Cannabis sativa
atacatactgtctcatcacaattgatacttttgatagataaataaaactgattctaatttagatatctaggggaggaagacttgataatattgcactatcaacttgaagtaattgttatggatcaatctggtacgcatacctaattattatctattattattgtgttttaaattttatacaaattttgtattctggtttatttgattttgctaacatgtggtatcagattaccaattatatatgatttaggacttataatttgtgtaacaattgatatatatatatatatgttaattttttcaaattacatatttatttcaatattattttatgtttaattttttatgtattgatcctgaaactatagggcttttattcctcttattataagtaatctattgatatattaaattcttaattttattgagtattgagagagaatttcatgtttaaagtttaagattttctcataaaattaaaatgaaattattatttaattttggctaattaggattttcttctctgaactttgacatgtactaaattatgctctctaaatttttttgattgataaaaattctccataaactattgaaattcttatatttaaggacttttgtctaattttaataaaaaaaatttaacatgaatgaaaattcaaagaacataatttagtacatttttattttaaatttgaggggcaaatatcagaacaatcattttaactttgtctaaataaaattaatttggtggacattaataatgtcttaggcgcgtctcttaaataaaagcgcttctctagaaaagaagagaaaaaataacgcggttgaaacttgaaaggtttaaaagtgtgggtataaaaaaaggagattggctttttagatttcttgagtcaaagtctcgaatcgaatctaaacctattattcatttttttgcataattatcataataaccaagctttcttcatcgtcttcctcttccatgtcggtttctggtatacaaggacttactctcgaagttactggtaattcatcttcgtatctttttttattcttttttttttttctctaatcaaaaccccttttcttctcgttgacaatttttttgggcttcatctttagttgttgcgtgtaacaaattgaaggacacagaatggttctcaaggcaggatccctacgtctgtgttgaatatgcaagctccaaatatcgcacaagaacttgcacaggtttgtttttttttttttttttttactgtgtgcgtataacgttcggatctgagtttgctgcaaaacccttttttttgttactttgtttttttttttttttgtgatttgagagatttttagatactctttagaatacttgttaaagaatttgcttgtgggtatgcagatggtggtaaaaatcccacatttcaagaaaaatttgtatttacattgattgaaggccttagagaattgaatgttgtagtttggaacagcaataccatcagtaacgatgatttcattgggagcggaaagtaattaaatttcttaccttttttttttttgtcttttaatgccctaatttttaacttttttcttagacccttttggttgtttttccatcatcaacttactatatatgattttgtgctgtattttgttttcagggttcaacttaataaggttcttacacagggttatgatgatagttcttggccacttcaaactaaaaccggcaggtatatactacttcaaatgcagaatcttaaactacttaaaaactatttgctcttatttatttatttatttgttttttttttcattctagagaatgcttggttgtagagactgttaggaagagaaaatggaaaaaataaaaagcaaaatacaccattacctaatcaggattgataatgtaggttactctctcatttctaactatgctaagctcagaagagaatattttcgggttattcacttgtgaattgtcttccacttttattcttggggttgtgaaataggcagtttctgtttgattttatatttgtgggcactccactccctctttagttttagacaatgaaagtgtttcaggaataactttgtaaccataattcaaaatctctaatttacaatttaaagacgggtttcattcgcgttgccttctattcttctcttttacgtagccaaatgggaagaggaggatgaataattaatgataagaaatggaggagtaacaatttctctgatgatggcttttggcatgcctctgttttataatgaccatggttgaacagaggcatccaaaatactgttttcctaccttgtgaagaggttatctcttttaactaattctgtttaaaagttgactggatgatgattcgtatgtctcatcatcgttcatccctttcatgagatgtttctgttttttttttctttcgaatttctgagataaaatagatagttggtacttcttttagtttccaagtctgcagaaacttgtcgttttaagtttgtgaagccgataactacagtgttgaaaatcttttgcaaggaaaatttcaagatctaaccaaacttttattcttgtaggtatgctggagaagtaagactcatattgcattatgggaatgccaatgtaagctagtctttcccaagttttgtttggttattgttaaggctgtccttttttttttggttgatataatcttaattttcacacttgtgtgttactgcagaaacccggaaaaactcatgctccctcagcaccaccatttgcaacaccacaatcttccttgtattctacacccccgccagccgctgctccttacccacatcaagccccgtcatatccagctccatcacactattcttcatacccaccaacttcaggaggatatccaccatctacgtaccctcctccccagccagctgcctatcctccccaaccgtaaccccccaacatcagcttatccacccgcatcagcctatccacctgcctcagcttatccacctacatcagcttatcctcagacatcagcttatccaccgacatcagcttatccgcaatctctatacccacctccgccccaaacttctccttactatccaccaggtaacttcaccttcaattaattatgtgttcatggctgccaatgtgttattgctacttactgtatctttttggtcttttgaattataggtccttatcccggaacatatcctccgccatactgagaatctgaaatgttactgctctacaccatgcccaagtgctagataatatttcttttgttagaatagcaaatgccaaatgtatagagaattttgcatcgatgtcaaagtacatatcatggtcatgtttaatgtttatgctcagtgctcactcgtcctctttaggaatgataataataatatctgtatggtaatcatttttcctgcacattttaataaattaatgaccctaaatggttctaccgttttagtgtacagaattgatagttctttctctcgatcccagccagccagttttggctggtgccactagtttatttctgacttggtttggagtattgtggaagtaataatggttttgccattttgacacaacgtaagaattaccattgcttaatctgactgtaaaatctaacgactgaaatgggatttgatttgttcatggagaatggagaggaaaacatatatatatattatatatatttggaagtgtaaaagtgtcacaaattgcaaataaggccaattatacgaaatgagagagaccccacacacactctcaatagtccattctcctcatctctgtaagctttcagaagagtgtgacgaaagtgtcccaagcctcttttggtgattcaattttcttgatgtgttttaacattttctcttcaatagtcttaattgtaaataatgcctttctaactttaatcttctatttcttcaaagttgcagtatctttaggtgggtttatgtcactactattgacaacctcccacaaatcttgcccttgtaggtatgactccattgtcgttgattaagtgttataattctaattgttgagcttcttaatacagccaattatttgagcatcactcatcattggcaaataaattaccaaacaagcttaacatgacttgtaagcttcacaaacttaaattgtgtatgacaccgaaaagctcttttaccaccacgagcttgacaaacctcgctctgataccacttgttgagtaaaaaaattacaacacttttattattattgaaaatactaatacaaacttagaacactctaaacacaataactctagaacactcttacacattcacacactttgaactctttttctcacactagttaactctcttgctccaacttgcactttggcacacaatacccttctatttataggatacaagggaaacatctcaagttttctagaattttctaatatttctaagttctttacaagtttctattattctctaaagaattttagaattatcttttcttaatttaagtagttctaaattttatttgtacttatagagttttttggtttctcttacaattttcttataacattttaaaacactctaacatatatggaaccatacatggaagttgagagttcccaaaatattaaacactttttatgaaaatttagcccctacccacaaattatgttttgttttgttttggaagagaagtggtcatcagaggactatcaaagagaattccacaactaatccaagtaagttcttggaaagctgtataaattttctttccaaatatgagtttgctctctttgttgccatctcttagcaaatttggtgagagagaaattattggattaatgagggttattattcaaactctatagctgcactgtggagtggtgtgcttcattgattaaggattttcaggggctcgaatgcttaggtgagaagatgaaggtagtgattaacctccacctgatagtatttgtaaggttatcgtggatgttggtgttgatagtgcctcaggcagttgtagtgtaggggtggtgattagcaaaggccttttggttcgtttactgctgagctttgggctattaagtatggattcaagttggaagttgatgcttgtttgtctaatatggtcgtggctttcagattgcttacatgttatcaccaaggccgactttgagattagacgagtgaggcggccgcattaggcccccaccgcccagtatccccattttagaaaaagaaaattaaagcacagttagtaataaaaaaaataatacccatattgctaaatgagcattgttattgggcattagtggtgcttagcgcctctaaatatatcgttttttaattgattagcaatactttacaagttattatattaaactatatgagacctgatactaaattagaccaatagcgatattaacacatagaagactgtcagacaccactgattcaatgttaagtcttgtagtaataacctaattagagattgagtttaaatcagaatttttatttttacttaaggtcttaaataacagggtcgagtctgattatcattgtgctaaacaacaagaaaagaggcgtgcgcaatgtggataacattttttttgttgatatttctactttaggttaatattgtaattaattgttgagttttgttagagagtcccaacattgtcaatgtgtagaaagataatagaatatataaaagaaatgaactactcttcccattgtcaattggttttgagatgaaaccctatccacctaatcccaaattctaacaattaaccttctcatggctcattgtttagctaataataagataacttttaatatttaagcatctgctaatatgtgaaatgatcttccctctactgtttgttgcctttaaatgaattccttttcaaaacaaaatatatataaataattcatcatttctccaaaccataattataaaaacactctcaatcacttcatgcatattcatccttgaaataaaacaaaaagatgcaccatataaaattatccttattatatattacagaaattaaaataaaaacaaattaatatataactaaaagtcaaacatctatatctgcgcgccactaaatttcaaaaataaaaaataaaattcaaataaaaacaaccaaacgtaataatcaaacgcagaaaataagcttttgatctagctagctgtaaaagctcatctttgatagtgttttctcaagattttcaaataatttttaatgtcaaatattattaacattaatgtacaaataaaaatgaccactcatttatttatttatttatttatttatttttaaatatgcacataatatatattaatagacatatatattaacccttgtttagtttgactaattctgggttggtaacaccactataactaaaatattataactatatgatattatggagtattagacagtacttggtctattctttgttaacttatattacctaagcaaaaaaatcattattatgtttttgcataaactatatatatagtgtcagctttatt

SEQ ID NO: 78890 - DNA, 1427 bp, Cannabis sativa
caactaaataaatagaatgaaattaaaattaatttctaattttcattccattaaatgctaatattagtcttaacaaaacgcacactaaacatttatgttcattaattaaaataatcgtagtaagttacatacctcaatttgtttatatgttactgccaaatgcaaaatagtcataccataatcatctttggcattcacaaactggtaattatctataacatccaccaaaaccttcatagcttccaactgattatgtctcacacaaacatgcaaaatggtcccactttgacccttcaaaccgacttgacaagccttaggagctactctgagtaactccctcaacacatcaattcgccctctcatggcagcaagatggagagggtttctcccttcttcatcccaagacgtgcataagagttcacaatcaacgactgaaagtaatagtttgacagtttcaagatggccgttagccactgccaagtggagcggtgtgcagcgacacatgtcaagttccttggcaaggtcgggcttgtgatttaggatctccttcacaaaatctacatggccgagcatagccgccacatgaagaggcgtctcggaaaaactattattaatgaagagcttgtcgagaattaaattatctagttgaagaagttctcttaaagcggcgactttcccttcccgggcagcttggtagagcaagctactctccatgtgtttttttgatactaaagaactttgaagagagaatttatttaatagttaatttgatgtaaaatatattttagttcttctctaaatatagcaccccattatatataacttttcttgaattaatattctaccaacttaattatttctattttaaaataattaaaatgacaatatgtggcatgtatttgttccctagtttacattttcaagatgtaactctcaataatttttgttctttttcgagagaagagtcaatcaatattgatggtagcatagcatatatgtggcctatatagcatagtgatattttgatattttacatttattttatgtggacaaggcaaagtgtttgccattattagattgaaacaaaaataattatgaaatcttatttttatttcttcatattttttcccggctattcaaaaataatttttcagtaattgtctaatttaaattagattatttgacatatattttaattatctctaaaatttatttgtttaattaatatattaattaattaattttaaattatattatgatattttattatttaaaatatattttacgtaacctggcatatattttaagtcacatattgctgtaaaattggtcggagagtgtaaacttgttaacaactcattatttcgactaatttagcgaggaaattatattctataccttttttatattgttcttttttattttta

SEQ ID NO: 78891 - DNA, 788 bp, Cannabis sativa
actggtttggtgaagatgatgttcgttcaacttaataagttactctatcctatacttgtggtacacatcagagaattttcttttattgcttcaatatcagttctccctgacatttaaatgcaaaagaacttacaacaaacacattctaatacttaaaaagctcctctagagcaaaactagcctcactaaccatatttattcaggtacattgacaacttacttggaattattagccgaagaaggtcgaattacacagaaaatagaacaccaacaatagtgcctccacttagcacaaacactttggggagagcatgcttgaatgttgaatgttgcagctgcaaaacttatacactttgaagaagcaagtacagcatttcttggacaattaggaggtacaacaacaacacttgccattaaccaaatgcttacctataagtaataataatacagtatttaaaatatgttaagagtaagaagataaagggaaagaacaacatgatctctatataactgatgaacaagccatggatgaaatggaattcttacatttcataaactcttaccattgctcctcgattataactctgaatattcctcccatgcccaccaagctagcaattcatgcaactgaaagtgacaactgtttcagagcataaaacttacaacatatgaattgttaaattatttagcagattggtaagtgtttgtttcctccattttttcaagaatatgatttcattatcctaaataatctatgaaaaatcccatcccttaatctctcatagtat

SEQ ID NO: 78892 - DNA, 18232 bp, Cannabis sativa
  modified_base (86)..(98): a, c, t, g, unknown or other
tttatttttgtttgataggtatattttttaagaatatgaattgaaaaaaaaaagttaaaaaaatttagtacaattaaagatataannnnnnnnnnnnntaaaaattattaaaatggggtgccataagaaaattttggggtgtaaataaaatttcccaataattatattaatttaacaaattttaaagacgacaacaccctttgtgctttcagatattttatccatatacaaggcctaagaattcaatttggtatttcaatatatttgagaatgtttttacagttattctttaattttttttttttttttgaaaaggtcattctttaaatatttatgagtagtgtttcaaaaaaaaaataataataaaaatttaagagtagattataattttttattatattatctattttttttagagaaattttctattgttgttgaaaataatgatattaaaagacattttcatcattcttcagtttcatttcattataatttttagtggtccgaacaaatagatttagtaataaatcaaatttgggtttttttttttttcatagataacactattaacaaaaaaaaaatcactatattcgtgtaattttattttctttgaaagataatcacttgaattaaagttttataaagataaataattattctttcgttacattatatatatttataattataattaggaggtttaaaagtagcttataatacaaattctaatttaagcatagtagtttagaatctgaatcttttacatgtgtgttatatttaaaacactaatgtaattgatactgtgatactgagataaactaacattaattttattaatattgagtacttaaagtattcttatattagctacttcgaaatagttaatatgttaaaaagtttacaatagtactctattattcttttataaccaattcaattttaaaatacttcaaactcttccctagagagatgatgaaactttttaaaatattttattactttttttttataaaataattaatttaattttttttcttttaaaataacaaaaaaatgtttaaaatattatatttaaataatataaagaaataaataaataaatatgatgatgtaagtaaaataaaataaaaaaataaaattttaatttaagtattttaaaaaataaaataatgaatcctcttatatcaagaatatctttttaacatttatagtgattagaaatataaaatttgaaatatttataatataaatatttattgtaaatatttaattattttttaatagagaaatactaaaatgtattagtggtgtttgacacttttttatatattaatattgttattagtttacgttaaaaaaatattattattagtttatattttaaaatattgttattagtttaataaagtataaatctggtataatttaatttaataatttttaaaaatattaaaaatatatctctcgttaggcaatataatattcataacaatgctacagaaaaccttgaaaattcaaaagagagagaaggtggatgaagggttgctctcaagaaaaacaataactttggtataaatgtaaagtaataaagagaaggaggcgatctttccaggtctccaatgtaataaatgagaagaactgtagtgtgtatttaaaataagagcattaaattgaaaagctgccacatctcatctcattaactaattaaattaatttcacaataaaattgattttgggaagataaatgggacgcgctgggtgggggcgcgtgaaatattggcatgtggaatccaatagaagaagaagaagaagtagtagttgagaattcttggaagttccgcatccttattccaaagttatggctcattattcatctccacacacgtattcccaaagcatcaaccccacaaccacaaccccaaatccaacccttcatttttatttcttattctaaatctcaaatataggaaaggaattattgcttaaaattcactaaattttcaatccaatcattatcattttatttaattaaattttgtacaactacaagtaaatgaatattcgtctttatttattcaatggattttttattttatttattaatgtagaattaagtgattcaatccaataatttagtttagattttaattattcttttaactttttagaacaaatgtaattgaagaaaatgaaaaaaagaagaaggttaaatataagcttgaaaatattagaataatttgtgcacacatacttaagtttaatttttaattataaataaatatttaagttgaattttttacggtaataatatttaaattataattctgtaatttctatagttacttagctagtatatgttaagtaaactagcatgtgcaatttttttattaatttaagttattaaatttttatttttttgaaaaaattaatttaaatatattaataataaaataacacatgaataaaaatttatggttaggtactttcaaagttacataaatataatttaatttaagtattattactattaaaaaatacttaattatttatttataattaaaaattaaatttaaatatttatacttagttaaaatattagtaactaaatatgttgaatagtgtggctggaggcaccattggcgcgtggcgaggttagattttacacttcaaagcttcaagggccgccgaggtaatttgacttgttacaaaatcaaatagtattattaatattattattggattaatttattattattagtagtgatagtgaatttattaattaatataaatgaaaagtataagttgatagtcgataatcattttctgctacacgacaaaactaaactacaattaaacaatatatatttttcaaaaataaaaaatcccatgttttaaaaccaaaaagcaagactgagttttattgataaaaatttgaagaagaagaagaaaaagaaaagaagatgaagatgaaataaataaataaatgaaatggagaaggtgggaaggtggtggagctgccgctgaagactggtattgttagtttcagctaagtgagtttattgcaaaatatattaacttttaacgagatacagcctcagacttgataccaaaagccaagtgagcgagagagagagagagagaaagaaggggttcaagaaagaagaagaagaagaagacatgcacaatcccatttcctgtttcactacactttattaaatcattttactcaaaggttcctctttttctactttttatgccttttctcaaactgggttttttttttttgggtggggtgtccttctgaatgtgtctttttttacttcttcattttatatctgcaacttttttttttgggtaaatcatattatggcagagccgtgaaatgtttataagattgcatgtggagcctttagatggtaaggcttatttttagtggctctctataaatattataaatgggtttcttgttttgggaaaagggtagctttggtgagttaaatagcttgtctttaagggtagcttctttgattccacggttccatttcaagcatgtctgattttaaaggttgacttactggacacaatttattcggtctctcttgacttccctcttttgttttgttcctaattcttccccatttagactagagagaataatatagagttatcataaatggtccagttcaatgatattttcctttacttgttctgatcgagtgaccatgatgatatatgcttgttcttcacttttcatttattctttgacaattttagtaactgggaattttgtctctatttttcagcgtatgtaagactgctctgctcaaccaagtttttgaaagtgtgttattactttttgttcaccagaaaatgatatacatgaatatatgattagtggacagaagtgaataaacatgcaaattagttcatgatttggatataaccacatgttgtataactgctgatacatgttttggttctttgttttatacctacttctgttcaagaattttagatctgcaactgaaacactgaggaatagtataataaagatgataagctagggccatggtagtggagtggagggcataacttgcatttaaattttgtgtaaaaggacaaataactgcatgcttttttgtaatatacaatacaactttacttcatacctttgctcaagttcaactacggcacactctctattgccactgctctttttatcaaataatagagtttggtgtggcattataaagtgctttcgtttgctgcctaccttttgttaacttacctttttgtaaattctcagaatcattttactttttttagttaggattcttgtttaccaccaccggcacattaaattagaataaaatcccatattttatgttaaaccaatatggcattttcagtgcttatataatataggattatctctttacttatgttgcttaggactgacatctggtacattgtggcagtttatgctgtgttcggttcctggttgccaatgagtgttcatcctaaatataaggtcaggatctcctgtttttatgtttatgaagatataggaagtttgtcatcataatttagaagctttaagtgtcagcttaaagagaatgcagagtttgcctaaagaagattctggtgttcattccgtccagtcagaatcacaagtatttgttggttgttcatcgtgggaggacggttcaactgagtcacatgcccaacaatcatctgtatccaaaagtctgagcttgaatatgggagtttcaacacaacaatttaacaacaccaagcaattgattttccaatttcaagatcaagattcatcttcaactcaatctacaggtcaatcttactctgaaggagctagtatgaaagggaacctgtatggaaatgacatgatttcaactttatcaggttaataataaacctccctttcctcactccttgccccccctacttttttcaaataaattttctacgcctgtgcactagttagttagtaattttgattgttatggtgattttatgtatctttgaatctttctgttcttgtctataggaacccttttgataatcagactaaactgataagcttgagacatgacatgacatgacagagacataagaatgttaaatgggctagttgattccacagacactataaactagatattaaaattaatgctgtatgtatagattaaacgtaagctctttatcttctttgcctaagtcagtactaaaattgtttgatttgatttggtttaaccatcatatctgtatgataatatgtattatacccttggatttttgggtttatcaatttatcatatttgttggttacaactacatctaattgaagtagccttgtacttgctcagggtataatgaaaatcaggggaagactatgggaagccatattaaacaagtctcattaatgggaaatcaagactttgtcctcccttcacaacttgagtatagtcaaccaattgtaagttgaaacccgcctttctcttgctttatacaagtcactggaatgaatcatacctatatttgtttcttttttaggctcacattccgtacggctatgctgagccatacttcggtggcttactggctgctgcagcatacgggccacatgctgtggtaagttctctagtttaaattcaggtttgtcttatgcgaagaacaaaagtcttaacttatattttagatttcaaatagatatttgaacttagattatgcttgagatcctactatgttgttaacatgatgtaattaggtaccatagatcctctcaaaaagcgtgtagaacttgtaaccattattatactttattcattttttatgagattatttttttaactagggtaaaatcaagcataaaatggatcattatgatcatttataggactaagtttcattgcataaaaagcttttcaatgcatttttcatttatttatttgcttatatttagcggagaaagggatttaaaaaatggcacttgtttgattgaaatgctaatttggtgttcaagggattaattgtaatgcaaatcattataataaactaatgttgttcttattgtttagcaaagaaaaactgcgaaagttttcaatgtagtactttattttatgggtagcccatgactcttatatccaatggttgccatgctctttatttctttgttacctgcaatttataaagcaatcttagttgccacttgatgctaggcgaagtggttgggtaagaatgtgagggatcatgggttcgatccccagctgggattgagggcgaactcttttttcttcatctctttgaaagaaaaacgagttgcttttacaaaagaatgtattttctcttttgtcatccaatggcataattaatgttgaaatggcattaggttcacaattcccaggttgtggggttggctcccgcccgagtgcctttgcctcttgatcttacagaggatgagccgcccatttatgtcaatgcaaaacaataccgtgcaattttaaggaggagaaagtttcgagccaagcttgaagctcagaacaaatttctcaaagttcgaaaggtgtgtgcatacatttgttttgcacccttttaagtgttctatcttttatgacattacattttttaaaaagggaattctatgcacttccaaagggaattcacactatttttttattgtttaaaacatatgcagccgtatcttcacgaatctaggcaccttcatgcactgaagagagctagaggatctggcggacgctttctgaactcaaaggatgtccaagaatcaaatcatgccactactggacatgatcttcattcttccagctctgctcgaagtcatatgaataaagaaatgatggaatccgaagctcaacaactggagaactacaaagatggttcttctaccacctcttgctctgaagtcactagtgcctctaacagtgacgacatctttcagcagcaggagtttcggttctctggctaccctatgcatggtcacgatgttgattcacgcaggggtgtgaaccaacatcacaactctacccgtcggtaagagatcttgccttcaaccgttaacattagcaatccgtgtttggtgttcgaattgaatacaggtgctggtgttccaatgggaagtcatccttggctcgttacagtttgcttaatttagcgtttatttccatgtgatcttagcttgttgaactcgaaagacattttaacgtttcatatacttaagactttctatgacttagcgcaacgtactcgcttgtttgtgaaaactatggattatgatcaccaggaaaaagaactgctctgtgataaaaaataatgttacttgatgtgtttttggattgattatgatcatccttaaaataatttatcaatctagttaaatcttttttagaaaggaagatatacggtcattatttacacccactgagttatttttcttgctcataataattatcattgattaattcaaatgattctcttatattctttttattacatcagttgataagaagtaacaaactctattacttaatactttctacaatttagtgtgatacatgtgtatatttttgcaaatattcttatcctgttataatggttctttgaaattagaatctttgtcgaggagagtgattatgatttctttgaacaaataaaggcgatgtaaatgttgtgtcataatcacttgcaacaaagttttcacaaaaatacagtatgtgagtacttaccactgttcaagaaaagaatgaatgacactgaataataatgattgatttatatttgtgatcacatttttttttttgtcgtattattttataatttcaataaaatgaaactttgttcttctcaaaaagacaaactacgaaaaataaatttgggtaagttttacattactctggatgtttcaacttatgtctgtttgggttttttgaatagttgaagagttttttagtttaaattttttttataattttacatgtcctaattattttaggataacttgcatatttttaaaaaaatttataaaaatttacaaaaataaattttttatattttattgtgagtataattattattttttttttgtataaattttatttttgatattataaattatttaaaattttctaaaaatttattaaaaatttttttctggctatggagataggtatgaagtctaccaataaatttttataattcaataaaattttggtttaaaatatatttttttaatttttaatttttttaattttaggtttatttcatagataattttatttgttgaaaaaaagtgttatgtaagaatgtaaatgattttttttttttttttttttaaaagcataatgtaaatattatgaatgatgtaaaaaaaatcagaagttcagaaattcaaatactattttcttatgctcaaaaaaggaaaggaaaaaacaaagaaaaagaaaaaagaactattaactgaaaaattgatatatgtatacttatgaaaggatctaaaaaaaaattatattcaaatactgtgaaaataactgtaaacacaaataaaattaaataagattaggaactcattatttttatctttgaaagaaagttaagtaatttatgtatattttttaacaaaaacttaattttaaattcaatccaagagtacatttgtcctttcctcattaatttttccatcttcaatgaaagtgataagcatttatattatattttcattgatttaattttttaccctaaaaaacttgattatatccacaaacgacgcaagttaacgtttttttttttttcattggacttgtgacggttttatgaaatacagttaaactaaacacgtccagtcccagactctacccacacccagattcagatccgttaactcttcttccttcttcttaaagtacgtgcactaattacccaaaataccctctctaaacaccataataacattttagtcccctcactaaatgtaaaaaattgcaaagattggggtttctctgcaaatagtattaaatgtgttaccagcatgtaaaattcctttcctcttcactctccttgccattctaaattttttgtatgctttttgactttgtacttggttttcccagagagagagagagagagagagagagagagagagaatggagggagttggaggaggagcgcactacaatcctcgcacagtcgaagaggttttcagggatttcaaaggccgtagagctggaatgatcaaagccctcaccacaggttttttactttcgctctgttttttttttctccctctctttttttgctgtgttgttatgtttcataatttggtttctgagaaaacccagcaaggaaattctttgaagattttgaagttttgcggtttgactcgttatgggtctcgaaaatatggtcaagttcttctatgctggtgttgctttatgtcgttgccttgcctggttctcaccataccacgggtttgaactggatgctgtaatttttctttctttatttctctcgtttcaattatcgctttctcaccgatttttaagcgttcagatatggtttacttgaaggaaaccgtgaagcgaaatgggtataaagttcgtgaaattatgaattttctgtttttgttatgattcgataccagtattacatgtttcctctcaagtattggaattttgttttagacgtttggttcgcctcggtcaattggttacccttgttttgggtgaaagaaaattaatggcaggaatgcagtaaaagattcctgaatttgatttggtgtttattataattcttaaaatgtttttgatttgaacttaaatattttattttgaaaattatttatgttgtgctttacatcttcctggttctgttaatgcagatgttgaagaattctatcagcaatgcgacccgggtaacatttttttcttcttattcaaatgatattactgtacttatattacgtaatacgtattacaaagtttactatagttttagacatgtgcattagtaagatattatatttcattattttacgttctcttggttctgtacatttattaatattggttggtagcttttattgcggtgcaaatttgtcaatttgtttggaggtagtctgctagagtagagagttttctgtccttattagctgatatttgtttttttttttaattttttcttgggatagttcacatgagccttagcttaagggcattaattcacatttttatgtttctgggacgaaattgactaagcatacgagttatttgcagttgttttgttttttgtttgtgcatttacttctcactgattgatcacagattttctttagcaatctcttccagctggtaattatgggtaagtttgtgtttgcagagaaggagaatttgtgtctctatggatttccgagtgagcagtgggaagttaacttacctgctgaagaggtgccaccggagctaccagagcctgcacttggtatcaactttgcaagagatggcatgcaagaaaaggattggttatctttagttgctgtccacagtgatgcatggctactttctgtcgccttttattttggcgcaagatttggatttgataaagctgacaggtgttagaacacttattttacagttttttgtttcttctttgtttcaaattattggacttgacaaactcacctgggtgaaaggaatgtgtatttttaatgcaggaagaaacttcataatatgataaatgatcttccaacaatatatgaagttgtgacaggtgctgcaaagaaacatttaaaggaaaagccatcaggaaatcatggcagcagcaacaggtccaagtcaaactctaggatggtaagtttgttttttcaccgttttccttttgagaatttgttaattattttcatctttactatcgtttgtaactttttcattttttatagaagaaaaaagaaagaaaagattattgcatattgtataatttgtaaggtacgtgttaagaacaattttattaatgttcctgcatagcaattgctgtagtttctgagtccctacaaggtggggagcctaaatcagagaaaggaaaaaaaattgtgaccgtatctatatatggcttttagcttgtaaaatacttgatttcttcaactagccttgtatatattagtactcttttcagattatctcaaatctgattctcatttcctggcttaaatataagcagcggggaccagaaactcaggtaaaacagccaaaatcattggagccaaaagatgaagacgatgacttagatgaagaagatgaagacgagcacggggaaacattatgtggggcatgtggtgaaaactatgcatcagatgaattttggatttgttgtgacatctgcgagaagtggttccatggaaagtgtgtgaagataaccccggcaagagccgaacatattaagcagtacaaatgcccatcgtgcagcaacaagagatctcgcccttgaaatgctcaatgaatctgatgcagacttctagctttacgcttgtttgaatgaaatttgctaactgctttgcatagtagtcgttctttcttagttctagaattcgtgcaaacttgtgaatctgtgtaccttgtttcagggggaatctcagtgtaagtttagtaccattaatgtttggatgccccgctcataattaagtacattttaattttagtttctctaatggttaaatagatagtcttacaaaattttatgctacaacatgtcaacgtgaactgcctttgaatttttagctcaccttggaccatttactttacatggtatcctttattcacaataatgactcagaacttttaaaaatttatatttgtggaatttagaaaagaataggagataggactgccaagggacatttctttaaggtcatattcaacatgtctttttctgaaccaagacttgtaaatttggtcactttcgaaaagagtgttattttcaggacttttagcacaattagtccgtccatttcttctacgtcaccattttattattattgcaatattttatttcttggtgctgtatgaatgtttaaaccatatgatataaatcctgcatttcagcatttcctttctatctttggtgaattgcaataatattatctttaaattttctctaggactttgtacttttcattgttaaatgcatgcatggtaattggccttcggtgtgtaacagagggtaacgtgaacacacctatcttaaatgtatagagcaaattaaaaaaattgatttaacttacaatactgaaaaacaatattatagaataccaaaaaaggttctcattgttactgtttctgattggggaagttagaaataacaagttataaatgacccgaaaattaccataaactaagctctcaatcactgaaaatgcaagccttcatattctagattggttgaacttgagatggtaaatcaaggtcaaattaagcaataataataataaattttaagaaaccgctctttatatatgtgaaggagacctacaatggtttgcattgatcaccggtggagacggtcgacaaaaacaaaagaaagccaaagggagagatatttcagagaatataactcacaacaggatacaaaagataatacatattaggggacaaggaaaaggaaaacacaaaactctgtttttcaattcttttcactgaccggattgtgagtatttactttgttcagagtgtcaaaacctcttgagtcttagcggaaagccgtttcagaaactcgtaagtggtgatcattgttgttgcagacatcgacattgaagcccaccgaggccccaaacctctgtaacaagccgtccacccaccttcttttaccaaattcctgactgtttgtcctacagttgtcggcccacggcgaccattttcatccccatccaaaacctgcagcctcgtcttaatggtatcaagaggcattgttatcaaagctgaaaccccaccagccatggctgcactgactccttgaactgccattactgtttttgaatttggtgtaaatgtgctaaccccatttttattgttaatatgatcgtctttcttggtattgtaacatccaactccaccccaaaccagcctttgagcaatcgagtaagaagcccaccaaactgcattagacggtgcatatgtcaaaatcgatatcccaaaacccctatacaatcccctaggaccatcagttctgagaatctttctaaatgcatcgaccccgttaagatatttacacgccgaagcattaggaagtttcgaattcctacaaccttgtaccatcagtctctgactcacaacatcaactggagtccacacaagctgggcagccatggcagcacttaaccctgcagctgcattagcaagggtggccgcagttgcctccgaaagtccaagcctcacagtggcggttcccacattactcttggtgacctcaagtgctgtcatgtaaagcgcccgagcagggattgtacccgttaaagaagttccaaatcctctataaagagctctaaaaccctcatgcctaaccattgaaaacgctgtcttcatacaagaaatctgagactgagctacttgttgcctggttttcaacaccacagcagggtagagactcgccgaaacacccgaaaataaggcggcgccgaggaagaaaaacttcgatttatcaagcatttgccaatctatttctgccggtaaatgaatctcttgcgccgactcttcctccgccacactcaaattcattttcgccacttttgctaaaatacccagttactctttcaactaacttgatcccaaccaaaaccagaaccggaacctaaaattcctagttaaatttccctatcagttatcaccaaccttaatccaccacttcataaacagccaaactgtacaaaaagttcaccaaccgaactagaaaccctagatgtacggactatacaattaattaaagagaaaaatacaaaagaaataagtaacatgtataaatttcacataaacataaggattatccaacaagaaatatatccgatggattaacgctttttcctcctgtgaaaccaggatttggatcgaggatgagctacgacgaaccaatctaacatttcttttttttttttttgtaagaatgcagaaccaaatatgatcaacctaaacttttcttaccggaaaaaaaggagcatgatcattgtcttcagccggagtattcagattttgccggagaaaactaagattacgatgtgtaacaaattaaagaaaagaaaaacaactatatatctactaacagtagagagggaattgaaagcttgaaaataaagttaaaggaaacaaaaagattggtaagagagaaagagaagtgtatatatatgtatatgaccggagatgggaggtgtattgtgaaggcaaaaaaagagctaacctgaggtaggaggtggggaactgacacgtgtcagttatagattagggtgtttttcttacagtttgttgtcgttggtacaaatccacagtacgtgtgagaatgtgacgtgtgaatcctatccatacgcgagacttacgggcaccgcttgtgattgtctacagacggtctcaccttttttgttatatatctcccacttgtactaatttctgtcctttaccttattaaaagaacttctcttaattaaattaactatataatcttttgattaaaaattcatgaatatcttaatttctttatgtagaaaatgaagaaaatataatattggttggtgaattattattaggtattatttaagatttttacgatttatataataatcccttaactatttatattgttattaattgactcttttgttaaatttttacactgataaataaaatgaaaaaaattctacagtgtatttgttaaaagagatatactaaaatgagaaaaattttacagtgtatttattaaaagagatatactgatacatctttatttgctttagtattcgaaataattttttaattaaatgtttaaaataaaaaaagagatgattgaaatgaagcagaagtactagtagattaatagattagtaaatttaattgtttgtattttgggtattgtgttgattaggcaaagtttaattagagaacaattaaaaaaggtatgtagatagccttggattggatattggatgaggtggaccatcttattagtacacgtcacacacttgagagagcgtccgaccaaagtcatgatctaaacatacacgttatccccaatttattattattaattatatttaataaatatttaaggacttttctttcatcaaatatttctctccatttccataaatattttattatttatatagagagaattatatatttatctgcaattcagtaatcttacacacacagtcagtatgcatttttcatatatattgaatttttatcataaataataattatgtataaaaataatattatggactgaatggattattaaataattaaaagttcgtttctgtcatttctcatgcatgctttgtttgtgtacagatcatgtttcttttacctccaaactattacgtacattacatatacatgtaaaatctttgttctctaataaattttttcttcaggcaatactgattatttgtctcataattagacaccatatttttggggaaaaaccattataaataataattatatataaaaaaacctattcaatcttggtacgtatatacatttatacgtttaaaattaattgggaaaataaaatgcccaagcgtaattacatgtgaataaggacgtttaagtgttattttcttgcgtactataagtttaattatttggcaacttaattatagtatctcggaaaggctaaagattttatgtggaggacgttatcaaagtgtcttccttcacgtcaaagtttgacaaataaacatgtgaatatggagcaaaattgtgccctatgtggagcgcttttcattggtttcatgcctatatgcttggtatgggagtattgcgagttttctggttttgcagcagtagggcgtgatttgggcattattatggactagtttcagaacgttatgaggagggtggacgtcgcagatggtttatatgtactggtgatttgctatggaaagctctaagtatggcatgaagccggggctcacgggctagctccgtacttagagcccacactattttggagtccaaaataaaaaattaagagtcccattaaacatttaagtaaaattatgttgaaatgctaaaaattaagcacctagcactttcagatgtgtcaatatcgctattggtctaactaaatatcgggtcccatataatttaatataatagtttttaggaagtatgactagccaattgtaacgcaacatgtcgagaaggtgctaggctggtgcctaatagcaatgttcatatagcaataaaatgtgcaactcgatttgcaaaggactgagtcttcaaccactgagaaaacgctggacctaaccttccaagcatcccaaaccacgaaaccaaaccatactaccctcaccttcgaacaaggcgcctctctatagaccacatctctttgccagcacacattggcctcaacagaggtatgttatctcttctttaagctttcaaccgttagttaagaatcttctctgtaaaggcctaatgagacgtttaattttttgttttgggctcccaaatatctattgtttactattggtgatcaagagtcttcttgcaaacgtcttataaccaatcaagttgtcaatatttattgctcaccagtgtgccccttctcaatttgttgttttaatttcaatatagttccactgatttgggtttatagttccaatttagatgtggaggttggtagcagtactatctattttgtaataatatagtggtgtgattctttgtcacaattaattcattgaccctttcggtattaatttgaaacattttacatctgcaaattaaacgacaacgtaatacttaccatgcacgcgtacgtaattagttccttaattaacactacaatttattcattctttcaaatagaaacaaaaatcaagctaacaaatattctcaattatttatgaggctccccaccgaattatttaattctgccattaatattgcagcagctgcgcttgtgcaaccaatttcgtagcttaatgacaaggtaagcaaggtgccaagcccccataaccacaaacatcccctcccacacataaatggagcatttgtataccgtatcaaggctttcataataatcaccatgatctggagtcactaagatattggcatgtaagaaagactgacccacgcaaaacagagtaacaaacaacaccaaatcaaatagccaaatccaaaacttattgttcgtaggtactcccccaataatcaaaattattatactaagagaacccagaaaagcaatgctgttgaaccaaacaaagaaggcataattgtcgttgtcaatatgagccatgaccgaagttcctgcaatacatgtttggttgctgcaatcagaaatgtcgttgcttgcttgggtggtgttgtttgtttgttgccagacaccgccgggagggttaactgcggcctgaaatgtggtggacacaatgagagtggccaccaccatgattgatccttctacgtttttcaaccattgcctcctttgtttccttaggtgtatactaatccattgcttgcttaaaagtgatttattattattattattatgagacgtagtcgacattggctgctgtttcatgttcatcatcatcacacgttggagtctgaaggtgttgaagtcttgtggttggtcgttaaggagatcagaggccttatgatctttccagttcaagatgtccttgtccatctctttcatagaaaccaagtactctacagtctaagtgggtatatataaaagcagttaatttagggagtagattgtgtatgtctttattataatatttcaaaagatcaccaaaaaatatgtgtagtttttctttttgcaaaaaaaaaaaaaaaaaaaaaagcgtaatatacataatttttatagccaaattattacaatataatattattctttacgtattagctttgtattatattgtattatattgaattggattatatatcatatttttgtataatactatgttaaactttaatttatactaaaatattat

SEQ ID NO: 78893 - DNA, 14040 bp, Cannabis sativa
ggtacagtacatataaaaagaggtatgtttcaattaaatataaaattaaaagtaaatttggttaattgatcaataaaagaggtatttttcaaaaaaccccattatctctatgttaaaaagagagtgggcttgtctaaaaaggagaagcccaagtgaaagttgctgtcctctattttgtaatctttgttttccttcatctacaaaaattacagctcactcaattccattcacagttcggcacacgtgattgcagctctctattttacactatcaccaattttattttattttatttttatttattattaatcaagtaaaatccaacttatttattttaaaatttcatttaattcacttccattcccttcattttattattttattattaaattaaaaattcaaaaataaaataaaataaaataaaatttgcttcattttcttcgtcttactttctttctttctttctttattttcctttctttctctccttccttccttccacttcgtctcgaccgaaaccctcgtcgtcttccaatcttcaatttccgaaccaaaaccctaacaattccaacatctcatagaagacgatactcaccgagacctacaagcgaatcggttcattgccatggtgctagtcgcttagttgattcggagggagccttgaggatctaactcggcggcgattcgattgacttctcccttcggcctgcgctaatgggtgctgcgggttccaaactcgagaaagctctgggtgaccaatttcccgaaggcgagcgatactttggccttgagaatttcggcaacacttgctactgtaatagcgttttgcaggtatgtttttttcttttttaaatttttattttttaagtcttcgtttcatcgattttcattttcgattggaatgaaagggtttgacttggttttctttgaatttgctcttatttttactgaattcttgtgttacaatagagcttggcgtgcaagagggcaagaggaccaaagtcttgttattgttctgtgaattttgtgttgttacatattcatttgaattataggatttgatatttcatttcgttctggatgaattaatttctttattaattttcttttcgttttcttttttgttgctactctgttgagtatcaagatatacccctttgtgcgtgttgatattagtgttcgattatgttattgcgaagtataataaggaataagggattttggttccaattcattcataataggactcgttacttttgatccaaaaaaaaaaggactcgttgcttgtgtaatttttgttgttttctgccactttgttcaaggcaaacgtaagagccgatgtgtattttatcacattaccctacgatactaacggtgtttgattcggctccaaatgtagaggataagagaaagaaattatactagctggatagttttctttctgttttcaataggctatctagagaaaactaaaaaaagaatcaaatgaacagaatgagcatgagtttgatttatatttagaccatttgaagtccaagtataccatatttgcagaagacatttttggggtgtgacagtataaatgccagttgacatttttttagagtaccatgtacaattggaattgtcctcttaaccataataataaaaaaaaatggagaaatgaaaaatgggaagacaatcttctggtttggtgtttgtgttgatatgatatttattatctgctaaataataggcagtggaggctgattatatttttaaaattgtttcctgatcttcattgtttttattcttcaggcactatatttttgtgttccatttcgcgaacagttgttagaatactattcgaataccaaaagtattggggatgcagaagaaaatctcttgacgtgtttagctgatttgtttagccaggtaataattcaaggtggaatgtttttgttatagatgagcttgatcaacacagctattatttacatgctttctttatgttactggcctctgttctccttgtttgttgctttagtgctgtaaagtttacatggatttttctcaagttggctgtgtatgtacctttgtgtttctacatattaccatgcgagttatgttgatttaatatctttttttgttttacttttcttgctttttcactccatgtacaagctttcagaagtaagtcatcctcaattaactatggactctacagtatgtctttctgttttgttttttttttgcctgaattctatctagtatccactatgatgctaatagggtcttcctgttatccctcctggtggtatggcatttacaatagatgatgttgttgtatctgaagtcttgtcatgacttactgattggttgagagatcaacaaatgatttgttcctctttttttctttgtccagataagttcacagaagaagaaaacgggggtcattgctcctaagcgctttgtacagaggttgaaaaaacaaaatgaacttttccgtagctacatgcaccaggtatatattttaatatgaaaacaccacaaaatgcagtttcttcaaagccattagccaaaattgtcacaaactgataactgtgtatacaactaaaggatttttcctgaaattgaagggcggcattaggtgtatgaattgttaggtattttatgaattgtataggtgaagaggatcaatgaagaacatagagggaactttgcaaccttgtttggtagctttcactggttgtgagaaagtcattgctttttgctttgggtggggagggagggagagagttgaagatgaaaggaccaaccaaatggctttgctgaaggcaccaaataaagatctataatatgcataagctgacaatctgattttcttttattaagtacatgatagaaccctgggagagaggagggagggagggagagagttgacaatgaaaagatgataccatgggtaatcaaatgcctttgctgaaggcaccaaattaagatctataatatgattttcttttataaagtacatgatagaaccttcttcaataatcaaactgaatgaaacatatgctttgttgttccattattaaaagattgaataatagccttatcaatggtaggtactgcagttacttttttgtatggtttgactcttagaaattaatgcccagaatgaatatggatctttaattaaaacttcatgtattgtcttgcatgttcgagtttcatcatatttaaagtgattatttcttgctcaaaggatacgtgtaaaaaggtatattgactttcctctgcatatgagcgtgtgacttgctcttgcttgaacatttaaaaagttcttgtcaatgggcaagaggatgttaatcatattttgcttcaagtttatgtagaattactattattttcaaataactgtttaaacttaaaatcactattttttacaatgccttctgtttttataggatgcccacgagtttttgaatttcttgctgaatgagcttgttgatatattggaaaaagaggctcaagcaacaaaaagtgataaagaatctttatctcctcctgatacagtagccaatgggccaagaaatggtcaggttaatggtactcaaaaagagccattagtcacctgggtgcacaaaaattttcaggtaaatgcttttataattaattttaagttatctttcaaatggttgttggtaacttgttaatgctaaatattatgttgttcaaccataacttcatatgatgttgtgtagttgtattgctaacacgtgtagtggctgaactgtgttacgcattccatactattgtttttcttatgtgcggcattgcttcactaaagtgatgatctctgagttttttattttgttttattttaattttattattattattatctcatgtttttaatggctatctggaacagggacttctcaccaacgagacaaggtgcttgcggtgtgagacagtgacagcaagggatgagaccttttttgacttgagccttgatatcgagcagaacagttcaataaccagctgtttgaagaacttcagttctactgagacattgaatgccgaggataaatttttctgtgataagtgctgcaggttggtgtctcttcctctctgctacagatatagtcttttctgatttttgcccactatgtggatctccctaaatatctagggatagcttattcatcagtgattcgtctctggtgttaaaagaccattatatgcttgaacttggatttagaaggaaactaaaaacattccaagggattttacttttctttttttgaccccccgggttatgtatagataacctcacttgtggtggagaaatacctgataaataagggattttactttatattgtttagattcaaacaaaaaaaattgttcttttaaagaaaatatgagacttgatgtaattttctagtattgttaactttataattttttttaaccttgaatctcttgaggtttatttgaccttattctcattagttttttatgactggtggaaatgttgccatgtgcagtttgcaagaagcacagaaaaggatgaagataaagaagccacctcacatcttggtaatccatctaaagcgtttcaaatatatcgaacagcttggacgctacaagaagctctcttatcgagttgtcttcccccttgagctgaagctgagcaacacagtagaagatgcagactctgagtactccctgtttgctgttgttgtgcatgtcgggagtgggccaaaccatggacactacgtcagtcttgtgaagagccataaccactggttattttttgatgatgagaatgttgagatgatagatgagtctgctgtgcaaacattctttggatcggcgcaggaatactcgagtaacacagatcacgggtacatcttgttctacgagagccttggctccagcaataagagctaaagaagaatttgaatttaagagggttaggatattataattattggacacactttactcatgtttttcatattctaatttgcctattttctctttttttttttctttctcccctttttcaacctgtggaaagagctgtgaagtatcaattgagtttgggttgtcaaaagtgtatacttaggtgacatgtacagcggatggtgaaagcattacttctttttttcttttttcttttttctttttgtcttctctcataataagaggaaaaggagcagtgtacatgttgtgtgagaggtcttcacatagacaagtttgtatttttccatggctcatcagaagtgagaacaacattagaattgcaatgcaattggaatttgctcactattatctaatatctagtagtgagaagagtaaactggagacaatgttacactggacccattttattatatactatattatatgtatattatgctctatttataaatgtataattgtcgtaattgcaattgcaacactaattgtctttttcgacgatcagacttatttttaaagataaaagtgattgaggatgaagggtaagtaaaattatactatatgatgcatttaagattaagttgaaagaattggtgagcaaagtaaaagataatacacgataatcttatcagtactggtgttatagtatcaatatcaaatctaacataaatactattttctttacaagggaaaatgaatttgaaggttcgctattgcattgctgtaggcatataagtgtcatcctctaacaatgcttcaatatcaataaggtcatcttcaaaatcaattgttccttctgtattcataacgtcatcatatggaacctgcagataaacaacaagaccagttcaaaatgcaaaacaaaaaaaccaaaaaataaaaaaataaaaaaaaatccacaagctaatggagcaaaaggttcccagtaagctttttagtacttcctttttgagctataacttccaataactgctcagcttgttatgaaaggattttgcaagcaatcccatgaattagatttcagtaaataataaagaaagcagggaacagtataaacgcactggccaaaaggcactcattaccttcttttcctgtatctcagtgacgacatttagcagcctccggtattgatttctcgcctcagggtattgaaccattgacttcacccgagcgagtgctttttgcattctttcctctgattgtttcctgccttgttttaggaaatcataatcatcatccttggaggacgacggatcctcaatgcttggtacctcaaccaatgcttcagacttaaacccacgtaaaccacttccttttcgtctccaacgcaagataatcttttccacaattcccacagaccagacaaacttcttgtagtttttcctgacctggtgacctcttacaagggccttttaccaagagacctaaaaagttagaagtcgtggatactaagaatcaataactgcagaaaatacagaaacatttacctgaattttgacaatgttctgccgaatactcaaaaattctttacggcccttccagccacggaatttattttgtattctgattgcagcagcattcacatcattattatgttgtccacctttctgtgtcttaacagcaataagagataatgcacgctcgtctgacaatccaaatttatcatcaccgtattcttccaactgcttcctttggaatgattgcaccctgaaaacttgatgaattcgagcagcagcttgggtagcattgcacacagcagctaatgaatccttcagagacagtcgatcaggatcatcatcttttataggagtagctgttctttctgaaacagtttgcacggcatttggagttgatgtgtctgttgctttgcttgccttggcatctagatcaagacatttaaggtgtgcactcaatgcagattccgcaagataaccagaaattcctttatgtccattgtcagacgctagatcagcaggtgttttaccagagggatatttaggacttgggtcggttaacaatcctggagctgcacccagggagatgagggaagcaacggttcgttctctggttaaaagaaagagaatgtgaatgttatcaattactaatttcaacacataccagtaaaatgattttctaaattatctaaaccagcaggtcaaatgttttttcttgaatcgtgaaatataatgcaaggttaaatattttattataggatgtttacatctcaactgttacatttctattctccttggaatgttaagggaaagcatttcttaatagcctcatcggagctttatgtatgtaaatattttatcctcttcatagctcaaacagtcaaatctatggttcgcccccttcaacctcctaacacctacatagtaattgctatagatttttgttccttaaatatgtgaaaccaatgaaaatttgttctcttattttttctgtaaacaaatttgtgcttgtttatattgaaaaaaggtcagaatgccgaggaaggaaccacacaaatgtacacactgcctgtttgagtgtgggaaagggggaaaaaaagagtaaccagaagcaaaaatcacattgaggtaacacaataaaaacttaggtactcacctgccacaaaatgctgcccagtgaagtgccgtccagccatttacatcacggaaatttacactaacacctgcaactattgtaggttctaaagcccaatcatacccaagagctgctgcaaaatgtaagactccttgaccaccctcatctagcaagctagggcctttgccaccttcagccaccttctgtaggagccattcatacaacttctcttttagtagcttttgatgtagctgctcctgtacactttccacagagaagttttcctcagaagttaatctgtacatctgatcccactcatcttgatcctctttcagcaaggaactgattttattgctcaactgggacatttcagctagatttacggggtcagcatttgaagagggagagctgagcgacattaattttccaaatcgcagtttgagtatttcatttgtgcaaccactttgattatatttagtttgcacatctcgagcttcgcttagtcgatattcaaattctcgtacttcactacatgctaacctattggaacatgtcacataaaaaggaaccctcccagccttatgtatgggagcattgcaacggagaacaccttctgcaataatctcagtaggaacttctacttctccaaacatacatgaccatttattaatttctgcttgctcaaccttcaagaatcttccagtaattaaaacctatacaaattgtggggaaaaagaaaagggtcagcaactaattgcgtaaaggacataccatgtcctgtacctgataaaaataaatcgaaattgcagtttatatgactgctgattagtaccttgacttcagaactttcataagcccagtttggtgagaaatctataatgctaaaaagctgctcctgtgagagagagggactaaggacatagttatcaagacgtacttggctggaatcattaacacaagtgtcaccttcaacactgtcccagtaggctctagaactagtctgcatatgtgactcattgacatcaccaagttccttactcatccatcggttaaaactgtcaagcttctttaaaccttcttcagcaaaggatccaactaacaaaggctgtttcgtaccagaattgtagggcttctcctccaggttcatgttactctttgaaactggttttacaaaatcatcatgctcaatgtttccacgatggattttaagtaactcgtcaccatgggctacttcacctcgatatctagatgtgagattattatctgaatctgtgagcaaggtctgatccacagaccactcaggtaagcgagagttaccttcagaagcctgttaattgtgcaaattaaaacctgaacatacatgaattgaatctgaagatggaagcagctataatgtatatgttaaatggcagaaacaactacggtattttacaaaacactataatgcaaatatctacccaaagaaaaagtaaattaattaaaattacatgtgaccaacttatacaatctgcaaccatgtgtacagcttacttaataattagtaacaagaaaccatgtcactacttaccaccacaacaatgctttatatgataagaaagagcaaaaccatagtctaaggtgaataagaagatataagcacgaccaccaaatactctacagtttgcactttgatgaaattggcctacattgccatgatcattgatgctgctataggtatataaacttcaagaaaaagtaaactatatggttgaggcacgtaaaaaattacattatcatcctaagtatttttagtagcctaaatgaaatttaagattttggcgaaccttctaccatagccatctcatctaacaactaatccatcaaaaaatgacatatactcttctgtacctgccagtcttcttggatctgtgggtgtttaccgaaaccattggagaaaagctgctcgaaaggcccttgttcttgcttctggataactgtcacgttattagattgcgacgaagaaaaggcttgttgaaaaggcaaatgaatgctggcagcattatttcccaatgtattatcccatgctggaaagtccaagttcttagagtgaccagaagaaagtccagcactgctatccataccgggaatgtctgacagtttctcttgattattatctgttgtcagtagagcgtgaaaattggtaaatccagtattcaaggcatccaaaaactgctattcccatgcacccgcatcaacaaggtctaattctaaataatggactgagaacaaagagcaataaattttacttgaaaatgacactggatagtacgcatcattgattcctgcactaatcttttctgcaaaaggttgttgtaaatcgagaaaggagtgcaatctagaacttgcttgattatatgctgcaaattgtgttaggttgtgagataaaaatgagaatactgaacagtggattaacatggagaaggaaagttctaaaagataatagtttcagagcatcataaaagtggaactttaagttgaccttccatatttgacatatgagcaattcacaaatgcataccaaaaaaaaaacataagaacctgattcagcatcttcatattctgatgcctgagcactgtttaaacttgttgtatctgtagtttgtgaaatcatttggtagctatttggatggatgctagatgaagcagggctatcaatctcagaactgggtgccgtatcagcttcttcagtcccttttattcggttataatgtgtcctattgccctgtaaagttgaaaaggcaattatacaacggtgtttaaaaatttcaaggtaaaataaaattccaaccaaagtttcagcaggcactatcaatatcaattatttacataaaaccagatatctatctagtacaggaaaataaaaagtacaaccatcccaaagagaaatggagagatagtgacaagacaacacaaattttattaaacttcaagcaatgcacaagtgattactcatcttcgtttcagcaccttacaaatttcaatcaaatttccattgctaggtagcaacacattcatctctgagtctcaaagaatgtaccactctaatgaaagtgtacaattatcattacacctaaaccaatatattccagaaaagacatcagggatatgaactcaagccaatattcacaacttccaatttttcttcttcagaaaagttggaaggcagtcattcttttccttctggtatttttaagctgaaaaaagcatattttgttcactccatttttcaaatagcttttctatctttgtattaaggactcttcgtcctcttccatttgtttccacaaatgcaatatatgtagcttttatgaaaacaatcaaattcatgggcatatgaaaatacaatgagaacattcatcattgaccatataaaagctgtaatgaaagggatatacagttttgtaatgcagcatgtaattgtgtttctcatctcatgtactgacataatataggaaatgagaaaacaacaaataagggaaaaagataactacttatatttcacattttcacttttaagctatatctgattttgagctagaaatcataaggatagttgacaaaccagaaaacaaataataatcaataacagaatgaatcagtaccttcacttgccggtagtgaacaagaactatgtgtgaaagatccctgcaaggcaattgattacgttccacagaaaccttagttaacaggtgtgtggaagagatagaaaaggagagagacacttcaaactttaacaagttcacatgactgagaaacactgagacagatgagcacatgtacaaactcactcttcaagcatccaataactgcgccgttggaaattttcattttcttctccatgagcataatagcagtgcagcacatcaatgcttccagcctgacaaagtttaaatttaattatcaagtggaaattaatttagcaacaactcacacctcgtgtgagaaactgggaaattttgttcatccacgcacaaaaggaaaatagacaaagaaggcaaaaataaaaaaccacaagtggtttagtcaccttgaaatccaagcatcgtgctaaaaggactactgccgcagctactaatgacatgttttcatgttcttattacatataaataattagtttacaaaactgcttcacttaattctaggactaagagctatgtggccagcatgtatgcacacacaaaaacatatctacatgaatagaataattattcacttacaaataaaatctaaagaaacatgcatatattacttccaaaaacaaaagctaaacattgttgatgtttaccttgagcctttcgtgagcctccttcactgtctttccatcctttttcttcctccaattatgtccatcttttctgaaatacctcagtactttccggtcaaaaagaaaaagtgagccatctgaaattaatagcacgtgtcaaaccaagataccctttgatataggctcaatgagggaaaatattccagattttgacaaatgtaactggattaacagacttactaaaagcataaaaaattacatgcaacaagaggatatattgaaaacatcggcagtttattttcttgaaatttgaatggtttcagtgaaacattactacatcacagtgactaagaaatctgaaagaccgacaatatttatcaggaataaaaaaaatagcaactaatgtaccatggcttaaattgtaaaaaaacttctgttgccacctagcttagaaggtaaaacctggtaattggtatcgaagagctcgtttaaaacctgccttacctaaacaaacagttttaaaaagtttttacacatatcttaaaaaataaacatatggaagagaaacaacgataagttaaaagaccaataaaatccataacaagatgataaaagttttatctgaaaaatacatcaacatatatatagcagaaacacacatataaaatgcatgcataaaatacaaatagaaatgcaagacattttaagaatcatactaggtggcatatttgcaggctctggggcaatgcggaactttttataattccgaagaatttcgcatatttcagctgggcgcagccatcgatgttgtgcttcaatgagaatttgctcaatatctgcaacatattatacaataacaaaattgatatttctgcaaaatggagcaataaaatggctgaataattactaaggcctagatgttccaaataatacaggcatggatatgcattaccacgacaaatgaacacaacttggcctaagcatggcaatataggcaagagaaagatctatgatccatttatgttgggattttggaaaaatttctctcacgtaaggtatattagaaaagatagtacggcagtccattacaaatatgatatcttttatttgctaccacggttaaaaatctacaatataatctacatttatttgtcataatctatggagctgcaaagaagagagccctttcataatggcttgatagggtgtacttcaaaaggaatagtaaccgaattactttgcacaatgattattgtatagtcggaagtctaatccatttgaacttcagtcacaaaacaaccccataagaatttgcaatagtgcctagactagctccacatatattattcagtttaggagcatcttaactatataacaagacaaaaacaatctttaacaacttcaagtacgacttatagttcacaaaacctcttcattcaacatcagtagcatgatgtttaagtttaatggaattcaaagacgcatacatgcttatatttcttaaaaaaaaaattaagctcttaagggttacagggattcactgaccagcagaaaccagtaataagatacaaaatccccaaacatcccttgccaaactcaaggccaattcaccaacatagctaagaaaatagagctaagtagttacaaattgaacaacaaaagttcattacctactacacagtctatacccaaagaagtccagcaacaacaacaacaagcattacatataaaaatgttgcatgacatcaagttaatcagttactacgagctttaaaatattaaataatacccaaagggaagaaaacccaggttaaagaaacaaagcccataaaataaaaggggataactaataagttgttcaaagatgataaagcaaataataaaaaagaaaaagcatgaaatagataaatagaggtggagaagataaaaacagaccgagttggttaggaagacctaggcgcctggtgtccgccatgaagtcgttattgggtggtaattttagggaaatgataggcaaacataagcgaatcaagaatgaaaaaggatttgatggaagctgaagaggtgaaaagaggagaattgagagttgagaaagtgaagattatgatttgaggagaaagaagaagaagaagaagaaagtcggagtgttgttttgtaatgggaaatgacaatcactt

SEQ ID NO: 78894 - DNA, 8467 bp, Cannabis sativa
aaaaaaaaaaaaaaaagtcatttctctttgttttaattatatatagaagttattaatatataaatattgtaaattaaaacttagttgaagattatctcactgtaaattttaggtaccataattttttataataatttttacttttttgtttcttacactggagatcacgaaaaagaagcaaatgcgaaaatatattatcttagaaggaaaaagaaagttgctataccaaaacaagttcttaaatcaatttgtatttgtgtgattatatgagtctaagtagtaatagaaatttgacttgtgtaattattttaaatgggacggagattacctatcttaatggataatgggatggggtggggtgcaatttatacatcgaaagtaagtttggggttggattaaagtgaaacaactcacccatattcgacctaaatatataatttccaaacgttatatataattttttaattattacaatcattaattttccttcatttattgtgtaataaaaggtttttaataaatggattatttgttaagattttgttttatggcgctttttatgaactatatgagtattttgatgtaatactgtattggcatttattgtaaattaattaagaaaaaacatacataattggggtagtacattcataagaacaataaaagatctctggttttgaagagtatgattttggaatggtgataaattattcacaattatatccaacaaggatgatctaaattcttaatgttgaactaagacaaaactaacatgttatactaacaaaccctcaaattttcaaaagaatcaaaagtgacatgattatgaatatgattacaaatactaacaaaaatcctaagaacaaaacaggcacacatcttgggagctctcctcctctgcacatccttctcagctattagaaaagttagttataagaagagtcatcaccttcatgccctacccccggtaccgttaagtaagctaatattttgccatctcaactctagagaactaaagatctgaagccttgagtttcctaggccgtttattcgattgggctggagatgatggagcttctgatcctcttccaggtccctgaaaaagctcataagtttaaactattggatgcacttacattccaccatatgagcaagcaatatagtttcaaatgaaatcgacatgcatgtaccttgcgtttctggtctcttttgccaggtctctcccctgaaactaatagaaagttataaacgtaagcaactacacaaacactactcgtctcgtaaacaaaaaaatgaaagaccccgcaaaagccaagcaactgtacaaatcattacctccaaagttcatcgagtcgggaacaaacatccggtcctgataaacaccatagtatgaacagtttcagtagagtgaaaaaaaatcatttgaaagcattataagaattccactgatattgtaatgtccagtagatgaatgaccttaggtgtgccaggcgcttcgtagggattatcgcggaaagaggaattctctgtctccttgtattgcacctgataccagaaagattagaattaggagaactctagcacaaaatctccttagaaaatccaaagccatgcaacatagaggaaaataaatcctaaaatatacaatacctgtttctgaagattgagcagggtcagaatttcttttctcaattcaagatgctctgcacaaacagctttggttggcacccttggttttagattaacctgtcaagattaagacacattttaagagaataaaatgtacagccgaacactaatgtgggattcattttttaatatgaaattatgcagctagcaggaacaatatgataaaagtacctattaagcatgaaggaaatcgaaagaagaggataatagacgaacacgaatataaaatgcaagttcttgtaaatataaaacacaaaccccaagttcttgtaaagtctgctcaacacgcttgatggtccgcagtccagcagatgcacttgcagcttgtatcatttgatcaagtgcatatgttctcaaatatacccgaagctgtagattttcaaagattagttgaggtaaaattggacatataaaatggatgaaactttacaggaaaacatctatatgacacagacacacaaagaaaaacagtttcttgattagagtggataaacttaaggggcaaaccagccattcgacataccatgcgtagagaagctacagttgcagcattgtctgctgccaatgttgaaggtacagcagcaactactgcagatggaaccggaacactgggagaaggtgacacaatatcacccggaatagtagtcttctcagtattttctgtggcaacatttgatgcaacgggcaactccacttcttcagcaacctaagaacaaaaaacagagtaaatcaacacaaaggtgcatcgtttatttctttcacaaatcataaaataatccgggacctaccttagcagccaatcgagactcagttattttttttgcttctgaaagaacctgtaagaaaatgcaagtatagatgagccctttttgaaacaacaaaatggtagtaacttagttgctaattcactataaacataaataaaacagacctcgacatcttttttctcttgtagttttgtttgggagagaaccattgacaatgctcgcttgcgttctttctcttgtgaaacgttataaggttcctaaatttaggttaacaaaaatacaaaatcagaaatatagtataatatggcaaagctcaaaaaattgtccaacaaaaacatgatggtaaatgattacttagatcaagcatctaatgatcaagtaaatacaaggtattatacaattctcacaccttaacaacagggtgccctgaaacatccacaggagatggagctctagcaactaccaaagctcgacaaactgaaagtaattattgacatatcaagttcagtaatttctaatttcgcataaacacacagacaagaatggagggggaggggagcacagtggaatgaggccaactcaagtgactgacaataaaaagtgaagaaaatagcaacattacataccattataatatcggtccttcaactcctctactgttcgagatgttgggaacctgtcagctattataatgaatcggagatcaaattgtttgcacaagctaaacaattgatctgtctcttccttggtccatgcctaatgaagatattaaatggataaagtgagaaaacttgtttgaagaataaggctatttaaaggaaaaatgaaaactaaatgtatatagataaaatctggtttgagacctacaggatcagtcaagtgtttctcatactcctcatctgtgtattgtacaatgtcaacagactgcataacatcaaatcacaaaaatattaaaccacacaatgtaaccaactgatttcagtgtagaatatgagaaacataacaatgaaatatgttagaataccttgttatacttagcaaaagaatagtcacctgttggtggtgcaccattaacaactctcacctgaaattgtgaatgaaaactgtaagaattgtaagatgcatggagttctatctcaaaaccaatttccatagctcatggaccttatatattctattatctttccacacattagtaatgtgagactctctaactattttttgctcaccaattttggacagctcaatcacaagcaactcttttttatcagcattttgttttattgcatcgaatactcattagaagttttttgtttttgttctgataccatgttagaatcgtaagatgcatgagttttatctcaaaactaattgactataagaggagtagctagtgcatcttatatattttattatcttttcaaaaattaacaatgagagactttctaacaaaaaccaatgcatatacaattttaggatagtatttttaagtaacaatcttcaaaagcaagagaaagactacccaatggtatagctgcaaattatcctttcgagcagaacttgtaaaaggaagccactgccaagtaatctgaaaaacaaaatatcaagaatgatgaaacaacattaaacacttggttgatcaaatcaaaccaggaacataatcaatttaaagaaaagggagtaaaaggaaaaccttttcatcagctggaggcctttttctcaattgggataaatcgatcgatggcataagaggtggcacaccacctgtgagtgcataaacctgaaaattttaacattatcactgaaaatccaccgaaaaataaggtgtaattatatataagaaaaagatggaaagaacaaaacctcgcgagaaattccatcgggttttctgtgagagtctttctgaggcctagatttcttctcttgtgctacaggaagtgcgtttttgggcaagccgagaatgtctttggcatccatattctataaaagtaaggaattgattggagtttgtgaggtgaaattcatgtatggaatcagttgaaatggtggagaattttgaaatggattcaggtgatgaagtgaagtaaggagtgatttgattaggtaaagtttagggttttcgagcgccaaagattttgatttacaggtagaagaagaaggagaagacgaagaagggaatggagtagtgtttactgttgttcaagttgaggagaaaaacgacgtcgtttcacttataaaactcaaaacgaatgtcgtaaaagtagcttgttggaaggaaattttcttttttttttttttgaaataatgttggaaggaaattttattcgcacgtttattttaataatttttaactattttcttttaatttatattcttaaaaaatatacttattaaacaaaaataaattatattttaaatataaaaaaaaaaattatgtgaaattttcttaaaaaaaattatacatattttaaaaacatataaaaataaaatcaaaataaatattgaacataacataaaataatacgagaaaaaaaatcaaaaatattaagtgatttttataaattatttaagtttattttatttatttcttaataggctaattagaatttttgcccctaaactttaacattaactaaagcgtgctctttgaatttttctggtcgttaaaaattttccctgaactattaatattgttagatttaatgacttttggctaatttcattcaattttactatttcagtaattgtttatgtataaaccatgctcctcagactttaatatctaccaaatcatgcccctcgaattttgacatgtattaaattatatcccctgaactttcatccatgatagacttttttcactaaaattggacaaaaatccttaagtccgacaatctcaatagttccgggaatatttttaatgaccttaaaagttcagggaatgtaatttgatacatatcaaaattcaggaggtaaaaatcctaattagtctttctaataatagggtgtacttattattttacagaatacaaacagaaccccccaaaaaaagctaaagtaaaattatagtatggtagttctgtttccaccaaaaaaaatttataaaaatacttattttaataatttttattttatataaaatatataccttcaattataataatttttttgaaaaaaaaaatcttccaatctcatattctatttgtgacttttgtctataattggtagtaaacttggctcgagatttcttttagaattatcaaacagtcagggaacttcggggccttcactaactttcacctctgggaccggcaacttctttgcgtcgttcttacttctgttgtttggctctcagagggttgttttgaacccgaagtaacaaaggcttcggctcttttcaatgtcatttattcaagtatgataaaattaattttgaaatgaattgtttgagtgttgcgcaaaaactggtaaacaaagtgtctttaattttctcgttaggtcttgtcttgaatgccattgataatctttgtaatagttttaaagacgtttattttttagaatgttctatagattttaatgttgtagctcacactaaattcgctttaacaaaagtgttttgtagcactgtttggtattggtgaaatctcagcctaccttttctgagattttttacttttggtgttggtggttgaaactttttttctcaaaaaaaaaaaaaatacctaacaaataatattttatatactacgacaaaagaattacaataaaaaattatataaattctattaaaaaaattataaaaataaaattaaaataagtaataaaattagagattagactataaatatatgcatgtaatactttttgttgagttaacaagcttgaagagtaaattaaataaataaactgaagaacaaagtatgcatatcatcatcatatcttaagaagtgaaatgcaaatacaatgacataatctgagcttaaattgaaacatataatgatggtaaggtaaatttgagaccagagacaaaagaaaccaacaacatcaatcaaagccatttaagtttgaagatgtgaacaagtgaagtgattcaaattcagaatctatttctatctatcttttagttcttgctcaaattgcagcagcttctcacgcacaggttgcaaaaattgtttcaaatcttgcttgatttgcatcttgtcttgatgagaaaaatccttttcttcactcaatttcacttccacctgcaaatttttcatcataatagtaaacaaacttgtcctgtttttttggttttgttttcattcatggaaaaacaccacttcgaaccatatgttttgtaaaagtcactaatcggccactctgtttcgttcaatgacaatttggacctgtactttgcaaaaaagaagataatgatactctgaatttgattttggtcgaactacttttcattctcactctaaaattttgttttcctaaccctaaaacttcctattctcttctatttctaacccgaaaaatgtccaaccaaaatccgactcagggtatcattatgttcttttttgtaaaatacaagattcaaattgtcgtttaacaaaacagagagatcaataaaagatacaaaatagtatttacccttcattcattgattgtgtatttagaattgaatatgatacaatagaatagaatatacctgcaactcatctagctcaccaaatgagaactctgggatttccaaataccctttaattgtttttttctcctcacccacaatccactctcctaattcacattcatgcaaacaaaaatttgatctttaacttaaacaaacataaaaaagaaaatggtttataatgaaaaacaaagacaaagagagtaacataagcaagtcttagtattagtagtacctttaacatttaaggttatctcataagtatagccaacacgtttcttattccgaacagtgaccaaaaaggcctagtaaatgaaaacaagattaaaatgagataacaaagaaacaaaaatatgatttttaataatgattgaaagtagaaaaataaaaatgaaactcactcacatcaccagcacactttgataaatctgatatctgtgctttcccagctgacaattctaaagaatcaactgtcataaccaactcctgcccattcatacaaattattaaaaaaaaaaacaaacaaacaaatgtaaatggaatcaaattcaaaatccataataaaaagctcatctttgcattggaattgtaaaatcattttaatacaaaaactttaaaatgcaaccaaaaaaaagcaatgggataaaaatcaattctttactatttcattccaccattgtaaaaataggctttatcaaattttcaattaacaaaattacaccatgaaattaaacattgctaccataaacgataattattgtgatcgcaaaacgactatagattcacactgttgtaaaatgagtttactttacaaactttagtatttcacatgataagtttggcaaatttcactttcaccatagtattatatatatatatatatatataattatatatgtataatagggaaaaggatataagaaaaaagaaacctttattctttgggttgcccagctattaagattcttctcctcccaagttccagcctaaaccaaagaaagatccaacaaatgaaagataagatttttattattattaaacacagtaatacaaattggtgtgtatatatatatatataaaaatatatacccgattccagacggaacccagttgggttgtgggctgagcagagttagaagagagaatgtcgttagaggtgagcttgcgaggagcgggaagaggaacggcgtcgtttgtgacacctcttacccaataggtataggaagatggtgcttcctgttgggtcttcttctccgaagacgacgacgacaatggttgtccttcttcttccatggagtggcggctgatctacttcgttcttctctctctctctctctct

SEQ ID NO: 78895 - DNA, 6012 bp, Cannabis sativa
gaacaaatgcctaccagcattttccaaaactcctccttaccagtagaccaccccatgggattaacagttagaagcttctagcatgcataccatgccacttttgtgcaatttttattattttaaaacaaataatacttgcaatacaagcaagtctgagaacataagtttacagccagaaagactcttaaacatccacaaaccagaaaattaaaacataaaacaccaatctctccaattaaatcagcaaacaataaaccctttaactccacatcatactagtagcttataagttcaaagtttagctcacttacttgtgcaacaagttatttcacgaaaataaatattttccaaaaaaaattccccgtatagtatttcatatatttaagagttttccaagttaaaacacgaaaaaatattttggaaaaatggcgaacaaatcgattttttgttgaaaaatagaagatgctctcgggtccccatctagtcgcccggttccttgtaactagcactccagttgtgtgtcagtcagacaacagagatttttttaaaaacgtgcacaacagtcataaagggctagtattttattgagcactttaaataatgaatttttacacttaaaaattagttggttgagcatttactcatctatatgaattccctacaagtgttctaaaccaaaattccacctttctttcaaaaagacaccaaccacacacacttgtacttatctcttctagtgtgcttccatttctctctagtttcttactttgtattttatatagagagtttgttgggtatcatcatatcaaattttattcattgtatggaggtgaggttggcacagatattaaaaaacaacctggatataggtaagtttgacaccggtattgaaaacaacttggtataagtaagattgccacttcaataatccagtgaggttggttatccttgagagaattctcaaactattagaagaggcttgggaaagtccttggtgaaaatttcccgataaagtaagggttagtcatgcccattgacttggctcattagttgaacccaaagcttggggctttgaagaccaaggatgtacggagcttgagtcctcccaaaccttctaaaatcaagagtttacatttctaaatactatctctattttactattgcttatatctaatatctacttgtgattatctttttatttgctcaatatttgcataaatagttgaattgtgtcttaaatttatgaaattagtttaaatttccaattcactccctcttggaaacatatcttgggctaacattttcgaaacacaaaacagaacccaagaaattaactaatctcaaagaagacccttaattctaaagacttgctcaaattattttgtccctttcgactaaaaaataagtaccttagcagatggaaaaactgaatgagccatcaataaaagattatccgataaatactcaggactttgaaatagttgatcagcaacaaattcttcctgcaaattataatagcttgtctcctccctacaaaagttagcaaaagaaagcttgagctaagataaaaatatagttggaaacttggtcatttaaagactataaggcttatttatgaacttacacatcaacatttatgtcattatgaaacatactttgaactaccaacccattttcctttagtacccatatcttatctgaagcaagcttgacatcaatgcatgcccccttgacaaagtcaaaagagtaccccttagtgaaggaacaaagcatcaaaactacaatgaaatcaagggaaaaacaaggatggataaaactagttacttacatcttccaagggaatcattgaaatagaaggatccaatagcaaaacaattttgtcccccaaactacagtgcagagtgtacaagtaaaccatctcgaagctaacatcctttaaaggtaggtaaagtaagcaataagaatcacatgtgaaataattagcacaatcttaggttgatgacactaactatacaaaagggttataaatcatgttcggcatattaaatataaaatttcactatttcgtactcttccacttgaccatgcatgatgctatacttgatattctctactccttttataactattaaatcattaagagtatatctttttattttgagtatctcagtgcctaattatgtaaataattagaagagaatagatgcctataaagaactttattgtttaattctaatccacatacttctatacattcttaaaagttatctcggttcctcgatataaataacccaaaccagtgcgaaaacagtcaattccaaagtgaatttaacattctttactaccatggaagacccttaaataccaccaaacaactttttggcactgcccaaactatatttaattccttaagtagaaccatagttttttaacaacataatttataaacacaacataattgtaactaatgttgagtttgaaattttaaaaagtaccacccgacttcacacacacgaaaaagcaactaaacaaaacaaaaagactatcaaatataagataactacatatatgacatcttttttcttggcatcatctaaagagtttcaattttactatccactaacaatgcaataagccaaaagtgaacctttatgcgtatatgccttacctttcaaaaaaagttgcaaggcatgtattcaatatcttacgcatcacaatgacaagtgacaaccttcaaatttaaaataattaaataaagacatcatgtagattgagtacaagccttttatagatttcaagaagacatgaaaattgaaggttgagttaaaaaaaatgagggttaaagttagaacaaatcatgtgccaataataggcttcaactctcaacatccaagaccttaaatcaacacaaaagtttcacaaaccctgacacttacagcatattgttctttctatctatcaaacacagtacttgtttctttcaacaaaattatagctttcttttttctcacaacaaaattctagaaaataggataaataaaatatgtaagaatattcttgagtctaatttacataccgaagtatgtctagacaagacagccaaatacacaccacttgaatcttgaccagcttcaccaatccataaccttaccaatgcagctcctgggtgtacaaagtaggaaaacatcaattttttatgagcacttaaagacatccaaatatagaaagactacaatgctccaccaactacgataaaagcaaacccaaagcaatacatgacccctaggagacatatacacattgaaggtaccaactagaaacatgttgtgaaatttatttatagcaaaataaaaggccaatgcacatctcatcagaacgcacatgagatgtagcatatgtctctgcctatttcatgtaaaggaaataagacgctttcccgagctaatgtgacctcaatggctgaggagtacatgcaagtaccagcctatagaatgataagtgtcaatgtcatcatatgctcaagggaactagatgaccatgaagagccttatttcaagttgagatactcaatgtgaaagaaaacaagattgttaaaaaccttcttcactttaagccttcatctcttccccttacgtgaaagggatatccactgtcttaatatctatttgcaaacaactttcataggcagtcaatattccaacttgaattccatgtctacttgatagataaacaagactttgggtaattaattgctactttgtacttaaagtaggaatagctagctacaaaaggaaagatctctctcctggtttttttaatattattatttacttattgcacttgacaagagattatagatgtccattcatagccataaaagtgaatgaaatttaatgaaaaagtaagagaaatttgcctgacgatgtcggatgattcatattatggctactgatcttggtatgacttgaaagatcccaaattcgaagtgtcccatctgaatgaagcacaaataaaagttgttttctacaaacttttgctaccaccaaatcttgtacagcctctattgttctacctctgcataatatgtttagtatatggtgattatatcaatagccatacaacgaattccattgttagctaaccaagaagaatttgcttactttctttcattttgcatttttaaatatttaaggtaatcattattaagaaaaagaataaagactttcgagaagagtaaatatgtacagatttgcaatcaaatgcttaaccactcatgtaccaaaggacttccaataaaccaaatagattgacaaaatccgagtctgctgtgaagaaagaactagaactaccatatacagtatactatatgacagatgcccttgagcatgcatttttttattattatttttaatgttctagcaatgagatatcatattagtaccttgacacaagactccacaaacgaccaaatcctgaatcatcccgaagctcaagcacagaagctaaaaggacaagaaaaaacattagcagcagatgttatactgtccaagccaaaatccttcagccattgagttgaagacacactaaaaagaggaatcaacatgaagccgcaataccaggagcactagggtcgcgcatgcctagttgaaaacaaccagtagatccatcggtccttccagctataagacatccagagggcattgctgctacacttgttatatggccataactacgcatgtcaaacactctgatcacatcctccgctggcaaaatgaagtaggatttgtatgccgagatgttttttattctcaaaagataagcagttcccgacacagtcaacgcataaagcaggtaagggtggttccttgaatttaaatcaacctgaatgcaaacgcaacatgatgaaatcttaacgatatcgcactttcttcatcaatttctttattttctctttcaattctcaacacgaaatttccaagattatcaacacactaaaaacatagttaaaagcacctcatttttgcagacgaaagcgaaagcagagagcgcatccggaaaagcaattcgcaatccaattttgggaaattctttatcagcagacagctcaagtagctccagagcagttggtagagacttgtggattctcctgcaataaaataagaaacaaatgctcaaagtgaaccacaactccatactcttttcaaacaaagattcatagaccaattccataatcacaagacaaaattcaaaaaaggcgagggaaagaaagagaaaccatatgatataagtgggaggatcgccgatggcagaggaagacgcgaaatcgtcagccagcggggcacaggtagtttgaaaatcaaaattagcttccgaatcggcaatggcaatggcagcagcagaaggaggaggaggaagctcaaggtcgatccatttaacggagtcgctgccgataatggggacttccacaccagctagagtgcacctagtcgccatcgtcgtcccaaaatgaaagaaatgggagagagagagagagagtagttaaaccctactctctactgtgtcactgtatttggggttttaacctatgagcttaccagcaaggcggggaaattgcgccaaataaccctaaaattgaatcctcttctccaccaagccatcgtagtttctttttcttttttcttttacataataaataattttaaacggtcatttctttacaaattttgaaataatacaattactgggttataatttgaggtcatttattataatttctcaaattaaaaatgcaccattttaattgatgttttgaataagattaattaggatttttgtcccttaaactttgacatgtaccaaattctatgaacttttaagtagttaaaaatgtctctgaactattgagatggttggatttaaggacttttttacctattttagtaaaaaagtctaaagatggatgaaagttcaggggcataatttagtatcgttcgaggaatatgatttggtaga

SEQ ID NO: 78896 - DNA, 4938 bp, Cannabis sativa
ctctttcttgctcacttcaagcctcagcttcgcattcatatctagaagctcttgcttatcattttgcaacttgttactttgacctcttatagctccaatcacctgctcaagggtctgtttttctgattcaagctccacagcagaatctctgaattgctgcagaaatgttgaaaccacagagttttcaaccaacaatcgttgctcctcgtcctcgcttcttgaaagagaactttttaagttgcgaatattatccagaatacaccgcactgatacgtgctcttgatcaaatttcttgtcatttccatgatctggctcaatttggagagccttaagcaccagtttaatacccaatttcaacttttcaatttcacttaccaagaactctgcttccacctgctgctcaaggttttcactctccagttctgagatgagtttatcagaaaacttggatgcctcgacatgtttctgacattcaaggagcagacaaaaattcttttcctccaaatcttcaataaacttctgcagtatgaagatctcgatctgggcatttacagctctgtctagttcttcttcaaattctttctttcccaatctgctttcttcctgtaagatatgcacatcatactgcaaacccgccaatcgagcctcagttgactgcatataactagaatgttcttgcttttctacaagaagggaactgcggagttcttccacctgatgcactgtggattctttatccttctccaggtcagtatatttctcttctaattttgaaaacctcttctccagctttcccagtctcttttcaacattttccaattgagacaccagggtgcttctttcgttcagaagattggacttctcattgttgagcatctggcacatttcttccaagctcttcgattttagtcttaactcttcaagttccagttttgcaccagagagggaattctccagcaaggtgttcttctctgagagcctctgcatattctcagtgacaatctgtaattgtgacagaagagcagctttttcagcaactagagttgatttttctccctggagaaagttggaggattcttgcaatttcatgaccttgtctcttaaatcctccaactcaagattcaatccagacagggagccttgcagatgagcattctctgttgaaagtttacccatatccctcatcttctcataaagggcttctttctcgtctctgtctcttttgcagatctcattcagcttcaagttctcttcttgcaagtccttcacagatctctcaagggtttcaggatttaaaccaactgaatccacttgcttcaatattacttggtatctacttgtcaagctctttagttccccatttaaatgcccaatttcctgctggagagagtcactttggtcctcctttcgtgcaacctcctgttcaagtttctgtttcatctccttcaagctaaatatttcttcttgtagattctgctgtgataagttgcttgaaaggttgagttcagagagattcctgttttcttctttaactcgttccatttcgtcttccatgctacgtttccgtacctccagatcattcaacatttggagcccattcttaagatccaacgccaaggctctctggtcctcttgagattcagaatgcaacttctgcagagcttggagggttgcttcaacttgcagaaactttgagtgttcctcttgcataagggtctgaaatttattcaattcatcatttttttctgtaagttgttgatctttcctagatattttctgcaacaaatcatctgcttctgactgcagagtttgattcgatgtctccaactgaacacactgttcttcagcactttttagtctagcagcccccatcagaatttcattattcagacgttctacattagcttgagcttgagaaatttcagcttccatcatagcaattatctccatgcactgcttgtactgaagtgctgcagcttctttctcttcattcagcccagcgacagctttctttagtgcttcaacttcagcttctgctctttcaatttgctcattaagtaatctggcattttcttcagcaagtgacagtttagattccaaaatagatattttctcaagacaatatttgtactgaacaagcccagcttctttctcagcctctaatctacaaagttcttgattgagattctgacattcagcttctgccctttgagctcgctcactttgtccctttccttcctcttgggcttgagataacagattctccaggctagatatcttctctaaacactgattgaattgaagaagaccagcatctctctcagtttctagttctgaaagggattccttcaatatatttatttcaatttcagctttggttgctcgttcatctagcaggccagcatcttgttgtgcatgcttaagttctctatccatattagataacttctctacattttgctgatattgaaaaaggagagtatccttttcagcttgcacctttgccagtgttttctttaaactttgaacctccgtttcagcttttgatgcacgttcagactcaaataggacctggtttttcagcttctggttcccatttgatatctgagaaacacaatcaaaattttgtccactctcttctgctacagataacatttgaccctttttcgtctttttgtctccaacctttgggctttctgttgctgctcctcctgaattaaacatctcgtgtagctgtttcagaccccttttgtttatccccaagtccgaatcttccaaatttccaccattgcttttcaatgtaaacaagttggttgaagagagtcccaatgcatctttatgcaagtcatctggatcaagtaaagcacgaattggatgtggcatttctggtgtatggggttcaacctcaggacctgcggaagagtttgactgtgattcatcaccaagtgcataaggtagttggttgggaaatgcttcttgcatggttcgatgggcatggcgcagctccacagttgcatggtcatacctctctgctaatgcacgataagctcgataaaactcttcaaccagcttcataagctctggacgtttcttataatacatttctgccctccttgcaaaggaatctgcatcttcttcaatgagcttgatcattgatttgactttggcatccatgtctgcaaaagacaattcggtgttaatgttacagaccatctttaattattgtgtaaaaaattttcaccaaaacaaaataaatggtgaaaaagggccaattcttggaaagaattccatacctgtaaggttttcttgaagccatttagaattcttggggctaatgtggctgtcccaccaccaagaatataagcgtctggactctgagtgtaataaggttcccatgactccagctaagaccaaccacagatatggtcttgaccttatatgaggatggtccttgtacctgtacaaaaggccaagatactggatccaggccagaatataacttcaacagatttttgccaccaaattatatgcaaagctagacttttttgctcatgtatataagagttccttcaacctgaacaataaatcattcaaagaaatgaagtcagaaacttcactgcagatctaaattatgaaacttatcagaatatgtaatggaaagagtggatattctaattaccagttcaatataacagatccaataatgtagtaattgctactcctttatttatttcaatgagccttcaagtacccaaaattgagacctgttgatccagaaaaatggaaaggatatcagatcataagaaactactaagtgataaaacacaattaataaacaaaggatgtaacagctaaatacattaatattaatgaaaaaacaaacaacttgggactaaaactgcaaagatgaggcaaacatacctgtaactccattaatttattttctatcttttgaaattaccaaaccaaaacatgactcaaacgaaagaatcaaaacttaaaataaattatctacattactccacagatgcacagttaagaacacaaactttgaatgctttaatacagaattggatcgaaaacatgcgcaccggaaagagaaaaaacacacaaagatgcaaaaggacaatcttttcactaaatgactttctactaaacagtaactgtgattttttcaatcaaccaaaagatcaaaatcttattgaaagaacaacaacccaagtttgatttccaatcagaagtgaagctacaaatcaaatcaacaagataagcattacgcataggagataggactattgattaatgaaaagggggcgactttttttccatattacgagaaacgaaagcttacccgatgaatgaatccagtgatgggtttgttaaaaaggcaagcaaagccaccattgaagtgaaagcaaagcattgattttaagcaaatgggtatcggctaaaactgcaaaaaatcgatattttctgctccatttggatcaaaaacaccaaaacaacgaaaaactggtaatgggttgtggttagcagctgtgatagtaccactcagctgcaaggaatacctcttaccccattttctctcactgaactccaacagtatttctgcacacttctctctctattgggagctttgcattatatgctatcatctaatctgacatgaaactgacactgtttgatgacttgtgaactgtaaagagaagagagatgagagaatgagcctagtaaaaaagtaacaaaataaataataatatcataatatttcttttcccttttctttttctaatttatataatagattttgaaaattcaagtctttattggcaattacaaaattgtaattacaaattcttttaattggtacttaataatataaaacggtcacaaaattactttgaatttctgtagttacattaattttttttttttttt

SEQ ID NO: 78897 - DNA, 3703 bp, Cannabis sativa
aataatgtgggccatactcaattaaggaccactcaaaacaaaaacattcatttcctttggatctctttcttactcattgtctaatttaatctaatataacctttttcaatagagaaggtaaaacaaaagactattctcattttagatctttttcatagatagatagatagatacaccatgtgctatttaattgatttacctgcaaaaagacaaggaattctgcattaaactaaactataatattttattgccttgtcaatttatatagaggagtatcaaattggagcaagaaaagtgtagatatcatataatataatattagactacgttacattttaaaagagtttaagagaagtatgggaaagaggaattgtaggccaaacataggaattgaaaagtgacatttttgttagagaactgaacaccctccaagtgggtttcttgatttttttattttcaagtgagttggtgaaaaaccatttttaagatacccttggtctgaatctttatcttctaacactctttaattatatatgtggagaaagagaaacccagataatcaactgaaggttatttagaaaaagcagaaatggctaccaaagaagatgagacaagagagccactcatggttgttgaagatggatcagctgaccatgaaagtagcagagaacatccatggatggtttactttagcacttttgttgcagtttgtggttcctatgagtttggaacctgtgtaagttcttagttgaaatatataatcatcttcaactactctatttattaaggtaataagcagacacatttgtttgttattatgatttctgagacattttgtttgaatgacaggcgggttattcatcacctactcagactgctataaggagggatctcaacttatctttagacgaggtactcaaataagtagagaaaagcactttgaaatgaaatttcatggtcaacagttgcaagaaagaaagacagctgctgttgcttatgaacttttcaaatctcagtcaggcaatttcagaaagatttaaaactgcagtattcaaatcaattattgatgaaatgtgtctgtgaatatacttgttatggctatgttatttataaactgaattttccactcttgtatgtatatttacacagtattctctatttggttccatattgacttttggtgctatgattggtgcaatcacaagtggtccaattgctgattatgttggtagaaaatgggtaagcaagatagcaccatgttgaatacttgctgaacttttcgtttcagaattcagtctaaatctaacatagcaaatgtacttgtttttgcaggcaatgagagtgtatactgctttctgtgttgcagggtggctttccatttactttgctcaggtctgttctatcaaactttgggattttacaagtgttttcacctaaaaaacttaagttgtttgtggttgggtggtctttctttttatatcatagttatctatatgatcaataatattatattatgtattattaatttcctgaatcttgaatgctaaaaagggagttttgcctttggaccttggaagacttgcaactggatatgggatgggagccttttcctatgtggtgagtttcttctcattctagtcgttttagttcatcctacttgataaaaccattgtcttttgatgcttcttttggacaaatggtaaggtacctgttttcatagctgaaatcgcacccaagaatcttcgtggatcactaactgctgcgaaccaggtgaacatattcaaatgttgcaatgctttagagattatagtcattttataggaaagagttatttaaagagaagaaaagcatgaaatatgagcaagcctaatgatgtcttcttattcttgtagttcatgatctgcggtggagtatctgtttccttcatcattggcaatgtactctcatggaggacattagcattagttggtaaaatttcataggcatattatgtattaacagttgtgacaaatagtcagacagactcaaagaagtatagttaggagtggaaatctctaatttgactgatacatttgcaaattactcactttcaaagtattcgcaggtcttattccatgcgctattttgctttttggtctctttttcattccggagtctcctagatggctggtatgatgctatcaaagtgtaaaaagaacaaagtcaatataaactctcttcctggtctcaactctcaacctcgttatgaatgcaggcgaagacaggacgtcataaagactttgaagtctcattgcagaagcttcgtggtaagaatgccaacataaatcaggaggcagccgaaattcaggttcctgtcaatgaacaatgatcataaacttttgtgttttgctaccaattttgaacatgtcttagtcttttgaagataacataacaagagataccatgtcatggcttgcaggattatatcacaactctcgaaaaccttccaaaggccaaaatgttggacttgttccaaaagagatatcagcgatctgttactgtaataattcaccatgaacaaatcttagagttaccctttctatatcttttagttatttctgttgattctgtttcgtttttatgaacagataggaataggattgatggtctgtcaacaatttggtggaattaatggagtttgtttctacaccagcagcatttttgaatcagcaggtactgtgatcataatagtgcctatagcaacaagtttccagttttgtttccaaatagaaccatatcaatcttgcccgagtttaaatcttaaaccaaaaccagataattctctctaaaatctagctttaaacatgtacttaatattcatttttgtataacatctcaggattctcagccagccttggaactacaatatatgctatccttcaggttttcctattttaattcttcatttcactaaaaaataaaaattattatagtaatattaacttgttggtgtgtttttgttttgcaggttgtggttactggacttggggcagtagtggttgacaaattaggaagaaaacctctgttattggtagaacactttgatcttttctcctcaaagttttttcttattgaaatcccattttccatgtctaaagagcttatcttatttcaatgtttcaagatttcgggatcaggattggtacttggctgccttcttcctgctctttcattctacttcaaggtacatattgtacagatttatgaatccaacaccaaaacatttgtggttttttaggatatctaatattacaaaataaaatattaataataacaaaaaaaatttactttacaggttcatgaattggcactcaaagcagtccccattcttgctgtaactggcatactggtatatataatctattttgtcaagtaccccattcagatattggtgcctaccaaaggttttcaagattttttctttctttgaacgctaggtttacattggatcattctcaattggaatgggagcagttccttgggttgtaatgtctgaggtaacaaattttgaaagatttacttctatttgattataccttgggatcaggcacagagaaagaatatggatttttatttcttcccttcttgaatttattgattaataattctgaatatatctatgttgtagattttcccaattaatatcaaaggtcaagctggaagc

SEQ ID NO: 78898 - DNA, 3042 bp, Cannabis sativa
aaatagtgtttgtctcataagagatatattattaagaaaaccatgagatataggaccaattttttctaagccataaagttaggcaccatcacaggaatcaatacataaaaaaaaagtgaactatatttataggtataatgattcaatctgcactaaatagcttgttaattttgaagattatgatttgccttatctagtaggtagtgtggatggttacaaatacaaaaacagataagtgaaaagaaccaagtaactgcaaactagctaggttgtatttagcaaataaagacagctaagttgtacaccgacaaatgtaagttaaacaaacaattaattaattattatagtcaaatgggattttttatttttattttaaatgttgagattttttgttggtttttgaaaagagcaaacatggtctttaatttaatgtaatatataataaatgagaagccaaaactaatatatgaagagaatggagtttagagcaagtatattgttgttgttgttaactagctttttacttacatgggttaattttttgagtgttgaaggagatgattcaatggggtactgtaaatttcctgcaatttacaactttggtgattcaaattcagatactggtggtatagcagctgctttttaccaaatggctcctcaatgtggtgaaactttcttccatagaccatctggaagaggctgtgatggtcgtttaatcattgattttattggtaaaaaaactcactaccattactactaactcctcttcaaaagttaccacttttatgtaagtttaataaggtaacaaaaaactaatcaggaatgaaaaaaagatgttatttttatgcagcaaaagagcttggattgccttacttgagtgcatatttaaactcaattggtgcaaatttcaagcatggtgctaactttgccactggaggatcaaccattaggcgtttaaatgagtcagtttttctcaatggggtcagccctttttctcttgatattcaagttgtgcagttcactcagttcaagtcacgtactggttggtttttcaagaatggtaaggaaaaaaaaattgaagggtagtgaaaaagattgtttttttatgatacccttttgatatttatgtgtgtttatagacaacaaaagctcacatagaagaaatctgccaagaccagaggagttctcaaaggctctttacacatttgatattggccaaaatgatattgctgctgggttcaggtcaatgactgttgaacagttcaaactacaaattcctgatataataaaccagtttggtgaagctgtcaaagtaagtaacatattgtttttaataacccattttcagtaatattctcattattgttttagtaattttctcaggccatgtttggttggattgtatagttgaatttgaatacatataggatctttactccctacctatgacatttattgggttctgccttctattgctcattcatttttataaatattttccagatgtaaactaatcaagagttaatttatcgagagttgagatgaaaaataattacatagatagtaattgtaatctactaaaactgtgtatctactataactacattaataattatctcaaaatatgaataaaatgcaaccgggagaaatttacaattatttccttagttctagggaaatttttacaaaacaaaaaaaaaaataattcaatgaacaaaattctataggtcttatagttcagggtgtaaaaatcatattttattattgtatgttgataaattaacttggcagaatctatacgaacaaggggccagatcattctggatacacaacacaggtcctcttggttgtttggcagtgagccttaattacagtcctagtccagacccaaacacttatgaccccattggttgtgacaaggctcaaaatgacatgtcaaaagagttcaacacaaaactcaagcacaaagtcattgagttaaggcaaacactttctgatgctgcattaacttatgttgatctatttgcagccaagtatcaactcatagctaatgcaaacaagttaggtaaaaaaaaaaccaacttaattttttgattgtttttaaataacacttaataagtgtttttgtttgcagggttcttagacaaggcctccatttgctgtggatatcataaagataatgatcatgtgtggtgtggaaataagggaaaatttaatggtagtgaagtttatgctgattcatgtgaagacccttctttgtatataagttgggatggtgtgcattatactgaggctgcaaataattggcttgctaatcatattttaaatggttcattttctgatcctaacattcccattacacatgcttgttacaacaaatgatattgactcttgagtttgtcaacaacatcatcatctatttaatttatgatttttattaaattacttttttttttctttttcacatgcatacaaaaaccaatagcaataaagtaaatttttaagttttatatgggtgtaaattgatgattgtttttcaaacaaggaaaatgtgtgcactattaatctttcttagtaaaaatgttactcttatcttttatatctataaaccaatttactgtctatacaagcaaaatatgttgacttactttgcgtctttgccaaggcactctaaacgcttaacttcgtttttgttgttaaacgatggatattgacaataacgacatctgcaacttttgggcctgaaatgggcctgacgatactaagtctcaagcccatttaggacagccagagatggccacgataggccgagaaataggatttgggccgtctttaatttaacacaattatacaaaaatatgtacttaattacacattattatgattagggaaacttacaaaaatattgtaatttggagtaatctttacaaaaatactgtcacacgaaaatgtttataaaaataaaatactgtgtttttataaaacaccagtagaacacaaaacagaacaactcaaaacactagtagaacaactaaaaaacac

SEQ ID NO: 78899 - DNA, 5858 bp, Cannabis sativa
  modified_base (337)..(341): a, c, t, g, unknown or other
ggccaagtttgagtttcattaatctaaaattctaaaaaactaagaaccgcccgaaattcaaatatatatatatatatatatttatatacattttttaaaaacataaacttaaaaaaaaaaacttaattctaaacaatgatttagtacatgttaaagttctgaaagtaaaaatctaagggaaatttacaaaaatactgaaatttaggttaacttttacaaaatactgtcacacagaatttttttcaaaaatactgtatttttataaaacacaaagcaatataactcaaaacaacactaaaacactagtaaaacaccagtgaaacttaacacagtatannnnngtatgaaacttataaaaaaacataataaaaaaagtaaaaaataccgcctgacaatatttttgtaaaaagatgacaaaaattagtataccatgtaaatttcccaaatctaaattagcttatagttatatgggcttgaaaatataagcccaattttaaggaaccatctttcatttgggccctatacaaaaacgacaccaataacaaacgacaaaaaaaaataaagaaattcataaacgacatgtcgttcgtacacaaaacgacaccaataacacagtataaaaaagcttcgttctttaacttcaattaattctttaccaaaaacagtatcgaagttctgcaattcaaccatggcttcttcttcttcttcatcgatttcatcgtccttcaaattagtcacagcaagaatcccaacctctatattctactccacgaaaacaccatcatcatcaacaactagaagaactctcttaatttctccaaagcctctaaatttctcatttttcagacccatttcattcgaacgaatcccatcactatctccagcttcagcttcttcaagttctatgtcacttcaacccattgaagaactccctccaaagcttcaagaaatcgtgagacttttccagtccgtacaggaaccgaaggccaagtacgagcaattgttgttttacggtaaaaaccttaaacccttagatatccatttcaaaactaagcaaaataaggtcgagggttgtgtttcccaagtttgggttagggcttatcttgattctgataagaatgtggtttatgaggctgattctgattctgtacttactaaaggactcgctgctttgcttgttaatggtttatctggtcgacctgttgatgaggttgttagggtttctcctgattttgttgtgcttcttgggcttcaacagagtttgactccttccaggaataatgggtttttgaatatgttgaagttgatgcaaaagaaagcgcttgagctgtttgtggaagctgaaaagggggttgggagctcgaatttggaatcgaaaatcgatggcaatggtgaaagtttgagtcttggattggaatctgaactgggtgttgaaaataaacaggagaaagttgttgaatcaaaaccagaaccagctttgagtgtgagtgataaggattcgaattcaggtactttagggagcaggggaatgagaattaaggagagattgaagaaagagcttagtcctgttgatttggaggttgaagatgtgtcttatcagcatgctgggcatgctggtgtgagaggaagtgatggagagactcatttcaatgtgagaattgtttctaatgagtttgaggggaagagtatggttaagagacatagactcatttacaatttgttgcaagaagagttgcagagtggattacatgctttgtcaattgtagcaaagacaccatctgaagtttagtggaggatgagctcagacaaaagaggttcatttttttaaaaaggaaatatatatatatttcttaatagttaaataaaattattgagtttattgctttgtaccacaattaaatgtgttgtatgcatagttttttagattatgaaaagattgtgtctatgtttgggcatcattgttgtgaattgctttgatttttatcctaacattcatgtaatgtgtgtcttgggatttatgttatgcaagattgaaaacaaggaatcggggatctttttgtaattacagagaaactagaaagaaatcaattgtgtattttcataaatctgaaagaatgaatccaaagcttatatacaagctaagctcttcatcagctgattaactaacagagttagttacaagaagtgtaaaaactaactaactgaattggtttgatttgagctgattatgacagctcagctagattagtatcactaaaactttttactttgtttatgagtaaagatgatcattgttgaaaacaagaaagagggtaatttgtatcattagaaaatggagttatgaacttctgaaacattaatttagtaagtaaaaattgaagctttagtcttggtgtggtaatttcctgtttgaattatctagcttgtagtgataggattcttttgtgagaatctaataattagtattacagattatgtcattgattaggatgacaaccatatgttgatgtttgtataacaacttcatttttttgggaatactaataataataagaataatgagaaaaaaaaaaaaagaaactgaatttcttgtaactgtttagagcttctcattttcacaactccacagtccactcctcaaggtagctaggctgtagttcatagcaccagttttatgactcattaagccacagtcagtttgataataaagtgttagatttctattacactttggagaaaggactacttttttaggaatattttgctatataaccaaaaaatttgggatcttgggcagaatctaaattcatgctgcagctgaaaattctcatttgttttgtttgtttggatggaagctattatttgagtgaattattttgatgaaattaaagtcttttgtttttttttgttatagtggaatgcaaaattgaattaggcatcgaattaaaaattaaaaagtgacatgacaaggatatcacttactaaccttttctatgatttgagcaatagtacttaggaaattaatgtatgttttataatttaaagtcttggataatggtttttcttttttttttttaggttggtggtggtgcccaccccccactttatgttttcttcttctttttctcttttgctgattgtaacatactctggtctttgattagtccatgtatggcttccttctcactaagtgtaacgtcccccgcttcaagcctcttgttgggaaaactttctaagaggtcacacaaattacttaggtcaagcatgcttaactgtgaaattctttcgtgatgagctactagaaaacaagatgcaccttgttgatataggtagtactaatcaatccatttaagcccttttcaattatgcagtcacatacctacacagtttcagaatcattatatttgacattccttaagcggtatgagattgcacaacttacctgatatatctctttacagatcactgaactattgactgtcacactaagcttgtagaaagaaatgaaaactgaaaacaatgagagaattccatgcttaaaaaaaggatttttaaatgttggaaatgccaaattgttctgaaaaatggttttttttttctctttgaaatcgaaaaaaaatgttgtatatatatagatatatctatagagttcaaacatgtatacataaaatcttgcatactataagaacaagaagaaagaaagtggaggaagaagataatcatataacaaccttcttcttcttcatctctttgttctgcaatttctggcaactaaaataccggttggtggtcctgtcatctgcaattggcatctactatgtaaccagtaagtaacatgtatcataccaagagttgctctcactttaaaagtccctcttatattgtagctgactttgttgctctgtacttgtgttcgaagttccagggcgtgatttagaggcaagtaaactaagcttgatatgaggtgaattgcttcaagccttgtctctcgaggtctttgagtgaaaggctgaagagcttgtcttgatatgagcctgtcagcaaagtaaagctctacatccacaaactcaaaccttatgtcgagtttcctattcgggttggtgaaatttgcaaggacagcaaaatcgccgttgaaataatctggtgcgtcgaagtagatggtgttaaggcgtgcgtttggggtgtcaaataatggtattttcggtttaacaacaaggtaaactatcaaagttgctattccaaagaaaatgagaagaagactaaatactagacagagaatagcaccaaaccatacaagtggattggttcgtcggggttgagtgtgcctgagaattggctcctgtatagatgccttgatgaagatatttggtgatggggttgctcggtcattgctgctcacagcttgtctgagtatcggttgctttatggaagacatgatgtgagtatccggtggtgttttgctagttctactctcactattcatctcttgcattgatatgctaacttggtttagagctaattgttgggcatgtttctgaggtggtggctgcagtggccgagaactcgaagaagaagaagaaagagaaggagaaagagagggagaccgagacgaaggtggaggaggaagaggaagcatccttaagtgcacaaatttcaaatgaaaggtatgaagaaggtaaatgatgatagttgtttgtttaaataaattaggaagtccattaaactaagtaaagagaaaaagaagcttttttgattgggaggggtgttggtggggtcagtcgggccaccatttttgcttggtttttggtattttagagagaaaaaaagaaaagggaagtttaggtgaggagctaaagtttgagtttttgaataataataatgatatataattttgctttttaagaattgttgaagcagctggcactagtttgataaaggagtggcctttgtccttcaaagtgatcaactcacacacccttttcctcgaacaaagcccaattggtttagactagtcaattggttgtgatggtctatgaaatcagtgtcctatatttgtgtttcttgtctttttgttctgtttttcatgttttacatattttctggttcatcaagttattatgttttgtaaagatttgatttttatttttaacaataattgagttgattttattcattatattagagactaatatagagtgattagcttagctatatctaacctctaaaagtgagtcaaatttgttaagtaaatttagtactattaaaggttggtaaagtagtctactctagaacaatcaaagaagatttgagcaagtcacttttcccatttagctccaatacttgtaagttatcataattaagcttggggtctcaagggtaatttatataattaacaagggcactatagtaaaatgatgacattatgatttttttcttttctttttttttctctttctacatggccaaaaataaccattggtgtccaagtttctcttatacaattgtttttgttttacttagagaaaactcattaaagatgatgaattaagctaggggcctcgatggtaatttctacaactaacaagggcactatagcaaaatgatgatattatgatttgttattacaatgcttaaaataatcattggtgtcttaagtttctcttactcaattgtttttattttcttcatttaaaaacttattaaagatgatgaatagtttcattatccttatttggtcttctcctttgtgaaatgaaatctgtttgtgaacacttcgttcctttttaaccacttaatataagaacaaacacaaagtcttccaactgtctttgatcaattcttagttttgttttgaccta

SEQ ID NO: 78900 - DNA, 1428 bp, Cannabis sativa
agagagagagagagagacctcaatctgaatgttgctctcggagggaaaccagtgcatgagaactcccagatttaaaacagcgggtatcaatttgaataggagaggagttgttacctgtaaatcaaataatttaccagggtaaggacttcttcatatagaccagcaaaagagccataatccactctcatttaaacaacttactagactaaaggctgttgttccaagaagaagcagatacatctttccctacaaaaatcaagtcaaagaaaacagcaatagaaaagagagaattagaaaaggactacaaaagatagcaataacaagtggaattgctttcctttaggtgcctgtgtttacatatgaccataaacaaaagtttcataattgttttccgtaaaccacaaaccaagccatattcatatgcatatgacaacagcagagagcggttacctcaattagatgaagattagacgcacgactgagaagaacaaaggcaaattctcctatttgagcaagagatattcctacctgcatattgtaacaaaacgcaatgaattctatttatttttaatttgccaagtaaagctcatctcttctattttgggggtaatgtgttggagaagggggttcaggaatctgagttcacctatgaacaaaaacattcactaaaaaagtagataattaacttacaataaatgatgttttgatgctatatctgaaggccttggtaactatagtgacaacagccgtctttataactataaccaaaatgacagatgctagaagtatatccacgtggctccaaagaaaatgtacatgaatgagcatcccaatactcgaaaggaagagagctgcaaataaattacgaattggttccacctaaaatgtagggaaactgcattttagaaagtatttcactgaaacttaagtaaaacaaatacgaaattagaattcagcaaaaccctaatgtggaaatcaaagtcctcacaagaagatgaatccatttatgaaatttttcaagccgttattgaaccaactatccatatgttcacatattgaattttgtaccttagcagcatataaagtagatactttagaaaccagaatagtacctgatctaaagtatgttgagcaaaatcagtggtagatatcatgactccagcaacaaaagagcccaactcaagactaagacccagcttatcactgcactgaaagattagagagaattcatatgttagaaattccaaagagaagtattgttgttcaatttgctcaaagccaacgaggcatatagaattttctaatctcatgaaaaggcttaaagtttgaagcttccaacaagtttaaaccacttataaaaccatacatctaggttatcttatcataaaaattagctgttcttcaaaaaactctagctacagtttagct

SEQ ID NO: 78901 - DNA, 4942 bp, Cannabis sativa
  modified_base (78)..(85): a, c, t, g, unknown or other
aacaatctcaatagttcgggaagaatttctaacggccaaaaaagtttagggggcacgatttaatacatgtcaaagttnnnnnnnnaaaattactaattaacctaaaatatattttacaaatgatattttaaataaagaaaaatagtaattacactctcatttttcattaccacaattcttatgaccaggagaataaattgaaacctcttacacaaatatttttttttcgaaaaataaaattatattctgtaattatatagttagataaatatattagattatgcaatttccttccattacattcaaatttaattacataaatatttattatttttaatttacataagatattatgtaatttatacttattttttttcttcatttgcaaattttttttttaaaaaaaatgctaatgatatttgcactcacaaattacatgtaaattttacacacagtacacagtattagctttctctaaatcaatcacatttatataaactagaactcattactgtaatatgagtaccaattacttagaaattaaatacatgcataatcatttaattaattacatatctttacttattttaacattatttagtaactggtttctttttttttactgtaatataggtaactacctaattaaaaacataagtttatctcataaggttagtataaaaatgcattttcataacaaatctagcagaatttctaacctgtttttcttgtcagtcagaaacatattgtaaacattatatacaccatttcaaatgtttcttttctcacatagttacattacatgtttggcccccacaaaattacaaatttacaaattttccttttcatactgcctaaaaaagattgacaagagaaaatgcagtcaaaactagatcaatctctttccaaccatgcttccataattttgtcactaataaaaaggggagcctaaacctttttgttagtcatagcctactttctagtgtatcataaaagcttgaaccgagtaagaactgtgtcggaagatgatcttccggtcagtttcctggtaacactttcaatagtgatggatctttccaaggggctacaatgtcatcggccacattctgaaaacatttacaccaacaataataatcagaaaattgaaaaatattgaactacattaatcaggaatcacaggggtatgatattataagtaacatgtattcaacattttgttcaagaaaaacaaaacaatgatttttatcttgaaagccaaacttttccaaacagtttgactggtatagtcaatacagattcggcaccttgtactaaaatttgatcaataatatcttataattatgaacaaactgcagttagttatgtgagtgtcaaattcaaattaaattactaaattacatatcagtgaagacaaattagtcttaggaatcgagtaccaaatatgtataatttcacaatacagagtgcaaaagagcatcattgaaaacatagtgtatcacaatttcaataaaacacgagtatttgcactttagaaaattattctaatttgaagcataaatcattatgatctcacagaaatttcaatcttcaatgtgagaattctgtaaatggtaccaagttaaacagcataaaatcatgctgacatgcccagtatcctttcaatagttggtttttcgtagtcaaatcgtaataaataaagaacatagcctttcataagactaatacaagacatgaaatggaaaactcaccttcaaccagtgaaagaatcctcttaatagatttagacttttaagatcatcatctttggctagcttcatctgctctgcaaaatctgcaaacatataagactagttcgtgagctttcttttctctaattttttttaacaaaagatgatcaagatatgccaacaagaaatgtcacaagaaagcaacttatgacatattgtatgaaaccttaagcatgagcaaacataggaatttagatgaagcaaatgcggaaattctaacaatggatcaactccaacggacctttatgtatttcaagatacgattttccaaagctgtcttccaaaggacatgattttgttttgccccgcaaatttatgtttttacttttgggcctgtgacaagatacttcttccttaagctctgtatgttgttgttggtcataaggacttttcaatatatccaagagctccttcctaaaccgggattgggattgacttctgatgccatctttagctaaactagagttgtctacatctatctaataatttgtaaaatatcattagaataaaaaaaatcagaggccatctacacagatatttatgcataaaaactaatcaaattaagcacaactgtataaaagaataattaaaagaaaactaatgaaatcaagttgaggtacgagaacgtacgacaacacaagggttcttatccgttgtaagtatttgcaaatcatcatcatcatcctcatcctcatcctcctcaagtctctttgtactaccattgacgtcaaacatggtttcttcaccttctttttccaggaaatccaaataagcatgatagtcttcgcatataccatcaccttcatcttcctggttggattcacccccttgaatctcctcaactttgtcagatttttttggcattgtattctcataatcatcaatagtatccagatatttgagatactcaatttcttcatcttcctgttcagaatcagcatctaaaccatgtttcaaattagaattaccacttgttccaccatgttctagattagaatgtacacttggttcacaaggtttccacttaatgcaataatctgtttgatcttctttgtcccttgaaacaggttttatataagaatcctcattattaggaaaagtcaaaaagtcttcttcatcaacatcttttgaatcatcttcatcaacagcttctaaatgatcttcatcaacatcttctaaatgatcttcatagacatcttcaccaaaagccagaagttgatttttagagccaaatctcatactaggacgcatgtcctcttctacgtcatagtcgatcagcttagtcacaccattctcatcaacaaactcagctgaatatgagtttccatttcgcctcaaactttccaagaacttgatatgcacaggatcatacacgtcctcttcatcagacggagcagcaacatcattatcattatcaatatgatcataatcaccatttttacttctaatgtttgaaaaactaggaggtttcaaaagctctgatttttctccagctatgttctttttgattgcctttgaagctttgctgcgagattttgggttgtaacattggttactcattctttctctcctcaaacgcctctccgacctcaagtcagagtcattatcaccagatcctaagctccctaaccgggcacttgttgcgttgctgttagagttttggttgaaactttggtgatcggagcatcttctctttagtcgcctctgcagcctaacatcagtgttttcatgactacactcctgactagttgtactcccaatttggacactccttcccttggctgcctttccattccctacctttctcttcgctgcctttccattccctgcctttctctttgctgccattccattccctgcctttctcttcgctgaagtatgacccattcagctcaaacaatctaataaccgtttctgaaatttttccaatcaaaacaaagagaaactgtaagagaaaaccaaaacaggaacacaagatcagttgaaaacccataagaaaaggtctaaacatgcagaatgatctaaacaaagctctaagctcactagattttcttttttttacaaagcataatacaccaaacaagaacatcaaaccgtcttacaacaatgaccatgccaaacacgcttattgggcaaagccaatgaataatttgatagacttttaccttgattaaccatttgtatagaagaaagacactgacatactaccacataacatcttatttacaacctaatagaggaaattacaagaaaaaggagagcacaaaattgagtatgaaacttaaacacacaacaacacaaagaagcttgaatacacattgctattcagaaaaaaaaaaaaagacaacctcgtagccctaacaataaaccaaatgaaagtaacagagttcatttgaaatttcttgtaaaagcataccaaaatgagataccctcttggtaagatcaatcacaaactcctcccatatcattatttggtaccaaaagctcttaatttttaaaatttcacttctcaaatgggaaattcagtaaagcttttatctttctcccataagaaaatgaatattcacataaaaaacaacaacaacagaagaggagagaggcagaggtcactggatttgtacaatatcttcaaatataaataaattaatgggttacataagatacctgatagccgtgcagagatggagccgcagaagaagagagagaaagaggggtttaagggtttttgagtgagtttgagaaagaaagaagagaaaattgcagtagaaagtgaaatattttatcatatttttttatttaataaataattaatggaaattctataatgcaccccttaaaatcgatacattgatgtaccattatctattttagcacccgaaataattttttagtcaaatttttttttatagtcatgtgccattgaaccgttttttttttctttacattttattatactagcataaagttacgtacaatatacgtatatctagttatacacttagtttttaaggattttaagcaaaattttttaaataagcaaaattgaagtattgagtcctcccatatatccagttcacattccaaaataattattaatgttatgtgtatatccatgtgtacttaattcttagaaaaaaaatgtaattttgaataat

SEQ ID NO: 78902 - DNA, 7418 bp, Cannabis sativa
tattttaaaatttaatttagaaaaacacacttagtttaatgaaatattctaaatataaatttttagtaactaatcaatattttctaatatttaattaagtagaaaaatatatttaaattgaaaattaatttgttaattaattttagactaatttaaattaggatattatagaaaaaaagaaaaatgtaatttttgacaaatatgttgttaattcaattcaattttatgggctcgggtctacggcccccaacccactaacttggctctccgaagttgtggttgtcggaatcggatgtccatatccattctgatttgacttgactacacaaaagatccgagtcggatcgggtcgacccaaccaaaagatagccatctggtagggtttatctctctctcatgcgtttttgtttttgtgtaacgactgtgagcgacaactggttgtttgtttttcaaaaagactacataaaggcggttccaggctcgacctccaagctcctttctcattcattcatacgtatgttgtggaccatggaagcgccatgaagatgaagcgttcctactcttgctcatagaaaagccctgcgcgattatggcacgtgctgaatcattctgtatatatgtttgctttccgagaaattgactctggaaaatttatttgatttgaacttcttttcttatccagcaatcgttttcatagggatatagtttctttcttctctcgtggaactctagcaatggcggccgatgtgcaagtgaagctcgacactcctaattcttgctgtgcatcggtaaaatttcgatttgatttgagcatatatctgtacatacatttctttttagaatatttttgcgtttattctagctgcattttcaatctcactttggttattctttacagttgaagaacaagtactccaagctagaggagaagcggaatgctcttcgtcaagctgtgaagcttctagagcagcagattgataagattcaagcggagagtaagaaaggtaaatatctgtttacgtttgagatttttgaattttaaatttttgtcaaaattaggctttcgatgttataattaaggaaaaaatggttagcgagggttgaaacttataattttggtttatacttgtagcatgtgagagagagcgggctagggcggattttgagaaaggggagaaggagaaagagtctgctgctaggttagttctggagaatgaagtggctacattgaggtctgagattgtttctcttaagaaggaaggggttaaagaaattggggatggaaatggcgaggtgaagattcttcgggctcgtgtttctgtaggggaaaaggaaatcaataaactaaaggaggtggttgaaaaagaaaggaaagaggcagaatcagtaaggaaaaatgctgaagcggagaagaaaaaagcttctgaagcacaaaaaattgtggaaggtgaaagaaggaaggctgaaaaggaaaggaatgttgccaagttggaaaaagacaaagctgagaattttaggcttcaggtagaagctatgaggaaggaagctgatgaaatgaagtcaaagttggtttcggaggcagtgagattagaagtggtaaacacaaagcttgaaggagaaaaacagaaggtggccaaggagagaaaacgggctgattcagagaaggcgaaggcagaggagcaaagaaagcttgtggaagctaatagaagcaagattttggatggaaagatttatgctgaaggtttatctcggcaattggaagagagtaaaagaaagattgatgaattacagaaagagatacatgaactcaagtcttccagtaatttatgtaaggcatctgttggccaattagatgcttctataaatactgaagataagactgtagtaaaaggatcccatgaatcaaagtttgtgttggagctctcttcaaagattgaggaagcaaacaaaaggtttcagtcagagaaacagaaggcatctagagagaaagaacgggctgacagggagaagttgaattcagaacaacataaaaagctttcagaaatgaaccgaaagaaagcactggaagaaaagtctcgtgctgatcagttgtgtaagcagttagaagaagaaaaacaaaaggtccttgaattacaaaaacagatccgtgagcttcgttccagtaggaaatcagttgcgccatctgctgtttcaatgactgaaagtagggaacttaattttttgaaaaaacaactcaagtttcagaaaatgaagaaaaaacatgctaagcaagtattggaactggaaagaagccgtaactgtatcctgcaacaagaattaaggcatataaagctggattttgatcagttctcatgtcgcctagacatgcttcataaatctttctcaggtacaaaaggtgtacacagcatagagaaggttggtttcctctatttatatttcgagtaatttcatttttttccctaagtaattggagtatccttacttgtttgggtctttatgtacttcagcttgtccttgaaacagaactatgagatgtgggtttgtttctttgtttttgctcgaaaatcacatgcatcgatgataaacctttttcctattctctgatggtaaaacagtaaacattttactttgaattatcaataaggtttgatgttacactgttaccaagtgactggatttgttgatatgttgtttaagacatcctgtctctcattttatttttcataagaaaattaaaagaataggagaaaagctttttagtttcaatctaataattaaattgtttatctttcaaattatactactggaccattgatgcaagcaatggtcccatatttttgatctaataattaacttgtttatctttccagtatttcactcacatttatattgtggaagctgtcagtgcttctattatcataattatctttttcactgtaaatccacttgtttactcacctttggcatattttgtatctagcaatatattttcatcaattttgttaaaaaccccacaatattttgatcctgtttactgattgatacttaattgcactctgcagactgggaacatcataaaagcactgaagtcaggctcagaatcttttcagatctacctacaaaagcaaaacgagcctttcaagagtagctgcccagcagtggatccctctaatactgtccagcaaaccttaccactctctgcacacttgtctactgtgcctggggcaaattttgttgaacctattgcaggtattgattctaaattggagtctctgcttggaggctctacaacaacaatgttaacgagttctgctataaattccaatacaacatctttttctgatggacaattggtcggctcacaggataagagttccttttctgttacgacgtctgcaaaattggttgaagggcattcacaaccaatcctttctgacttgtcaggtgaagttactaaaattaagtccggtgaaaatcttgctgttgttgctgaaaacaatgttaaaagctctgttagcaatgctgctgttggaggagttattgtgcacggcaagaaaaggaagagaatgcttgaagcagttgaaactattgaaaacttatacttcgaggagaagaagctgcatttacgattagaagagaagttatctgttttgcatggtattattaagaagaaatcggacagtccttccagaggagagaaatcactacttcctagtttcaatggcaactcatatggtaagcatggtaagcaaaacaagaagagaaaaacatcttttcaagataaagtggtaatgcaacatgcttgtgatattgacgagcaaaaggagagagttgtagttgaaactgaagtccatggaaatgcaagtttcggcaaacagacctccctaattggcattgatcaggtggcaacttttggagcaaagggggaaggcaaaagtgattctgctaaatgtgattttgatgctgtggtgggttttgaggacctagttgatggtaattacataaatctactaaacttggacagtgctgctgatgaagaatgttatagattagcaatggagatgcctctatcccctatacatcatgaaattgatatagagcttgctgacacagtaaatgtggataatacaaaaaccttaggtaatgaacccttacgcttaaatgaagaaaaaaagatgttaccatcatgcagaattgatactaatgatatggaaattggtatcaataacacaagttctgatggttcttctactgcaactagttccttggggcataacaatgaaaaccatgttagtactataggcatggttaggaatgattggcatactagtgaagttggaaaagctcctagttgcttgagtagcaactttggtgtggaaagtactaatccgactattttacaagatgagaagtctaagtttcagtttggtggtgaatcttggtctgctaccaaaaatattttagaacggtgtgttgttttttctaagatacaggatcgaagctgcttctccaggatacaatatgcaataagaacttgcataggacaatgctctgtggctactaaaacggaatggatgatgggtgagattctgctggcccttaaaattgaagaaaagctttcatccaagtaagttttttttttcttattttattttgttgtatacatatatttaatgaattgcctttctcttttcttattcactcaatcacttctcaaattcttgggtatctatcacacatcactggataatttcacttgtgttcttatgcgtggaaaattagtctgattatttatttatttaatctgtaatgatggaatcttgagtaactttttttttcttcattggtgtagggagaaggtctgcgctctcttttccctgctgatgattaacttttctgtgactgcttctggtaaatttggaaacttcataaattgggcatcgatctcttgcttggattcttttgccgggcatgtaatttcaggttgcaattgcatgctatatacacattggctgttttttcattcatgatttggtttttcacaacagttctgaagtttaactttctatgctgtttttgcagtgatgtctgatatggaagttagaaggttgtttgcagaactaggctgtttagatgagctgtttagtctgattgagaactttctcatggatgagtgtgctaaggtgtacgatgatctctcatttgaatttccggtcaagtgtgattcaagagttcagagcagtcttgatgtctcagatagatctttgttccctgtaccagcatcagcagaactgttgatagcagggagcatcatactggcatcaatttgtgcagcagttgatcgcattggttttatctgcgaaacatcttacagcattttacgggcccgcagacttaacaattcattgaaactaagtattcttcatatatttgcatatttgggtggagatcagtttttcagtttgagtgattatagtctgatgatgactgtattgaagtctttagttagggacattgagagactaggttcttccgatgcttctgattcttgcaattcacttatgattgatactcgatctgcaatctgtccatgtgtcaaatgtccattttcaggagatgttatgtctgtcgataccgtgacatctttccttttggggaagctcaaagctgatgacttgttggaaactaagtataacacgtctgacttccaatcagacccattcagcaatgtggctttatatagtctcaacgatcttctatctttggtggagctagtagcataccacatggtacggttttctcttctctttttttttttgaagtttaatgttggccatcttttgctggaatttgtcaatgcattgatactttgtttcaactttgagaatatgtttaatttcatgaaactatattaagtttttattattgagaagttggttttatcaaggtaataatctctggaaatttattgaaagtaactgatttaaggattaacacatcttttgtcaagattcttaactaatctcatgagtcatgagtggcagctttttgatgtgcttttacgagttatcttgacattttcttgtagtaacaaccaccttatgaagactaacattataagaatgtacaccataatgaacaggagtttggactattttttttatttaattcattaactattaaaaattctgactttctatgcttttctcttattttgtagggttgggagtggacttgtctgaaaatagtgcctcagctggtaaaagttttggaatcatgtgtctataagaaatcaacttcagaagtagttgttctccttggtcaacttggcaggtatgtttgcatattttatttttgatcaacattgatgacttatcatgtctatattttctgtagcctttaccctcccttcgatcttagaaagctttttgatgtaaacttcatttcctattcatttgttgtacacaaacatttatatatatacacacacatattatgtgtaacaggactggaggcttcatcatcatttccttgctcacctcactaaaattattttcttacaaaatttttgagttacttttcttaacatcatctgcctaaatttccataagatgatttggcattttaaatttctccgtccttttttctttgctgttttttgctatttccaattgttaccatatgtatcactttgaaacttttttaccatttatctaatctattaattaaacgtcctcgtctgaacatattgaaagtatgattgtggtcgtgcagtactactgcatattgagtttagttttgattcgttttactctgaatgtgctttgttgatgggtacatttattctttgatagtattattttaattatttggtatactaaaacatctgttcttttgtagacttggtgtggaggcttctggatatgaagataaaggagttgatcaattaagacgcgatttgtcctcatttttccgcggtggcatcagcattatggcaggtctacctattcaaattgcaacagttactgctgcattaggcattctctctatagatttcaagacaatcatcgaaaccaaggaaaagttttcgggcactgcaagtgagtccatcctggttgatatgattagaaaatggttctttttactaagcaggaggcaacaagatttgtctttcagcattttacagactagtggtgtaaataagtagtcgtatacatggtgttgtgaaagccaaattagcaaaaacatcagtattcaagttaattaatcatgggaacaacagtcaattttcaccatttgatagcacatagatattgaagaacttgaggaaattttagacagctctggggattcaatctatttttctttctctctttaatttcccatttaaatatgggacctgtaaatgttgactctaa

SEQ ID NO: 78903 - DNA, 3031 bp, Cannabis sativa
  modified_base (69)..(71): a, c, t, g, unknown or other
atatgttacaaaataatgacaaataatataaattgtcatatgttacatattattagtttattacacatnnntaatctatatattatattatttaataataatgtaacattttattataaaataaataaaatacaccaactcaatatattactaaaaaagattaagaaattagaaatttgtatcttttttttttagtattactaaaaatttaatatatattatacattataatttttcaaaaatatatataattaagtgtggattggattcgatcgattactttttgaggtcaaagtacaacattcaatccgtacaagtgcggattttagatttttcaatccaatccaatccgtgtaagtgcggatatccgcattttgcggattggattgaatcttagtgaacatattatgtacctgataataagtacaataatttggttgtaatggaatgtccggccgtgtgttttgcttctaaagtatgtcattttggaaaattaattagaagaataaaaatagatatatatcgtgtgatttacacaaaattttgcaggattatgtgatatatatctaaaagtaatagtcttcctaggtagattgccatttaaagcatactttcaaaaaagaaaaagaataaaaaaagtcaaatggttacttcaaatagtgtctaaactttcatgcattcttcccttatttggtatgtgagcactaaatgataactttcgttttgaaagagtagcctaactattagtttgaccatttataggagaatatatacattgtatcatacacttatacacatgcatatatataattatataaaagaagaaaaggtctacacgtatagcactattgaggctaaataagaagaattttgtgtttttgagaaacataagcagcgtttgtactcatcgtgaaaatttctgtgtgaacccacagttttaatttacttgtttaatctttatagatttttgaacaagtttatactttatagttgcttcaatagaaaaagtacacacctttattttttttttcttcattaagattgaactatataatataaccaaaatatacaactaccatagaaatgagaaaatgagaattgttattggggattatttgtgtttttgatataacactactagtacattatgttataattagtctaatttaatatttgatctaaattattttcaaaaaaaatatttgatctaaatttaatgtattttatattgaattaaaatatgtgaaatttaaaattaaattacaatctgtattaagaaaatgatttcactgttgaccataatggtagaaatgcttatgataacatatcagtatcttaaatttttcaatttaccaacaacatgtaagaataatgtaggaagaaaaaaaaaaacaatgtgtacaaatgaaaacataaataattaaaagaaatggttagggtgtataagagtacatttaacgaagatgtaaattggtgatgcgttattaaaatatagctcactttataaaaaaatctgttctaatatattgtgctaaaagttgtgtcaaatttagcatataataaaaattacgttaaatttaacacacaatattgtaggagtggcaattcaaatcatgacactacaatataagacgaactcaatatgaattgttacgagctagggtcataaaaaatagacgcggatcaaaattaggtcgaactcgaatgacacaattatcatttgggctaggctacgattcacgcatgtgacacgaaattgacacgaaccatttatatctgatatatatttattttcatagaaaatatataacttagaaaaaaaattacttacaagagtataaaatagataatttatacttgatcataagaattttatttattgtatttataattagtgataaattatttttataaaaattaagtatgcgatactatatattcatgttgatcaacatgtattgtaatatgagtatagtcaacacgagaacacgacgaattgggttaggattgagattaattcttgatacgaaatatatatagatcgaattagagttgacaattaaacatattaacctgcataatacgaacacaaatatgacacgacaacacgaagtgctacccttacaataatatagcataacaataaattttaatcgcaataaatattttacttttatattaacttatattttctttttgttattttaaaattatattttactagaacatcaaataacagatttctttagtaataaaattaaaaataaaatattataattttatattttcaataaaatattaaaagagtattaattggatattaaagttaaatcaaattttgtaattctccgttgaagtatataataatactaaaatttaatgaaaatatattataaatttattttatactaaatatagcattatttatatattttcaccaaagatgttataacaaactagctttgttattaaaatgtatatgaagactataaaaaataagagcatctctagtgaaatgttaaaaaaaaaatagtatattgttatattttaacatatttaagaaaaaaaaatatgctttgagtgttctaaaaaagtgtgctaaatttggcacaaaatataatcgtgtccaattttgcccccactaaatttcattttatttttattttatattaatttataataaattttattatgtattttattattagtttagataattaatttttaattgttaatatttattacataatcagattgtattataaataataacccactatttcgctcatataatttttgatgttttgatgtttttatagtttttgtactttttatggtttttgtgccattttatggcttgttcctacttctttaggaaaggtttggggtatgatggataagagatttgatccaatttgtgttctcgttgtctacttcaacaaccgtttcactttaacagataagtattttaagccttttgagtttttaattttaatatggattggtttaccatcatttctttcgcatactc

SEQ ID NO: 78904 - DNA, 4456 bp, Cannabis sativa
catgctccctcaaacttggcgtggctgagtgacgacggcaagtttgtttttcagataggtgaattgttgaatggatatagcctttgtgaatatgtcagccgtttgctcagaagtagggaggtgtctaacttcgattttcccttgcttaacttgatcacgaatgtagtgtacatcaacttcgatgtgctttgttctgctgtgaaaaataggattggaggagagctgttttgctcctgcattatcgcaccaaattatggcaggtagcttgtgtgggataccaagttctttgaatagagagtgaagccaagctacttcggtggctgtttgtgacaaagctctgtattcggcttccgtagaagattttgcgactgctttttgtttctttgagctccaagtaatgaggttgcctcccaagtaaacacaatagccggttgtggattttctgtcatcgatagagccagcccaatcggcatcgctgaagcactcaacattaagttctttggattgtttgaacataataccctgtccaaccgtcccttttaagtatcttaacagccgcttgcaaacattccagtgatgttgagtggggttgtgcataaattgactcaacttattgacagtgaatgcaatgtcagggcgactaagtgtcagatattgaagtcccccaagaacacttctaaagaaagtgggctgatcgaacaatttactatcattggcactaagtttgtcaccaactgagataggagttgggctgtcatgagagagtagcatgttggtcttggtgagtaaatcagtagtgtatttgccttgtgagagatgaataccatacgcccctctagtgatttcgaacccaagaaaatagttgaccgaaccaagtgttttgagggagaaaaactgttgtagttgagagatgattgtgcggactgtggaattattgttgccagtgagcagtatatcgtcaacatagacgataagatagagttcagcacctgcatttttataataaaacagtgaggaatctgagatggaattgcagaaaccaatagagagaagcacagatttgaggcgatcaaaccacgcccgaggggcctgccgaagtccgtataaagccttttgtaatttacacacatatgaggggtgtgtggagctaacataaccaaagggttgctccatgtatacatcttcagtgagaactccattgagaaaagcattgtcgatgtcgacttgctgaatgtcccaattatttgtggcagcgagagcaagaatgatgcgaatagtggcactttttacaactgggctaaaggtttcgaagaagtcaataccaggctgctgttggaaacctttagcaacgagccgagctttgaggcgttgcacagtcccatctcgattaagtttcactcgaaaaatccatctattatcaaccacactcatacctggttgtcgaggcacaagaacccaagtgttattctttcgcagagcaaagacttcggtgtccatagcagctttccagcgaggattttgaattgcagtaagagcactatcgggttcaaactcagtcataaaggccatgggagatgggaagaaagcattgaacacacgaggtttacggataccggctttagcccgtgtgatcataggatgggatggttgctgtggcataggaagagaggagggtgaagtcgaattgggttggggggagggaattgatgaacgtggctgagtaagaggtgatattggaagctgcatatgtaggggaatagtggagtatgagtgtgatgatttgtttgacattggtgtgtgctcaagtggagagaggttctgatgtgatgaattagcaagtggacttgaggaaagattttctcctggggcagcagagacaacatcttgattactcacagatgcaccagtatcacaatctgaagtcacagtagataagtaaggaagccattgaggaaagttactaggttgtagtggaggatcggtgtgtgcactaggataagtaaaaccactagcaaaaggaaaatcattttcatcaaaggacacactactagcaacgtagacacgacctgaattgtggagacacaagtagcctttgtgactcgggctgtagcctatgaaaacacacttagcggaccgaaattgaagtttattggtgttgtaaggtctaaggtaggggtagcaagcacaaccaaaaactttcaagaatttatagttgggagagagtccaaaaagtttttgaataggacatttgtattggagtacaggtgtggcaaggtgattaatgagaaatgtggctgtttggaaggcttcccaccaaaatctttgaggcatactagagtgtgctaagagagtaagaccagtttcgactatgtgtcggtgttttctttcggctttcccattttgttgatgggtatgaggacatggatgtctaaacttgacacctatggattggagatatggttcaaacttacggtattcacctccccaatcggtttgaacggttttaatggaggtgttgagttgtttttcaacttgtagttgaaagtttttaaatgtaggtagggcttcatctttggttttgagtgggaaaatccaagtgtagcgactatagtcatctataaaatgaatatagtagcgataaccatgtcttgatatggttggagaaggaccccatatatcggaatgtatcaattcaaggggttgtttggactctttaattgcagcaggatatggtttgtgatgagcctttcctaattgacagctttgacaaaattgtaagtgagaaggtaaagacttcttttcattgattaaaacatgtttgagtacattagaggaaggatggcctaacctatgatgccacaaacttgattcattaacggaaattagaaaacaagactcattaaacttagtactaggactgcttttgggtgacttaggtgtaggttgatggctgctactgtgacttgcatgttgtgatattggtgttgtgagttgataaagaccattgctaagtttcccttgaagaagcaccttcctcgaatccatgtccttcaaaacacaagagttagcatagaatttagcataggcattattgtctctggtgagttgtgaaacacttaataaattttttgcaatcttaggaacacaaagaatattgtttaatttgacagatttggattgattgctggtttttatgactgagttacccgtgtgagaaatagcaagagattggccattacctactgtcaatcgagtcttaccattgtattcagtagaagtctgaatgttgttggcattgtctgtgatatggttcgtagctccgctgtccacataccagttagtgtcatcggctctaggattctgactggaattagcgacaaaggcctgctggttggatccgtgatgagtattgttgctgctaaaagaagtattctgactttggttgttgttgttgttggcaggtggaataaaactaacatcgaatcgatagtagcacttgttggctgagtgcccaggcttgctgcacagttggcagattatacgcccctggtttccacgcccacggccacgaccacggccacgagaaccattagatctgccagcgttggaagggggaaaatttctccttccgcgagtcgcaaaattagcagatggggcagcaagatctggtgtagaggcagtgttcaattggtcgattcgcatctcctggctttgtagaagaaactgtacttcagagagggttaaatgatctgctcgagaagtaagattgatgacaacagaatcgtattcagctccaagacctcctaggatgtatagaataagatcatcatcactgaacgtttggccagctgagtttaaaccatcagcaatagacttcattttgagaatgtagtcatgaatggtcatggatccctttttgagtgactgcaactgaaatcggagttgaagtatgcgagctcgggattgagttgtgaagagattttctagcaaagaccagagctcataggaaacacgacaacgtaaaacatggccaagcatagcctcagaaatagagtttaaaagccagctcaaaatggcttggtcagtgcgaacccaaagagtaaattgggggtttacctgctgttgctgcaaatcggggtttacctcgtcttggacttcgatgtgctgaggtggaactggtcttgtgccaaagagaaatccgtcgagatcgtgagcgcggatggctggaacaacttgtgatctccagtatggatagttgtctctgtctaggcggatgctgatgggggccaagggttgcagcaggggcacgggttgtgcaggagcagctggtgcaggagctggagcttgaggaggagcttcgacagcttgagatctggcattattgactgaagaatcgccaggagacgccattcccgctctgataccaagctaaaacacaatactgagatataaaagg

SEQ ID NO: 78905 - DNA, 6828 bp, Cannabis sativa
tgccccccaagcaaaaccacaactaagtaaagagagaatccttctccatagaaatctggaaaaccaaatgaaaaaacaaataagagagacaaactgatcagaaacaaacccccactacttctcgatctgtaaagcaatattttatataataataaaaaatcttatttttcactctctctctctctctcttgctatctttacttttgcattaagagctttctctgccatctctgatgaagattctaattaagccctagcagcaggtactcctttccatgttccctttgcttctagtctgatgtggtggagagttgcccttgaagtactttgagtagcaaacaagtatttcagatttaatgctaaaattctaagcaagggatgggccgagagagagatcatatatagatagatatagatagagtactacttcttctactactactatattctatactatactaacactcccactacttcttatccttttctctaattcactttttatttattttgctttcctcttttgtttatcattttcacaggcgattcctgttgcgggttttgtctatttgatataaaaataataatgtattgtttcgggaggtgtgaattataagagaaagtagtactactatatagctaggactgtaaatttttatttaattattttattatatatttatttatatttcaaaaataaaaatatgaacacatcagggtttaggtgaggaggctataagaagtgatgttgtgtctggctagaggatccaaaactaccaaaaacaagagcaacaaaacggctttgcatcattgtttctcacttggctggcgactactataactatatttatatttacatatagaaagagaactcagttctccaaagctggttcatataagcaatcattatggcttcatcaaaccgacactggcctagtatgttcaagtccaagccttgcaatagccaccaccaatggcagcatgacatcaacccatcgctcatgactagtggataccacagacctccgtacgcttcaggtatatatatatatatatatagatatattttgacaagattatctttttcgttctttcaatatcctattttttgaaaagttgtcaaacaaactttctaataattttatgaccaagaagtacatgcaatattcccatgtgttgcattttataattaaaacctttctatactacagttggtgggtgtgatgagaggagtccggagccgaagcccagatggaacccgaaaccggagcagattcgaatccttgaagcgatctttaactctggcatggtgaatcccccgagagacgagattagaaggatcagagcccaattgcaagagtatggacaagttggtgatgccaatgtgttttattggtttcaaaacagaaaatctaggagcaaacacaagctccgccacctccaaaactccaaacaacaaaaccttcaaaatccaactccaactcctccttcctcagccaccgctccttcctcttcgtcttcttcgtcgtctgagaaaacgtctcccaaatcccgatcgagaggcttctcatcatcattgggcttctcaaacctagccagtactactaatcatcatcatgattatcaccatcaaactagtccaacttcttcggtcaataataatcagaccatctttcaaaccaacaacattaataataatactcatcacgagttcttaccaaccgatcaacactatttcttcccggccgtgcctaatcatcaccccagttctactcctgttcctgctaataccagtcaagggttttgcttccctcctcaaaatcatgagctctctcatggggtagtactacctcatcacatggagatacagaatatagggccttgtacaagccttttacttagtgagatcatgaaccaaaacggtgacttaaagaaagagcatcacgaggtgaataattatcataagaatttgatgatgaagatgagctctacggatgacgatgatgaatctcagttgaattacacttgtctgatgacgccgactaggactccggccactactccgtctaacgtcgtcgtttcatctcctcaccaccacgctactactgcaactactactgtatctgctccatctgtccccctcaatcaaatccaaggtaaaataaaataaaatgttaccacatggaactgtaactgaaaatcgaaattttgtttggatgtgcataaaataaaaatatagctaaattaattaaatgttatataaaaattttaacacgggagaggtgcaaatttactgcagttaattgaatttacaaatattattatacattggtaaaagatcaggacaatattgtctaatgggtccagcgatctgagtgtagatggacgtgtgcatggatttggtggtgttggtccttaggtcgactgtttcatattgatctttgtattgggtacatatgtttagaataataaatatttagaatataattttatttatttatgacgaaagtaatagggtactactgggtttatttaattaataaattattaggattagaaagtttgtgactactatcctcctttataactttgctttttctgataagttgtacgtataccttattcgatcgatcgtggagaataataatatatattacatatatttatgagaacaggtgttgtaggagaagatgaacagggagtggtgggtccaggtggagatggtgtggcaaataaaacgatggtgttcataaacgacgtggccttcgaggtggccgctgggccattcaacgtgcgcgaggcttttggtgaagacgctgtacttattcactccaatggtcaacttgttcccaccgacgactggggcgtcactcctcactccctccagcacggcgctttttactatcttatctggtaataattcaccttttcacaccatttacgtaaatctttttatttgattataatatttgtggcctctataattgcagatttaggagctcatatatatacgagtaagagattttaaatatatttatatatatatatgtagcttttggattagggtttcaatcattgcttatcatattaattctcattttaatgatcgatgtctccgcaatttacatcttggacgacgacttatctgtactcatttggtttttgaacctcttttgttgctgttgttcttctttttatttctatatatatttataaaaatctaggtggttttaatgagtatggatatgtttagtcttatgtttatctttctgttggacgatggcatataagtagtgagtttaattaagtacataattacgaatataaaaagacgatttttgatgttttacagtaccccacataaactagtatatatattatatatatagatcatcatatattatatacacgtgaagtaaattaagtatagacacgaattcataatatatacatatatatgtatttagccgatcgaggtataatatgatcatgatcatgatcatctgcaagttttggggttttacttgcttatacttgaagcaatttaattccctcattactccattagggttgtttttcacttctgaagtactaatagctcaacttccacgcaaacaattatttatcttaattaagctgctaccacgtaccctgtagccgataaaaccattcattcacatcaaaagaaataagccataacaaatgaatattgaaaatgctactatttatagtaagttagataaactttgatgtacataatggagtacgtgtagacataatccaaatgttttttcaaacaaaatttacaattgatttactattggcagagcgatatgattagagtaccatatgtattatctaatctgaccaagtaagcatttatttattacaacatccgcgatatatgattgcaaaatttattcacaaatctttttgtttttatggtaagtaagcagaattttgattgcatctcaacaaatataattccaagtctacagactaaaaacatttgcgaaaaaggcattaaaaaccctcctgcaaaattttgcggactctccaactgctgcatttagaaaagcaacatactctagaatgcttgcttctctttatccacttcaagattccagcaaagcttatattgattggaaccaataccaaacctcacacaccttggaaaagaaaaatatttgaagagtcattcacccgaaaaaaaaatataataaaactagtcatgaagatattaattacaatacacaatggttttgaattacttggccgaagaaaaatatgcttcaaatatttagtgacgtgacctcagtattgtattacactgccaatatatgctttggccagattatgaaggtatcaaaattaactaaaaataaatgttaataatctcactcttaggatgttgatctcgacttgtatacatatggggaagtaatgagtttatataaataaaggagtttgatgtatatatatatatatatggaaactactaattacttaataagtctttattatttatgtacagaccaaattgagaagagtgtattttatgtttagcaaaaatgaatggtgaacccaaaagggaaaggctgtaatgtatgacaaacactccaagtataatgtttgttcaagtttaacaaacaggaaagaaaaaaaaaaaaaacaaaactgaacaagctaaatcaatcatatttcaatcaatcaaaatcaatccactgtacatgcacgtattagttttgcttatgaagattataagaagaaggaaaatggtatttaattacattatttggattatggtcaggtatggtaaggggtagttgttgtcatatctatatataggtatatagatatataggtcaactttggtttgagtggttttggatttattacgtgcaacctgatgtgtacagtattaaccatgcatttggatttgattgagtgatttcgatgtgtcaaagaagatgaaggaagaagaagcagagcacgcccctgctgcaatgcaattacaaaattcccagctccaatctacgtcatttcaccaatacacacacaaccataccgtcttttgcatgaaccatcacgtaaatctcaatcattaaaatgatgaccttatcccggtcccctccccttactccccagggcccaaagaaagaaaactattcctcaatcttcaaaaagttacaagtgttggcttttcaggggttggtacggggtttgctcttactccgagatatgtaataataaagctctctccactggaccatttttcctatatatatattattggacttgaattgaataggagggcaaaggtaggtgaagatcaagaatatgtattctttgtgtgtgtgtgtgtgtgtttacgagtgaaatatagtccaaggtttgttgctacaccagggttggttgcttagtagatctagctatatagcttactagccggctaggcacgtatgtatagcctgagaagagtagtggtgcaaatggtcaaattttatgcatggtccctggcccctacagaggatatatactgatcaaaaatattcacatcacacagtgatgggatgaattgtactcttatattatatctatcttctagctagtacttggagttggagctaatgtgaagaaaatttttgttttgagtttgtgaaatggaaagtgatgacacaactcacaacaatattggattccagaactattattgttatcatttttgactgattattattattttttttttttttcagaaaagactacatatcgattattaattattattatacctttctttgactatatgttacaccaatttcaaatccatggtaatagagaaatgttaaaaaatattacttaaaatgtctggtaaaataaaatatatatccagtcctaattaaattttatttaatttaatgtaataactattatggaatataacagaattctttttacaataaaaataatatagaaaaattactcaaaataaatttaactaattgaaaattaataaaaaaaaaaatgtaataaaatgtcataaattcattataatattgatgaatagttttgtttaaaaaaatgatagatgaatcaacacttaaaatttttaaaatagaatcaaatggttaaaatacatttctagtagaacaataataatattaaggagttcttacattaaatttttaattttttttatatttttactgtgggatggaattttttacaaaaatactgtgtttttttttaaaaaatactgtgtactatgttaaattttttcatggttgttctatagttatttttagttcttgcactattgttttaattgtacagttttgttgtgttacgattattttataaaaaaaataatatttttgtaaaaaattctatgtgacaagtaatatattttagatttttctaaagtagagaatataaaatatactttgtagggaatttaatagtttgttctaattggacaattacattgtaatggtcttgaatgcaacatattcaaactaggattgattaaaatcttttgtcttatccaaaaaaaaaataatttcattgagtttaaggagactctcttttaccctctctctttatttttaggacaagtgtcaattattaaacaatacccacttttacttaatatttagtcataatattatcattttattacacatatgccattaactaaatcacttcacttatttataaataattttatttttatttttaaatgtcacattttctttcatagttttaaaaaattactaccgtatatataatacatagattattataaattctcttaaaaaaatttaa

SEQ ID NO: 78906 - DNA, 1297 bp, Cannabis sativa
ataactatatgcttatgtaattaatataaaaaataaatttacttttatatacttctattatactatttttataccaaattttttatcaatactacttagtttttttactgttctaaaaataaattaaaccaatcaattaccattctcattctataacatgaacaagtaatattattctatatagataactataatataaaaatttgttagtgagaaattttcattaaaatgtttagatagttaaaaattagcaaaacacattcatttttgtattactcatcaaagatcatctattgatgagatttgtattaatttttgaacttttcttatttgtaataactaacttgtctgaattaaccatctaatgaaattttctcttattttttaaggaaaaaaaacctgtacttattactatataattattttattattattataccaaaaataatagaagggaataacatttggaagtttttttttaggataataataacatttggaagttagggaggatacatgtatttattttcttatataaagcaatagattaaagcacatatataaatataattaaaaaatattttttttattagaagtagtggtggaaatgatgatatataggagtattattgggttgtattgattttgattacgtggagttgttgtgactttgaacctaaaagtgattagctccacatttttagtgccaaatcaacgattaactcaactaggtcaaattttagagtttatagttagaattatgatggacttggcctaattgggaagaattgaccattgatatttctcactatttttaatgctttcaaatgaaggaatatcataaaccaaaggactatatagttcataaaatttgcttactttttcaaattgtaattattataagaatatatattgttagtctagtaaggaaagtttcataatattacttagttctttggcatatggaaatgtgaaaagtggaaaattaacttcttcaacccaaattggagagagcagatattgaaacactccatttgtttatggtagatgaagatgacgttacaaaatacaaattgaccaactcaaatatatatatacttgattatttaatatgcatttattgtgagattttcagattttaattttcaattattatttacttatttaattatttaatagtaccaccccgatcaatatatacgtgagcactaaatatgatacgtatataaagactaggtgattgttacgtgccaagtcacgtagtgttagttttatttaatattttaattaataatta

SEQ ID NO: 78907 - DNA, 3369 bp, Cannabis sativa
atatttttatataatactatgttaaactttaatttatactaaaatattatatatttaggtgtccataaaaattagtaccacatatagttttaaataggtcgtattgtattgtattatattgtaaaatacaatacaatacaatacgacctaatacaacgttataaacgagccctttatttattaatgtctaacattttagttcatacaaaagaggaagaagcgtcaacgagaagcagagactaaaaacttgagtgttatacaatgcaaaaatcgtcagtatgagaaatcctcttcactaagactaaaaacttccatttcaatgctcaagtcagaaaactccagatagtcttattaatctcctcatgaaaatactacaaataatcttttttcaaaaattgtatatctaatgtatgaagaaaagagctagcttcagcttaacaaacccttttaactcaacaatttgtggatcaaatatattctaagcggaaaactaacaaatgttttagagtttttaagaatcaaaaaacaggttagatgagctttatatatagagagagtaactaactggcatatggtcgaatattgttatcaattacgattgaggccgagaagttttatggctagctcccaggtgacaatagctgctgcgttagcaggaaatgcacggcatattgtgggacctaaacctgtataacatcctttgattccatctcttctgtaaatctaacacaaataaaccaatgcccacccttgcttattagtctattaactcttagtataagagaacaggaaaaaaggatgtgttatcatgccagcagaaaatacttactgaattcaagatttgaaagggatttcgtgttgtgttcttatctggggaagtctggattatggttttagccacatccaagggcaagacagcagaccaaaactggtgaagaaacccaaagagattctttagcttgaaagttctagtaaaacagatagaaatatgtgatatcttttgctttttatttttagaaaagtcatgaagacgcataccgctataccaccaagaccaccactgataattccaactcccacgtcaattaagttgctgttatcagatgaagcagaattcagttgtgaatgcatgtgatagcgaacatactcgtaaacactgaaaaaggctgcatttccaatggattccctcagcaatgttgcaccgcctccacggaagattcccttaacctgaaaggtgttctatcagcacataatcatatcataatttatataggtttatcatgaggtgggaattttcttaccccttcgctttttacagttttaacagcacaatcaagaggaccgctatatccgctagttaatggaaccaaagaatcagttccttgaatttgcatcctacactggagagagaggcacatgaagcataccacgagaagcaattgtgaaatccaaaactctcccattttatttaccttaattagctctgatggacataatataaaactgataatagctcccccataagcagcagatggtattattatatggggctgtggagcactactctgtgtacttccctttgtgagcagaaaaaaaaagatgaataagaaaagtgaaaccacacaattcaaccaaataagagagataacctctacttcacaaaaaatatatatatatatatatacagatacatattgacttaggaggcaatttgaacttgggacatcctcaattgtgagaagaagtgtattatttacactaggctatgcctgtggtcatacttcacaaaaatcacttatgatttattactatagagttatatgttcaaaactaaaatatttgacagagcactattccaatccgtaaaccgatgaacagatgacctgagcagctttctagtttacctgcaaaaactgtttcgtctgggaataaatgccaaaaacaagggaactctcaaaagacaccccaacgaaagatgatgtagcacctctataaagtcctctaatctgtcaaaaatgtatctgttaatattcccaaaaaagggagaaaataagctatatagacaaattagaaatatttacttacccatggcaccaaatgttagctcttatataagcaacaatgccttgactaaatgaattgcaaaagggaattatttaagaactcttagctcaatttttgcatttcaagtcttgtttacaaaaaaaaaaaaaaacaaagcaatatacaggtattttatcacttcttcatccagcttaaatgcgcatataagaaaataatgactagctaaatcagaagcatactccttcagtccttagtatcctagtagtacaatgccaaccattcttgtactgaataccatgtgcttcagtattgtgtttttgcagcttaacctgataaaaaaacaaaggttttaacacactcaataactaaactatacatataaatcagaggaatcaaaaacacgaaagtgtttgcaataagtaaatgtacaaactctaaattcattttcagttcacaaaaacaatcttgtaagatgttatttgtcaatacttatatgttctgaatttcatctagaaaatcgctaagaccgataagcagagcaaatcggtcgacagtcatggctttgtaagacatttgctctaaacttagatgctagattcattgaaagaaaaacaattggtttctggattttgaaccccaagtcctatcaatttcactagcaatgcaataaacaaaaatatactaaattataagctaaacccatgataagttgacataatccaatgagaaaaaagatgagagattaccttaacggtgtcaaagggatgacctatggcgacggtggaaactcctgcgagtaagccggcgacgtactccttgtaagcgggagtgtcccccatctgaagaggctctttctctatatgcgactgagcatcatcactgctatcatcacggtatcctcaccttcctcttccaatatggaagatagaaacacgcctgtttcaattcaataggaatgacttgcaatgcaaatagtaaattagttcatataatagaaaaaatccatggatggttgaaacttgagagtgaagcttgagcaaatgaaaatagagggaaaactcgtaggggtcgaaaattacatttgtctgaaaaataattaagagaaaattatctaagaaaatactttctatcaaagtatttttctctgaaatttcgaatactttaattgtaaccgaagagttcaaggccattaaacttactttatagtttgcaccagcggttctgatcgaggcttcggtacaccaggaatcagagaaatacggccataaaccctaatttcaggagcattgcgagaaagaaaatcag

SEQ ID NO: 78908 - DNA, 2944 bp, Cannabis sativa
aaaaataaatgtatattcatttttacatctatctgccccattaagtttttttttttttttttgctattgattggatgcatattttatatgcacttattattattctttactcaaatttattttgattgaattgacaaatagggaaaaatgaaaggtcatttatgctattttttttatattaaaaaaaaaagtaggtgagatttccagatgggtaatatgggtgagatttttattatattttattacaatatttttgatgagtggttgcaattgcaaatgcaatagtacactatagtatattatattattattattggtaccagttattgagtcagtgataaaagtttctgaagcaaaaacaatgataatgggtaattatggtatttagtatttttgtgatgtttaatatcgttattagtgtaatttaatattaaggctcacatattttatttaataaagattataaaaaattactaattaattataaagtgtcactttatagtggtactaggcaatttaagagtattgctataagctactaaggcgtctagtactactatgagatgacgttttatatttggttagtggttctctataatttttattaaattaaaataagtgggactcgatattacattacactaatattaatattacattttataagagtcttaaatactataagtgccctttaacatttttcggtatcttaggtggcatttggttgggaggaataaaaacataagaataagaataggaatagaaatgaaataaattttaaaatacataaaaaaaaattaataaaaaaattattaaattttttctcatcatgcaacggaatagtctttccttttattttatagaatagtcattccaccaaaatagtgaaaaagtcattccacattacacattccacattccacattccaatactttaatatgcaatcaaatgaaaattatttcattttcaccattctatttcattacctctaactaaacgctaccctcctaacaatactcggctaaaaaggaaaaaggccaaagcctaatagggagtggagaaggaccacactagttagttttgatgtgtttaagattattattattattattaatatctatgaagtctgatatttgaggacgcgtatgaaccatgagaaccatataaaattataaataatacaagtgtgttggttgtacgtgtctggtttagaatcacttgtatatttgtttgtttctaccaccacacacacatacatttacacctaataataaataggtctcactgctattaatttattctcttttttatcattaaaaaatatgtaatggattggctattgtattggctcaactatataatacatgattctgcatttttattggtacacatcaacacatattgcttaaaactaatcacttgggaagatcaagtttgaagataagagcatatgaggacaagttgcaattaaaggagaaaagaaaaagaaagaaagatgattgtatttatttgggccattctgttttgatgaaatacaagttaggtattttcttatattctcactttctaattgtacattgaactcaatgaagtgtaatgatatgttatctccacacacaaatttataatgtaaatttcaacccatcatctttattttgagttcgatttataaacaacataaatttaatatttatttttagcaacataagtacctattatttatacaagtgtaattttcttccagtttcattagtacagagtctgttttaaatttgataaaaaaacatttaaaaataagtgatactacatgtttctatctaaactcaacaatttaaaatttagaccttatatgtgctctgtttaagacaataacaaaatatgtattaatgaaattaaagaaaaattacagttttacatacttatactactaaaagtaaatattaagttcatgtcatttacaaatttaaaacttttgagtacttatgtcactattaattattattgggatttgaaaacatatgggatggacaatataagtatcatttcttttttgttaaaataaaatgatctaaaaagaagaagaagaaagaaaacataaatctacacaaatgtgtggaaagaatgaaggaaataggtgaagcatgaaaacttcaacctcatcaagtaatagaagaattatctgtacaattccaatcccattcaaagaaaagttagtcccccaaaaagatcattatcatcattatggggaagctttgacaatttactcagtcacaacatatgggcttctgttctttttgcagcttctcccaaaggcacaagactagtcttgggctttggtaatgagcaagaatatagtttgactcacacccatcattgaaaaacctatcatcattgatgtaatgcatttctttaccactactcctgaattgttcaatccatatccccattgcaacatcttctagtttgaaaagctgatataccataatgaaaaagatgagagggtgtataagagaaatggctgcaatgacactattaaaagatttaaaataaataggctttgtctccctcgaattacgactttagtagagttttgatccctgaacttttttttgttgcgaaaattcttcctgaattataaaaatcgttgcgaatacccccttctagttacaatttgctcatttcctttaaaaaattgttaatttagcactaacgtaatgttgatctaacccagatcaaaaatctaaaaaaattcatacataaatagcagtctaatgaattatagaaatatgtacatacatttttagagctaatgtttatatgtttaatatcaagaaactagattttaagcaaactgtatacctataacttatagtcacataagtaaattattttaaaaaatgaacaaactgtaactgaagagagatatttgcaacgatttgtata

SEQ ID NO: 78909 - DNA, 4713 bp, Cannabis sativa
ttctttcatattgaattgtacgctcagccatggctggcaacaatgatgctccaccaccttcaaaaatcgaaatcaataaccctttctacctcggtgcccatgataggccgggggatttcatcacacccattagacttaaacttgataactttgatgcttggtctcacgctatttttgttgctctttcctctcgtcgtaaatttggttttcttgatggtacgattatggatgctgtaccacccgcaacaaaggaggattgggtcgtggtccattgtatgctcgtgtcttggctcatgaatacgattgatcctgaggtaaagtctatgctttccaattatgataatgcaaaacgcttgtgggatgatttacatgaacgttttggtgttgtgaatggacctcggattcaacaattgaaatcacaaattaataaatgtgagcaatctaaaaccatgtctgttgcgatttattttggaaaattaaaggttttgtgggatgaacttgcaaacttacaacctttaatcaattgtaagtgtggcaaatgtacttgtgatgttggtaagcaacatgaaaaacgtcgtgaggatgatatgttgcaacaatttttacttggtctgtatccggaatattatgcacagataaggtctaacatacttgctcaagaccctttgccatcattgaacaaagcctatcaacaagtctctcaagaagaacttgttcgtggcattgatcgtgtcaaggacgaaccctcaactgccgtggggtttgctgttcgtgcaggaggaggtcgcggtcgtggttatactgataaaccaccctcggataggcctgtttgtactcattgcaagaagccaggtcatttggcttccaactgttattctttgcaagtatgtactaattgcaaaaaacgaggacatgatgtcaatcgctgttttgaaattgttggttatcctgagggatggaccgcaggtgaacgaggaagcaagccacacacagctggtcaaggccgcggggtggcgcgtgcaaatgcagcagccggcagcaacccttcttcaggaaactcagcatcaaactcctccatatctgctcctccttcgtcttcaaatggtcaagtattcacagcagatcaatggaaagttatcatgggattttttggtaatgctaaaataccggaaaatcgtttgagtggtaagtttgataatacttcttggatcattgatacaggtgcaacccatcatgttactggagaaaaatcatggttatttgacattaaacaattacattgtcctgtgggtttgccaaatggcgatactgtagttgcatctatggtgggatcagtttgtttatcggatacgttcactctaaatcatgttctttatgttcctgacttacgctgcaatttactttccgtttcgcaacttaatgataatttacagtcaattgtcacatttaagtctgatatgtgtttgatacaggaccaaatgaaggcgctgattggaacgggagttaggcgggatggactatactactttagcaaaccggaggtggtgtctgcagttgaaactacatctgatgtggagttatggcataggcgaatgggacatccttccgagaaagtagttaagttacttcctcatgttagtagatctaggagtactttgaataaaggatgtgaagtctgttttcgttctaaacatcacagggacaagtttcatttaagtgataataattgttctcgaatttttgagaaaattcattgtgatttatggggtccttatagacatgagtcatcgtgtggtgctcgttattttttgacaattgtggatgatttttcgagggcagtctggatttatttattgattgataaaatagaagtttttcatatgtttatggcctttgtagctatggttgctcgacaatttggtcaaaatattaagattgtgcaaagtgataatggcactgaatttaaatgcttgcttgattattttcgtgctaatggaatcatttttcaaacctcttgtgttggtaccccacaacaaaacgggagggttgagaggaaacataaacacattttgagtgtgggaagagctttgcgctttcaagccaatttgccaatttccttttggggtgagtgtgttcttgctgcggcacatttgattaaccgtactcctactcctcttcttcatgataaaacaccatttgaaatccttttcaataaatcacccgcctttgatgctattcgtacctttggatgtctttgttttgctcataatcaaaaaacgaagggtgacaagtttgctagtaaaagtaggaaatgtgtgtttgtggggtatccattcgggcaaaagggttggagattgtatgatttggatacaaaagaattttttgtttctcgagatgttaaatttattgaagatgtttttccgtatgattgccccgatgatgtaactattgggtccgatgtggataatgttggtgaaattcatgaggattttgcggattttggtgtttgtggtgaagaatgtgatgttgagatgcatagttatgctcaaagggggttaggtacgagccgtatgggaacactgctgcgtccagttctgtccaacaaccccaacccactgaaaacccatcagcaactggtactagcagcgagcaacatcagccctctactgcctttgacggtcgtgatgacccaaatcaacccgaagaaaatatgggtcgtggatttcgtataaaatatccgtccgttaaacttcgtgatcatgtaactcacactgtttttgctaatagtccatctctcccggcttcggtttctgatcacccttcaggtactccgtatcctctcacacattatataaattgtgataatttttctgtaaattaccgtaagtttgttgcagctgtagtcagtaacaatgatccaaaatcatttaaggaagcgatgaaatatgatggttggagacagtcaatgagggaagaaattcgagcgcttgaaaacaatggcacttggaccttggagccacttcctccaggtaaaagagctcttggtagtcagtgggtttacaggacaaagtttttgtccaacggtgaggttgaaagattgaaatctagattggtagtacttgggaatcatcagcaagcaggtattgattatactgaaacatttgctccagttgctaaaatgactactgttcggacttttttggcaatcgcagcatctaagaactgggaacttcaccagatggatgttcataatgccttcttgcacggtgatcttgatgaagaagtttacatgaagttgcctcccgggtttgagaattctaatcctaatttggtttgtagattgagaaagtctctgtatggcttgaaacaagctcccagatgttggtttgcaaagctagtcacagctttgaaagagtatggctttcttcaatcttattcagattattctttatttacatttactaagacaggcatacaaattaatgtcttagtttatgttgatgatcttattatatccgggaacgattccgctgccttatgcactttcaagtcttatcttagtgattgtttcaaaatgaaggacttgggtcctttgaaatattttctgggaatagaggtagctagaagttctgctggtctgtttttgtgtcaaagaaaatatactctggatattatttctgaagcaggattgttaggagctaagccaagcggatttcctatagagcagaaccataagcttggcttagctagtggagagtcacttaaagatccagaatcatatcgcaggcttgttggtcgattgatatatctagctgttactcgtccggatttggcttattctgttcacatcttatctcagtttatgcaggagcctagaactgagcattgggaggcggccttaagggtcgtccgatatttgaaagggacaccgggacaaggcattcttttgagtgcagagtgtgatttaactctgcagggatggtgtgactcagattgggcggcatgcccggttactcgtcgttctcttacaggttggcttgtgtttcttggtcattctcctgtgtcttggaagacaaagaaacaacatacagtgtcgcggtcatccgctgaggctgaatacaggtctatggccgccatcacttgtgagttaaagtggttaaaaggtttgttgttgagtttaggtgtgaatcatccaaaagcaattaaattgttttgtgatagtcagtcagccttacatattgcgaagaacccggtttttcatgaacgaacgaagcacatagaagttgattgtcattttgttcgggatgcaattaatgagggtttgatttccccatctcatgtctctacatcttctcaattggcggacatttttactaaggcgcttggtaaaatgcagtttgataatttactctccaagttgggcattcatgatcctcatgctccaacttgagggggggtattacgggaatatatgtttgagaattatcttttgagaatattttgattggaatacaatctttggtaaatatgtggcaatgaggtgtagttggtaattatttccttgattctagtgaggtgtaatctttttccttgattctagtgaggtgtaatctttttccttgattctagagaattgagttggatgtaatgtaatatatatatacgtttgcattgtcaataaagagaggcaagtcattcctatcaatttcttca

SEQ ID NO: 78910 - DNA, 2626 bp, Cannabis sativa
aattttgccactttatttaaacaatttatcttttctttcaataattccatattttctaatttcaatcctataaatgtgaaaactatttatttaataatcataattaattatcatataaattcctatttatgttatttattaattagacttgacaatgtctcttaattaacaagtagaccccaaaatttcttttgaaatgtcctagtttaccatagtgatgagcctttagaatatgatctttctttgttatgattgatgtttcccttttgagattctatctgctagtgcttctgcctctgtttttctaaggactattgtgtagacctttccctacttatatttagatccccgtttgagtttttaggtctttccactttaatctccaagtctttggactttagtgctgagattacttcctcaagagtaatctcaattcttccatactttattattttttttacttccctgtaagaattgggtagtgagttgagaataataatattgcttgattctaatcactcaaagcctcattctcccttgagttttccaactcaatatgcaaccttaagaactcatctaggttttgttccagagtctttgaatgactcattttaaaaccaaagattctttcctttggataaatcttgttgatcaaagacttcttttgaaactgttcttccaacttcttccatatttttgctggtgtatcttcattatcaactagtttgattatggaatcagacaagttataaaaattattaaaccagttgctatttcaagcagttcttcttgttgagcatttgttgtatcagctagccattcaactagatatcacttagaactatcagtagtttattttgggcaagtaaggctctaattttcttcctccaaattcgatagacaccaaaaccaacaaatttgtcattttccattttaatggaactcatatttgcatataaagatttaaatcaagaatttgtaaagatattgagtttagaaatatcctaatgttaatcttgtaattatgtgaaatgtagaattgttcgtgatgttctgagttttcttgttccttcattgatttcttccctattttttgttgcaactttgttgcctcaattggctttgataccaatgtaggattgtaccactttatcctacacccaacaaataaactaatcaagttgattaaggacataacaggccatttatcctgagtcaaacacaagttcactcaatcaaaacattgtcattttgacccccaaacaaaatccttagaactctctcgaaccccaaaacacttctcccctgacctaattgaaccaaaccctagcagcgcttcgagtttcttctaaagaaactcgaaggctgctaatatacaagatccagccttgttcccatcccaaatcaaaaccagaactctaaatgcagatacacaaacatataaagaaataaaagcaaagaaaaacaatagagatatagcaccagatttaaagaggttccccaaaatttttgttgggtacttcctcgtttgagcttgcctcaaaattggctcgattccactattagatcttctagatcagcagtttacaagcatggattccaaatcacaggtacaattggtaatcctttaattctgaagtgtttatagaatttttctctctgtgtctttctctctttctattactaacttcttcttcttccttttgtgtatggtactcccttgaattggatctccgagccctaacccaaatctcctccttttctttttcttctgatctgatctatatttttcagttgttatgagcttgtatttatagcttagagagtagttgagagagttgagagttagttacaatagttttaacaaactttacaactaacttttattttcttaataggttattagaggccaaaggccacttataggttttatattcttgtaactgtttttatgctaatctaggcaatacatgtggggatttattttgacactttggttggcaattcacatttaggaacaaaagaaatagttgtttcattcagttcagctcgtatcttactagtatcacagaaatgattaacatccttgcaaacttgctccttgatttccagccaaagctctttgaagaaagtagactcgaaaccatctggacctcatttcttgacattacgaatgctaaaacgggcagatcttatgggtgaaaagcttgatcaactaaacttgctgatcaagattttgtttgttatacctaaaccaatattgcatattaagtctacttcccatgtagcttttgaagtttctcagagaatttttagtgttgtacttgtacaggtaaagacttgtcgaggtgtatgtgtacattgtgtagggtaaattgaaatttatacatatttagtagttcaaagtaatactgagttatcttattttccaaataataataacaataagaaaaatgctcaaaggtattacaagtgcctagcacctgtttcggtgttatagtattgttggtgtaattaagtatcaaatctcatatactttaaaaaaataacttttaaaaaatatcgctaacaaatcatagtacgtcacctatacaaaatattggcaccactcgtaactaatattaat

SEQ ID NO: 78911 - DNA, 2631 bp, Cannabis sativa
tgtctttaaaccttctattttctttcctaggttaatataattcttgtttttttttctttcaatatatatgagtgtatatatgtatctatacaactaaacaacatagttagctacattgcacgagtttgttattatgtctaataatcatatttacaggagttgaccgtttcatttttgcctggactaaggctcggacttctgtcccgggtttaacacataaaagttacggttttctattgcttacatttttctttcataactggtgtgtttgcgttagtttgagggtgccttaacaagtgttgggggctccttgttacttgactgggagtttgctccagtgccccctagaatttcaatgttaagtggaagtgaaggtgggatgcctaactacacatcccgtccttctccgaggccactagcccaaccccttgggtttgctttaatcttatcgaatgatgtttcattcaatgtgatattctcaagatttaattagatgttgtgagttatctttgatagactggtactttttcatatgctaaatactgatgtgaggtgagtgtttgcaaccataatacagcttgtaaatataagatcatcttagaaacatacgagaagcagttttgaaggtggtacaaaaaaaaaaatgctaattgcaccttttgatggtgcttaacttgaatcctggctccaacataatggtttttcagctgtatgtggctgagtctttgcaaccatagtagctagtaaaaacaattttttttagaggtatgggttccttgggaaaatggcctcttttttcaagtctttggcctagttttgataaatctttgcaaaatgacctctcacactctaaacaagagaagcagttttgaaagtggtacggcagaaaagtatgataattgcaccttttgatggtgcttaacttttaaatcctggctccagcataatgttgtttcagatgtatgggggctgaggttatttcgataagaaaaaaattataactaagtagtatcagatcatattcattaatgtatttatgaaataatatgtaattcttcttctttagttttaacaaatattttcttttctttcccttgtgcttttctgtttcattctcatgtccctttctgttctttttccactgtcctgcctagttgtgcgtccaaaatgatttatttttgggtctgccagtttcttgttttctctatctacattttcttccttgcttagtttgctttttagttcagtacttccacttgtttggaaattgtaatattttaaatttattcttctgcagattaagttttctgtttgaatttaaaatttatttttaataatttgattaaggaatttctggtgtcacggtctgttttgcaggaatctttgttgctggaatcctaagtagtaataaagtaatcatgaagaatccttgtagcaagtctcagatataatgttttacttttgtcgatgtatgtgaatttattcatactgcctctgggaaaatcacgttttccttgcgctcatttatgttggagctttgttttatttcgatatctttgtatctgctgcccgttctggacatggtttttttttaatcaattgaagttgtagtttcaaaatgggtcctatggctgttaccaaaggttgaaaagagtatgtatcacttgattgggttttgaggacaaattacatttcatatggaagaagctttctgggtttaccttttactaataatcaaggggtttggattcgaacccttgcactttcctctatcttaccccttcctttccactgagtttgcctcaatggaggcttaagctttccggtcaggaaagaacaattgtgtaagttttggcgatatgaacacagatgcatatgctgtttgttgttgggtgatgtctatggataatttacgcgtgtttgtgattttttgacttccaatttttaatcaaattaggaaataaattgtgctttgtttatgaaaatttcaaatcatattaaattttttatttgtattttgtttaatagtaattgagtaataagatgatattaaattttaactgtggtttttttatatatataattattttttaaaaacatgaaagtgtcctaaatcaaaagttgtgggcctggcccaaactttgaattttgatggtgtcttcgtggttgatgccaatggggtttcaggtggtattgcaatgctttggaaaaatgagaattcaggctctttgttgggtttttctaagaaacacatagacttgcaagtctctttatcacctacttctcaaacatggcgtctcactggtttttatggagagcccaacagaaatagaagaagcgattcatggacactctttcgaagtctaaaggatcggtcttcacttcctttggtgtgttattggagacattaacaacattgttcgtcaagaagataagaggggacggcgtccttatcctcaatggttgttaaccagttttcagcaaacattgctccattgtggattagatgatctcgagttgcaaggtcatcaatacacttgggaaataggaagagcgactaatgcgtggattgaggtacgtcttgatagagcccttgtgtctacttcttggaatcaattatttcaatcggct

SEQ ID NO: 78912 - DNA, 4821 bp, Cannabis sativa
tataataacctcaattattatcctacttttaaatagaaattattcttttttgaggaaaacaaaaatatagtttcattttactattttatttttattttaatattaagaaagggagatttgaacttggaagttcttttttaggaggagaagtttgaaattattatattatacctatgataactaattttaactcttatttaaataagatatatatatattttgaaatagtattagttacccattaatcttttctctctttctaaaatgagctcttaatctaccattagtgtaatgtgatgatttgatgataattaatttaggtattatatatatgtatggacaattagagtttttttttttttattattatctcatctctagaaaacataattagagtttttttattactttttttcttttaaaaaaaagcatggacaattagcttttcttttctttcactaaatatataatcatttcgttgaacatgataataatgatccaagtgaccgttcttattctatgctcttttcatgaacacattattttatttatttattattttttttagaagacatgaacacattatttattttttgcagaaaaaaaaaagaaaaacacacacaccaaattcaaaccctatccttttaacaaaaaaaatatatttaattaattaatagttccaatcctcaccgaccccatatgtcatacactcatacttattatagctaaaaaaaacattatagagccagccagtttggctgccctaatcacatgctcaactgtataatgacaataatacccccattgtgagcaaagagctaattatgggtaattatgtaatttcgtaaacaattaagttgattccacacaaaagtatggagcgctccgatcaaaatgccaactggacggtgaccgtagtacagagaaaaaaggttaattaaagaaaattaataaaaaaaaaattcattctatttctctctctctctatctcttttctctccgaaaaatttcagaccaaaacagattgaaaagaaaaaagcggaaagaagcttcaaaatctcataatccatagggatcgcagctctaatcgtaaggttttatttatttatttattgattttaatttaatttgcttttgctggttttttattaaccaaactattatatgtagattttttagataatatttgtccgaatttcgaatatcggtgtttagagtcatttattgctgtttggaaattatgagctgattagagctcgaaattagatcaattcttatgtatgagggtttttgctcttagtacggatgaatgattaattttctattttggagcaatgaatcgagttttatatgtgtgtgtgtgttttgtgtttttaatttggacttttttttgtaagtttaaatgtggttatgttgatttgttttttgattctttgtgtaaatgtggggtttttgtttggtggatgatgattgaaagaatgtacattgatgaaataggagagaacaatttgagttgattggaaggaaggataggagattttgtaaaggatggcttgcagaggatgcttggaatgtctgttgaagctttttaacttcttgatgaccgtttcgggtttggctatggtgggttatggaatctacttgctagttgagtacaaaaggtctactgatgagtcccaagtgctatcacctgttggaggtgatgatagtttgatacaacttggcagaccattgctggctgtgtcactctctgctaacattttcgataacttgcccaaagcttggtatggctgctgacccttgtccttaataaatacaagtttgtttgaaatttctcaacatttttgcttgctagctactttgtttcatgggaaaaatagattttcctgatttttgccaataatgttcaattcaagtttccttaatgtttaccatcatgcttaggggcaatgagtttttttcttgttgcttcaaattcattctctattaagatacaagcattttcatgtccacatgctaggtttcttgttgtatttcttgaatgatctccttgtactagaaaaacttcgtacttttttaaaattatcatttttatatgttgtgaatatttatttgtagtgtaaattgctttatagcaaggtcatgttagctaagtatgattgaattaagaaatatacaagaaaaaactaggaagaatgaataagttgatcattaggcactgataaattatgagtaaacaagtttaatacaacgttgtacatcatacatggagatgtggattagataagattaattatctcaggttttccaatcagattaagttatcccatactaggtgaattaagtaggttgtttggattaattttttcaatatcctctccatttcataatacaatcacatgataaaaattattgaatcctatccaattcagagctactttctaaacacaacccaagtcaagtgtactgtattttactttgataggacatggattgttattagtgacattttttttagaattaacattattattaatgacattttcgtcatcaaagattcgaagtcaccaagataaaacccatctttgaaaattgtgttgtggtgttggaatgattatccttttgtcccctcttgattgtgcaatgcatgatgatggtagacgcctttttatattagtggattaagcaaacaaaaacaaagttctcttctgagagttgtagagtttgtaagaatatgattttagtgtctcattagcaacccagtgacgatacactgtcaggctggcttcatttttaggtgaatattcctttctgttaagtcatgcaatatggttagtgttcttgtttttttgcagtaaactctaagatagctattaaagaaaaattagcctcctcgtaaaggaaaaaaaaattagctttagttgtgaaagcaacgtaattctttgcaaataccagtgccattttcccacattgatcgttttactttttgattatttttctttctgtgaagaaaatctttatttattgtatttatctatcttcgtgtctttagcatagttttactgttgaattgatatttctgttttcaatgccatatttgagcttcttgatgatttggcatgtcatgataatcaggttcatttacttatttattggaattggggcaattctcttcgtcatctcgtgttttggatgtgttgcagctgttactcggaatggctgctgcttgagttgtgtatcctaataattaagtgttcgttatatctaatatctaaatatgaatgtcatgctacattatttaaatgactagcatttttcttgttaaaaagaaattaataactatgtcatgctcgtaccaatatcatttactgtgtgtgacccactactttttccatttatagttgataagtggtttccttaagttgatatagtattcagtgttggtggttctcttaatcttggcggagcttggatgtgcagcctttattttctttgacaaaagctgggaagaagtaagtattgctttcttgttttcaaatcaaagactttcaaactggatatagcttggatatctgatcaatgacataagttgcttttaggaaatcccaactgacaaaactggagactttgacaaaatatatgcttttctgaaagagaactggaacattgccagatgggttgctcttggggttgttgtttttgaggtaagcgtgaactgtttcctcttgttttgtggataatttacatgccatgcataccatctacatggaattatcggtgctgactatgtctgtttgtctctctttttcctcttcacacttttaactgtgagattaataaactataactcgaacaatattcataattcatctattgctgtccgcatacttattgtaaatttaatcttcatgaaaatttcatgttttactagcttttctagagacaactaactgaattttactcctttgtggagttttgattgaatagtctcatcaccaacaagggcatagctcatgttaaattttcatatgaatagtaattcttttttttttttttttatggcgtgggaaaaaagtaatctaagtttatttctttaaactaaagaggaaaaaaattcatgcaaacaagttagatggggaaagtattttgtggtatggttggaattatgatgactcacatcacatgtattatgatgtactagtacctctacatctgttaatatttgtatgattatttatttatttgtaaagggattctttgattttctagaattctgatttttctatttctgagccaggctatggtaattcttggataaacatttaaatggttgttttcttaaacttcaggctgtgcttttcttgttagctcttattgtgagggcggcaaacaggccagttgagtatgacagtgacgacgagatcattgccccaaggcaacaaatccgacaaccgttgatcggcagaccaccagttccagtgacaggggtacctgtttctggtaaccttgatcagcgtccaagcagaaatgatgcttggagtactcgcatgagggaaaaggtgatatatgttaatctatatctttttcggtttgtcttaagaaatctgaagtatttgcattatcttttagctgtcatgctcaagagtagttatttttgtagcagcatacctattacttacagaatctttatttattttactttgttcgaaagagcagttggaatttggtctgccaaaatttaattgtgttgctatgatttttttttttaattatatatttgtcaattttaagctcatatggttttagttatcgctgcctata

SEQ ID NO: 78913 - DNA, 5086 bp, Cannabis sativa
aaaaaaaaaaaaaaaatgtaaaaggatggtgtagctaagagtgctacacttgctagccaaccagctggtttatgtcaagggaaccctctcgagttgttctttcaaaaaagaaaaaattatttgacaaccttcttttcgtacatcataaacaaaagtgcattgcacattttttaataccactaacttccaaaatacaaatcactttttttttgtggttgaaaataatcgtttcatagatggagataattagatcattacctaaaatattttttatataaattttttataattaactcatttcaattatcatttcatttgcacttaattcttaaagttcaaattttagtggtaaaaaaaccctccaaactattcaactattaacaaatttaagatttcatctatttttcacaataaattactaacataaactacttacgtacattcttatacatgtgacacatttatattggtacacttactattattatttaaaaattataaacaaaaaaattcaaaatttataatatcttttattttataattttatttaattttaaaataataatattaggtgtatcagtataaatgtgttatgtgtataagagtgtatataagcaatctatggtgaaagttaacgggatgatactttaaatttactaacacttcaacagtttagagaattttactaccaaaatttgaacttaaaagttaagtacaaaatttatataaaaaagacagttgaaagggtttagccaccaaaaattcttttgatatttatcacacttcaatcataggaggtaggttgttggaaacactaaccatatataaatacaaggtcgagcaaacctaacattctcatcccaaaaaaacacaaacaaaaatgcattgcataacccttaaacaccaaatttctccattactccctaatatttgcagtactactaattttggtgtattttttagaccaaaattatatactaattataatattattaatggtggtacaaaatcaagattatcaagtgcatgctaccccatccaatgtgctgtggtcaatagttctaatgcaattattgatcgacgatcagccaactttgagccctccatttggtctttcgattatattcaatctcttacaagtcaatataaggtaattaattaatatttcttattatttaatattattgttttttaaaattaaattaagttttacaaaaatattattttgtatatcaaataatattatctctaaaaaatgtttttaatcacaataagttgtaacaaaaaaaaattataagtcaattaagtttaattagttatagaaattataatattttgtggctaaatacatttttagttataatgttgtgaatataactaaattagtaattatttgtatttaataatattatcttttttaaagtgacatgtagtatgaaaaatctatattttcacaagttttttttttttttcttttgatgtggcataaatcaaaattttcttgaactccatgatgctttagttatttatgtgttaaatttaattatttatttatttatatatgcagggagaaccttatacaagtcgagtgaaaaaacttgagagagatgtgaaaaaaatattagttgagatggaaaactctttagctcaacttgaactcattgatacattgcaaagacttggaatatcttaccgttttgagaatgaaataaattctattttgaacaaaaaatatctcaatattaataatcctaattataatttatatgctattgctcttcaatttaggcttctacgtcaacatggctatgcagtacctcaaggtatatatatacttattacatacattatataaaccaaatacatgatattatatatatatattttttagaatctttatttaagaatattcaatataaaaaattgatggaaagaaaaaagaaaaaattaaagaataaaaaaagaaataattgtttcaaaaaaaaaaataaagttattaataaatttgcaaaataaaaatttgataatgtaaaataaaataaaaatatttatttattatttttaaattttttataatattaaaattattaaattgatttaagccaataaaattatatcatgagtacacaatggcagttttagttgatatttaacagccaaatttaataagtgtattagatttgtaaacagaataatactaaagagaattttgtcatcaaaaacaaaaattaagagattaagtctataacaatcaaaacatgcgagagtttggctgtaaatttttctattataataatatatatgtatataaataataggtattaattttttttattattattattgtgtacatttgatatttgatacattaatttggtattttattaatttctttctcttttttgtgtactaatacctctatttagtttaattagtatataattgacaaaaagaaaaaaaaaatgcaatgtacttcaaataatgaattggaattttcaaaagatttgggaattaatcattcatagcgcttattgagacttatacattttgtctaaaataattaaaaaattatttgattaatctaactaattaaccaaattattccaagccgagaattaaacttttataaaataattaataattgctcgatcgtgtgttctttgcagaaatttttaatcagttgaaggacgagatagaaaaaatcaaagaaaacataaatggtaatgatatcatgggaatattagccttatacgaagcttctttttatgagaaaaaagacgaaagtattttaaaggaagctagaattttcacaactaaatgtctcaaaaactacactataatgatatcagagcaaaaaaagttaatgattgataatgattatgattatgatatcgaagtagtgaatcatgccttagagctcccacttcatcggaggaccacaagaacagaagcaaagtggttcattgacgcatatgcgaaaaaacaagacatgaatcctatgttgcttgagttagccaaactcgatttcaacatagtacaatcaacacatcatgaagatctaaaacatatattcaggtgatgatgatgatattataagttttttttaattaaatttatttatactgattaaataatttattatatatgtaaaaatatataattaattaggtggtggagacatactaaacttggagagaaattgaattttgcaagagatcgattgatggaatgtttcttatggaatattggaataagatttgagtcaaaattcagctattttagaacaaaaactgccaaattatttgagctagtaacatttatagatgatatatatgatgtttatggaacattggatgaattagagcttttcaccaaagctgttgagaggttagtatatatatatatataaataattttgttaataaaatattaaatataaatgattatatttacatacacataactatgtaatataataagtgtgtacaatttgagcttgtataattttaattattgggacatacatgcagatgggatgtgaaaatgataaatgagttaccagaatacatgaagatgccttatcttgttttacacaataccataaatgatatggtctttgaggtgttaagagaccaaggaatctccatcaacattcaataccttaagaaaacggtaccgtttattatttatttcttattattataaatgacacatagaaaaacattttaattaggtaccatcctataattaatctagctataatgtatgagtgttgttgttcagcaccagacatgctggatcgatcgactcctcaataatgaggtgctcgatactcatatctttagtgtgatagttagtaatctcatgattcgtaaggagaaatattaagtaagttgcatgtgcaattaattccacattgtttgggaaatgtcaagtgtgatgattctgagattgtgtagatatggaactacacagttgaagatgacttaaatatattgattggtgttacctatatcagcaaggtacatgcatcttgttttctgaccttctgataagtttttctaaaaaatatacgaatgaagacaaaacacatcgctagaaatacttcaagcggggatgttacatttagtgtcgaccaacaacactcatacaaaatattactaaattataataataacgatagaacaacttcaaataatacgtactataattatattaattaaatatatatgtactaaaaaattataatactaattatggatcgaatctaattacatataatgatattcattgtgtagtgggtcgatatgtgtaaaagtttcttgcaagaggcaaaatggtactatagtggatacacaccaacaatggaagaatatattgaaaatggttggatttcagtaggagcaccagttattcttgtgcatgcttatttttttcacgcaaataataatcgtacaattacaaatactaaagagattttcgaatgcttggaatatggttattatcctgccattattcgtcacagtgccataatattacgatttacaaatgacctagcaacatcatcggtaagctaataataaccaactacgcatatgaatttatattttatttagagcatatataatatattattactttaatattttattacaatatttatacttttttgcaccttgtattttacatattattacatgtttgaactcgtatgtaattttaattaattaggccggtctctctagattcttaaacttctttttaaagcgctaatagtaaattttttaaaatttatttgtattcaaatatgttaaccgaaattggatcaaataatcctttttcaactacaagagttatgaaaagagtaaatttttgaaaattatggaacctatttttcaatgatcgatgcaaaaacacaatccttctttaaacaaacaactaagtaattcatttttttatgtattgtatgtataggaggaattgaaaagaggtgatgctccgacatcaattcaatgttacatgcaagaaaaaaatgtatctgaagaagaagctcgtgaacatgttaagtttttaataaatgaagcat

SEQ ID NO: 78914 - DNA, 10040 bp, Cannabis sativa
aaagagtgaaaactaaccgaaaatacgacccgaaacttagactaattttagcctaacaaaaatagagtggaaaaaattttcgttttattatttggtgaaataattattaaagaccattcgaattaaagatttgaaaaaatttaataatttttttttgtatgtatttcaaattttattttattctagtgtaaaactttgcttgatggaatgatgtgttagttatgggtgacacagctgccacgaacaattttgaattttgtggctgaacagattaagaatccaaccaagcaactcaggctcaaacaaaaggaagctgtattagatcaaaaactgacttacaatctctcctttatatgtcaccaaaaagcttttatcttttacatgagattgtcccattcttcaatttttatagatcgtggctacccaaaccagattgccttggctactgaccgaaaatgttaaaggaatgtcctcaaccaaaggtaaaatgagatattgcaaatcttatcagtgtaaaatgagcgttgaaacggtccagaggaaaagaaatttgtttctcacatattccatcagttccctaaaatcttcatatcttaagccatggttagtatgacataagtaaatccaggcatgcatggtcgtatatacagtatatgcatgagaagctctcgaatcataaagataagttcatgaactctgtaatctacaatagacccaggagattatgaacgtccaagttcaatatggtctcttatacattcattatcattactatttatgaatataatataattgcacttatatccattacttaatttaaccttttgctatcctcaacatattcaatttagtttttttctagatgaaatcatccgcagtttccgttagtgttatttcatcgcatatacaaaacgttaaaaattcacatagcaccaaccaaaatctgctttgaaattgtgataaaataatcctattgtattaaacaaactagaaattaagaaaaataaatattagaaatttagccgagggttcaagatgttccagaaacagaaattccgggcatcctacgattcggctcatgaatctacgaaggtttaatattttatgtgttagagaggcctcaattaaagagtccatacccctccgctgggaccttcgctgcctttaaaattttaaaatatatatttatgttcgaaaatataaatcaagaaaattaaaccaaaaatcatacgaaataagtatgagattcggcgatctggtttcgatagtatgtccgaaggcaaacttggtaaaaaacgcactgatttttcgcgttctctccataggtccctcgttaaataaaagtaaccgaaaaagaaaagatgatagaattgatgctcagtgaatacgaaccgaaatacagattcatcttggcaaagcaatctacgatttcaacaataatcatcattgcatctaaaattatttatagtaaaacaataagagaagacggctacagaaaagaaaccctagaaccatattgtatcagctatgctaatactgacggaagcttaatgttgataatagtgaagagtcaatcgcgattatatatagtaaaagcgtaagaattccgattgaatcgtagccgttggatgatcaaacctttttatgggcttatggactttatttgtactgggctggcccataatgaagaggtgaatagggtagagacttttttgaagaaattagattgtataccacttacttctatttttatattctttaagatatacttatttttataatataattatatgttaaaaaagtagatatattttaataaaatataatatgaaggtatttttgattaataaataaaaaaaatatatatatttttcaacttatcccgtaagtttcatactggatactgtattaagttttcactgttgttctacaattattttttagttgttttattattgtgtttaattattctgttttgttattttataaaaaaaaaaaaaaatttgtaaaataccgtctaaaagtaaaattgtaaatttttatttaaaattcattatttttgtaaaaatcgcatagaagctatttaagaagaaatgggccaagtattggaggctgataggacgatcctggttagtgacacaacgtgtcctccaactaataaattaagatatttattattattattattaattattaatattattattttttgatgtgatactgaaattccaatccccttcccatccatactccgaacacaaaattacccaacccttcttttcccttcaatcaatcagatctaaccaaattgtaatctcgtttacactctcaaatcctaattgcagtcggtaaggtttatctccattcgcaagcacacgagtcttcggtttttctaagatttgtagcgtcagggctcaactgtgtgtgtatttatatactgcttgagagcatcgttgcatcgttgtggtaagagatctttttcgggggtaaggatgatgtggagttcgatagcaaatttgaaggagaacctgaataagatcgcacaggatgtgcatgacgatgaagatgatgacgaactcgatatcaatggtttcaatggaagcgaagcgtcgccggtctttgatcggagaaattcacatagttttgcgcattcaaagtcagcttctcgaccgtcgctcgcgaacgggatcgattcccctactgctagtcctgaggtaagtcagtggctctttcgataatcttgtttgagacctttgtgtaattttcaaatttgagaaaaactaatgttgtattcgaatgtgtgatttggttgtctttgttttaggattttttatgttttatttggaaataatttcttaatccttgagtttcttggcatgagtttgatattccgaattcaaacttcgttttgcttaaacactttcgatagatttttgcgatgtggatcctgtagttggggataacgtggctttgaggttactaaatgctgagtgtaattgtgatctgcggtttatgtatatacatctactggttaaatttagagagacgttgatgatgctttctatcatcatgtagattttctcaaacaaacatattgagcatatctccatcctacattacttttttttttcttttttgaaagatcctacattacatttttaaaaaggaaaaacggaagaagaagaaagaatgtgcgaatgacaggaaagaacttgttatctaagagctcttatgctgcacttctatgaattttatgtttatttagtttaattatgtctgtattgtgttgtactagtcagaaataatacgttacatttcctacttataatgctttgcttcagttcttattagagttacaagctttatctgtaacatgtcttgaagaactttagatacttttatacttaatatgaatgcatgctctatttataaaacttgtaaaataataataatactagtaataataataataaaagaattgatgactatgaactgagaggattgcaaatgagggtttctgtttattacgccttttcattttctttttacatgcatctgctttgaattactttttccgtgtttttcttttaaattttttctcctgtgtttctttcttttgggtaaagattgaccattacaaatcagaaattaagaggcttcaggaatccgaagcagaaattaaagcactatcaataaattacgcagctttgttgaaggaaaaagaggtacatttgagatgtaatggtggttcattagctgtttggtgctgcttggcattggtttgacaatccttttgcgtcttacaggatcaaatatccagattgaataaagaaaatggatcattgaaacataattttgaatcaactactgctgctttaaatgtgtctagaaatgaaagtcgcaaggtctcaacaaatggagcgaattttttgaaggtagttctctgctttggcttttttatttccttcatagaagcataaaaagtgaattattatgattgaggaggtagtgtctaagctgtcttgaaaaaaaaattgaggtagtgtgcatgcgaacatggtacttttgcaggagaattcacccaatcggcaacataaattcacaagtcaagcgaaaaacagatattctggaaatcaagtgcataatggtgttgtctctaaacaggatggagtgaacaatggatttacaaatgaggttcgttttgatgtcatttcgagtaaagtgggatcaaaatattcaaatttgaagtttcagactgatttcttctgctgtcttaacgcttaacaaaaacagctgttctagctgttcaaaatatcttgactgcctctgtcttaggttttctgctattacttttattttgttttttttaatgatgaataaacttgacaacagatgtatgaatgcctctaggagtttgcagatttgctagaagagaataataggtcgtcagctgctgcagcgcaggccactgctgagattagacaattgcaattggaacttgaaaaggaacgtaataatcattctgatttacaactgaaattagaaggtacagatttaaactttcagtatacacgattggcaaatatataatagtgtcatctgatgtcttgtgttttacttttcccattaatttcagaggaaagaaagctgaacgaatctttccagaaggagatcaaattgctaaaaatggaaaatgacaaggtgagtttcaatggtacacaggatagttgaatgtctaagttattccactctatttttgtccttttttaacgcctaagttcatccagtccatttttgttctctcaacatgccttttctgtggtgaaatgttttattctttaagcagtcctccattgagtcaaacaaagtacaagatgagctgaatgagaaaatatccatggtaaaaagactgcaaatggagctgaatagaaaagaagctgaaggtgctgatgacatcgtggagaatttaaaaaaatctattacaaccctagaaaaggaaaatgctacccttaaggtttgttatattatctttcattaattgagtatagaaaaagttcgtatcactgctttgactgccctcggcttgagaatgaagtacaatattatttcattttgtagatggagaagaatgaacttaaggccactgtggaaatgagcaggaagccaattgacgaaaaattactggttagtaattggtggacgtggtaacaattttgacattatatctcctcagttttcttcaaatgattgtatgctctatgctgtgataatacttactaataaaaacttctacttctcttattacaaacaacatgtgatcatgtaaacgtcaaccactaacctagtagtctttcattggcagaaggtagagccatcagcaagttttactgggaaggaagaaatggagctatctcttcaaaaattggatggagagatgaaggaagcacgtcgcgaaagggataaagccatacaagagttggcacgtcttaaacagcatttgttagaaaaggttatctgtctgttgtccataataatccctttcctttttttgaacatgtgcaatgattctcttataattgcagtttaatttacgtgtttaacctgcaacttaaattagggccagtgcctcttcctaatgctgaatgtgaataattatatataaaaaatagtatctctcagtagtgacagtgatttttgttttttgttaaataggaatatgaggaatctgaaaaaatggatgaggacagcaaaattattgaagaactacgagatactaatgaaaaccagagggcacatatcttatatttagagaaagcactgaagcaggccatggcaaatcacgaggaagtcaaggtgatcaccaacaatgaaattcataagtcaaaggaacttattgatgaccttaataagaaacttacaaactgtatgagcaccatagaagccaaaaatgttgaacttataaatcttcaaactgctcttggccaatattatgctgaaattgaagctaaggtaaacaaatgataatcttgtttcttttctctcattgagtttgtaaatatgctgttcccgcattttgttactgtgcagcgagcagctttggatattaatatgataattttttaactaggaacatctagaaggagatttggctcatgctaaagaagaagtggctaagctctctgaactgctgaaagtaataataaacttatccttgctctgttgtatatgatttttttttgttcgagtatcatatctattctcatccatttggagctgcattgcatttatttgttggtgccgcaataaaagtgttgctgcataaaatctgattccaactttgtaaatccacgtttccttcctttgtttctgccaattaagatttccttctattctcagaatgcagatattcaagctgaggtgtcaaagcgggaaaatgatgaaattttgtctaagcttttgcaagctgaaaggaccctaacagattggaagggcagagtaaataaactggaggaagacaatgcaaaattacggcgtgctcttgagcagagcatgaccaggcttaatagaatgtcagtggattcagatttccttgttgacaggttggaatttccttacatattacttttgctggaaaccaaaatgattagctcttgctatctaaggctaaaaagcctcttgccaatccgtccaaaatgactttggatatctgaattacttatttctttatttcatgctgctatgctgcttccttaactgccgttattttttgcagacgcattgtgatcaaattactcgttacttacttccaaagaaactacagtaaggaggtatggaaatatttaatggatagtttctttaaattgcagagcattacgaaatagtttctttaatggagaagggccctcagaattaatacctccaatgtgctgatgatttaggaaatattgatagttgcatctagttttccttttataattagtgaattctctacaattttttccacagccagccaggctaatggatttttattatgtatgtgggtctttaggttttggatcttatggttcgaatgctgggtttcactgatgaagataaacaaagaataggtgttgctcaacaaggtggaggaaaaggtgtagttcgaggagttttgggtttccccggccgtctggttggtggcatcttggggggaagttctggccaagtacccactaatgcagcaactgataaccaggtaatgagaaggacaatctctggtttatagggaagtgtcttttgattagttgtgcaataagaaacttgttgcggtttagttcttgggtacatagtactctactaagctgccacatttttcttggaatgggcaaaattaacagctttgtaatgaagatgtttttcatttatttgacactaaaatgtttattagctttctaccagggtgccagcactacaaaaatctgtctacttcatagatatgtgttggcatttattatttcatcaattactaacttaatgctgacaatcagtgtcaatgttgtctcatatatctccatttctttcagtcctttgcagatttgtgggttgattttcttcttaaggaaagtgaagaaagagagagaagggaggccatggatgctgctgcttcttctgcacaggacagggaagagttacatagaggtgcaaacatggcaaatgtttcaccaaccaagcctgagcctataacaaacgtcacttctactggatctggtttgtcgaggacaaatttattcccaagccaaaacagtacaagcccttttccctaccgaggtaatagtggtaactctgaacattctgattctgagttctcaacagtgcctctctcatcctcggatagcaattttcaaagcaacaggctgctcaacagatattgaatatgaaaatatgttcgcatattgtaattaagaggtatagattaatatttgtttgacattaatctttgttcattcaattctttcttcatacgaatgagtttgatcagttgcctggtatttttgtttgaatggatacggttattttgtttgagtggaggcctgatatttctttcccatttaaattgggggagagttatctgcattttggaactgctcaagaaatcatttacacccacatgaatatatgcttagaccttagtgttgtgctgcttcaatttatttatgtatttattaattacccaaggggacaaagtggatgagtaaatatttttgcctcgattgttttcatttcagtctttcctcaataatcgttcaccaaatctttgccatatttgaatgaattaagctcgcgatggatggttacggtaatttgctatcaaaaagccttgaaatttttattatcaattaatttataaccgactatcaagcaaacaaaatttctttcaaaaaaaagaaaccatacaaaacaagagaaaaacattgttttattgttcaaattcaatgaaagcctcgccaaaacttatttctttgaattctccctcgaaataaagcaaacaaaaattcaaggggcctctaaaatacagtctactgccagcaaaagcttacaaataaggagaaagcattgaatacaatagagcttacaaaatgaaagaagcttgaacaccataactgttcaaaatatttttagtgacaacccatgtacaagcgaccattaatatccagttaataaactttgtattggatacaaatacggttaaggtgcttgttttctaaaaactaaggtacaaaatgcatataaataacttctacaacttgaaagggaagctgaaaccacaatcaccaaaaaccaaaccaagccaaaaagaaaggggtaggcatccattaattgtcgtcgcgcagattgagtaagaagagaccgaagaaatgatgagagaaaatgacttggcatcatcacaagctacaaaaaccatgaggttaccaaaatgtcaggcatcctgggtagcctccctaagactaaacagagcctctctaaacaaacttcttcagaggtcctttgggaatcttactcaaaaccttagcatccaaaactacatactgctttttcaactcaaatgttgccttctctgccaacgggtcaatcttgtcttcgtacttttcataaagcacaggcaaagtgtgcagcaaaatcacagctgttttcaaacaatagaaaaaataagaaaagataaaaatttagcaacactaaacgaagtgtatcttaattgagtttctgatcgtacctatgtagaacaaggtcaagaaattgcaccagctacccacaattgaaagaacccaaaatccagcgatgatctgccattaaagaagttggatatttcaatagctactccaaaacatgtaggccggatgtgttgaacacattaaagcaacattaacttaaaaatagatatttcaatctcacagaaacttgatggaaaataacaaaccatgagaaactttttcaagtccttcccagatgcaatatcacgtaagaccgcaaaaccccgattgatttcaatagtaagggcagaaacaacctgaagaaatggatcttccggaatctgtacttgtgggatgcgaggtggactcctgtaatatcataggagtttgcaattaagaaaaggaggaagtgggagagagagagagctgaagataatggtcgcttgaaggaaaataaaagggcagacaaaaattcaacataaaagctatcatacttgttgataaaggtatgtgcctttgaccacaaaaacaagagaccaagtgcagcaatcaaaatgtgacaaacaagagtaagtagatggtattcgagcaattcaaagaagatccaagctgctgtgacacttccaagaaagcttgctgaaatcttcttgtttctccacaatagcacatcggcagctgcaccaaccaacatattaagacaacaataacattaacatttggctgaaagttgtgatataaaaatgaaacaggtaatcttccagaaattgagagaatagctctctggatagtttacatggccaactatagacttac

SEQ ID NO: 78915 - DNA, 1427 bp, Cannabis sativa
aaaactaacataaaatttagtatacgtgcctcgcattgctagtatatatatatatatgtcgataacacaaatagtgtaagaaagaatataatatttattatagaaagaatgcactcaccttatcaaattacaaaacatcaacaattatcaaataatcaaataatatatatttatatacatatacattcatcatattaagtaagaagtactgcagaaatatccatacagttatcagccaacttatgaatagtgttaactaaattagtatcaagaggcaactcttcaccagcctcagagacagtatcatcacaagtccctatacctgtaataacaccacttagaaggctattcaacaatccaatatcatgggatttaatagcctgcaatgcttgtttcaggtccatacgagcggtgctgtacatgtccacgcataatcttaggcaatctgctgttgttgaacttgttgagtgctttagggtggctttcatcactatattggcttttcccaataacgtaatgaaggatttgatctctgtttggagagccaaaacagggtccacgtgacccttcacgtggggtaggattgcctcaacgcatatcttggggtctgcagtgacactacatattttatttatattttctaagaggttgaattcgtcgtttgaagtgggatttgatcttcttttggggtgtgttgaatggacgtatccactattatgattattgctttgtgattcatatggttgtggggttggtgatggtgatggcgatggcgatgatgtcacgtggcattggactagtggtgatgagaagagtaatactagagatgcggcgattaagaggattatgctatggttgaacttgaactcctccattattattgtctcttttctaatcaagtgtggaaatgtttagaagaaaagagacaataaaaagagttaataatagagacaaacaattatttatgtttatggttatgagagatttaggaataaaaattaaggagatatctttatatggcaacgggagtgcatcataatagggttatatatgctataaaatattgtatcccgaaatagtataactaaatatgtataacaaatctttggtgtagaataaattagaataatttggttaatatgtctatatatgattgaacaagaaacactttaaaaaaaatgattaaacaagaaacttatgcctcaaatatcgtaaaacaagctatttcattgcaaaaatgtgcattgatctaacaaatgaatattctcacaaggtaaccaattatcaaattacaccataacaaatatatatatatatatatatttatatatatatataagattttggaatatatatatatatatatactagcaaaaattacgtgcgaggcacgtatactaaatcttatgctaatttttttctatgtt

SEQ ID NO: 78916 - DNA, 7821 bp, Cannabis sativa
gtaaaataatttccaacagaagatcccttgcaaccttccaaatgaagaacttggacctttcatggaccggagcgttccaaatctgagtccacaatatatcaggagcattataagcccctttgaccgagaagatccctgattcattacttatccaaatcaaatggtcctgttcctcccaaggcatttttatcacttcccccaatcggccagtcaaggtcgggttgaaccaccgatcgatcgcatcagcataaaaatttcccgaatcatcaagaagttcactgagagaagaagctttagggaattgacatcttggagtaaaggcagcacaataggaatcccaatcaagccaagggatccaaggggcagaccaaatatatttttttatatttaatatgaaaagaaaaaatgactttttcatttttacacttcaaaacaggtttttttatatttttacggaattctacatagaaattcctattgcaactagcgctgctacttaaattgcaacaaaaatcgtatggaaacccctattgaaactatcgctgcaaccactttaaaaatccaaatcgtaaatttgaaaaaaagttaaaaaaatagtatatggagtaattctccaaagaaaaattacaaagaaaacttaatttaacaaaatttttcatatcaatcttgaaaaataatttttttttaagtccacaatttattttcctacttttttttttctttcctaacagccttaatcaaattaccaagcaggcaaacaatgtgttaaaagaaagtaagtaattttattttgacattttctagttggttgcgggccatacatattcaaaaggaatgcgtaacaattccgttaaacttaagacaaataagagtttaatgatttgaaatttgaaatcaaaaaattaaaaagaattatcaaacacacccaaactcataattatatagctaatatatgtatgccgcgtgtacacataggatcttagaatccacgcgtcgttcattgagtggtcagtggaacaacaatgttagacacgcactgacagagaattatgtgtaataaagtaacaggagattacggaagggcgtaaggcgtaaatatgtgttgcggtaggggtagtagtaactcacataaaaaaattaaaatagaattcgttgtaaatttttacaaaaacgagatcccgcgccgttggtagaaggtgttttaacgcagtgtcgcactcaactcactctctctctattttctctctctagaattttgggaacgaaagcttaggagtcggggacaacaccatgaatcggcaccacgatccaaatccctttgacgaagaggaagtggaggtcaatcccttttcggtaatttgccacttcatttttctctttctttttcaagccattggttcttctcaagatctttacttttttttaactctatttttagggttttatttgatttggttagatttcagtagtgcttttttgtaatctggatctggaagccctttgttttgtaaccgaaattaggagccggaagaagggatttaaatttatcgtattggggagattaaaagaaaattcagatcttgatttagaaattttgaacccgcatttgctttgagtgcactccacttcagtgctaattaggaaactagatttgaacagatttttatgcgaaatgaacataactaaaagaagaaaagaacagctagtttgatttttgataagttctgccgccgcgattattctgttattatctatcatttttcgtttaaatctacaaactcatactgggccgaagattgtctcaacttatctgacactaaaataggtggggttgtatttcaatccctctccaatgaacgacaccaccatataaaaattcgtaagtgcctaattagttacaattttatatttaaaataactttatgttgtgtgtttaaaattttaagacaccgtgttatccaattaattattggaaatgaattagggtcttaaaattggactagccttgatgaaaacttggatccagtgatatacatctgccatgtagaaaatattaacaattcaccggttgcatgacatggagcagtttgtcaccacttgcataatggaaacaatacataaataaaaactaatttacattgaggtgtaatcttttggattttggacatgcagagaaattgttttcattctctaatgtactgaattttacaaatgtctaaaagtgggaaacaacttttatgatttttttttttgtttttatgcggaaatttccttgtaaaatgattttctttattgatatgaaaattttgtagtcatattcttctgagctgtgagctgtgagctgtgataagtgcatatagattagtttttaaaggaagtttatatttatttatgtttccttgattacaggattacagatttttcaaagtaatttatttgatcagtcttgaaattcagtgttatgatatatatatttatatattgtgattaccatttaacatattccatcatgccatattgtgaatcattttcagaatggtgtttcaaaggcacgtgttcctccagctgcatctgattcattgggatatgggcagaaacacgatgcgacagttgatataccattggacacaatgaatgtaagaagttgcttggtcgctagtttaattatatgctataattaagttttgggagagctagaagaattttaattgtttccttgtttataggattctaactcaaaagctaaagaacttgcaacatgggaggcagatctcaaaaaaagagaaaaggtttgctctaataccatatgtttgatttcaattgctttattgagtactcgaagtaggttgcaaatatgaagtttagtgcttttttttttttttttcaatgcattctactttgtcttaggtttccttttaaataggataggacattgtgttttaaatttaatcatttaacatatgtatagtatattattgatgtccttaatacaatttgatgtgttattgtgttgctatattaattttctttttaatctttacaggacataaagcggagggaggatgctatttctaaaggtaagcatctggtcataagtaacaggaatccttccatattctgaatctctatagtttagggttgactaaatttactccctatactatttccagctggtgttcccattgacgataaaaattggcctccattctttccaattatccatcatgatattcccaatgaaataccagcacatgctcagaaacttcagtatctggctttcgcaagttggttaggtatgggaattccagtttgctgtaattagttattttaaagtgtgctccgatttgattctctgcatctatcttattttttttctttctcttttctgagagtgctaaccacttgctggatagtagccttaaatgtatattgccaagctttgagataataattttcttcaaatttgactgttaaatttttcacattagcatttatagtttttgctcgtagaattttgtatggtgtatgctgtatgctgtacagacatcaactattttggttttgttaatatgcttcaactgaatttatcctaacattctttgtatccttttgtttcttggtcatttatttatcccaaactaacaattattatgtctgatcaaattttaatgcaagttgtggactcttgttgtctgagagtttatttaattgaaactttggagtttgcttcaactgaagtgatgtaatcttctcctaaaggcctaaaagtacatcaagttaagcctaaaagttgttatattggctctctaggtttgtttttacattattaattacaatgctagataaaaactctccctttctgtatatgctaatttgaagttggatacgttttgctccaaacattatttaggctttagtcaaattcctgtagtcagttattgcattataattttgagcttacattgttgctagtttatgcacatttcgatgtatacatatatatatttatgtaatactcatcttaatgttgtatttacaactattacagagccattgttgaatatatatttttaataacacttatgttacatctttaacaactcattcgcattcctttcaatgggttttgcaggtattgtcctgtgccttgtgttcaatgtacttgcggtgattgtatgttgggtgagaggtggaggtaagcatttattttaaagataactgctaactataacaattccaagcttatgggctataatgcagttttaaacttctgatgtggttttcaatcttcaggtgtaaaaatattttttcttgcaactatctatgctcttcttggatgccctctttcatatgtactttggtataggccattgtatcgtgcgatgaggtactttgtaaccttgtcagagtatgatatgctttatcatatttgtatctactgagatagaatatttcttgttaggattgataaaataacagagcaaatatcagagtaaaggtttttccatatcaagaaaccaagttttgaaatgacttaaatgtttaaactcaacatatggtttgtaaattgacagttcttgtaatcattagcaatatttattattatatatatacacctttatgataaagttctgttcattcttttttatacctttcatgtaaatttaatctatgctgaaggtgagtgaaaaaatagatcaaggaaatttatgaatttctgcttccatcacctactacctagcttttttggccatatatagcatatcttatcatgtttacttccatgtcctgcatgtgaatgagacacgtaacagatgattttgggctgagtagtttttgcttctctgagattgctgtttttgaaggcctgttggataagatgccacattatgaaaacaagggccctctttttccagtttttgtttcaaagagaataatgacatgattgagttcttttatttatgtataaaattctgttcacttataagaatacttcttttaaatattttgttttgtgcctaaaaggattatttaagagacatttatcttttcaaacctgcagaacagatagtgcattgaagttcagttggtttttccttttctacttggtatgttccatgtcttttaatgcagtgttgtgattattcatcttatcttctatctattaatcaactgaatgatgcagatccacattggattttgtatctttgctgctattgctcctcctattgtcttccacggaaagtctttgacgtaagtattagcattcgcttgtgctttaatgaagtgtcggtgtgtttctgggagggtcaccagtgagggtgtggtcacgtcttgcgttttgtttttctttttcatgggattacattccattagtactttagtaacaatttggaaaatattttatatttttggatttggatcttttatatagccgttaattcatttaccagtgtcaaagtgtggtgatggatttctaattttttcttactcatctgttccaattatcgcagtggcatacttgcagcaattgatgtcttctctgaccatgttttggtgggggtaagtttatgtgcatgcctgctattcaccatctttaattttgacacttgattacatttgaaatggtttgcctgctaataggctgttggtgtgtgtatgcttgtaatcatataatatatatgtatacatatgacgactggacgtttgttctttccctatttccatgtatttctatatcataattttatattcataaaaactattgttgctgttgcacttgattgcactgcactgtagagtcttagatgttggtatctttgaacaaatgtctaatctttagaagtgtttttggttaactaattatcttccaacttccaacttccctgcagatattctacttagttgggtttggtctgttctgcttagaatcgcttctaagctgttgggttcttcaggtaagaactactctcatgctctctctatttttaatcttacattaccttcaattctatttgtttataatgaatctttgttagtttcctaagaaaaattgccatgaagtatgctgtttaattatgccaaagccttatcatccaaaagagaaatatgcagtttaagttcttagatatgattctgcttgtatacataccaaggccacagtttcagtgtccgtatcttgatataaatattaatttggactttttgtttatggggaatttattgtacagaggcgtattatatatttatctgattatttattcatttcgtttgtgtgcagaaaatttacatgtatttcagaggaaacaagtgaggaagaagggtcgtgagaatggtgccatgtagagtcatgagctttttctaaaggctttatagtatattcttctgcatactgttatgtttgtcgatttctctgtgatcattattgcatgagttggtgcaataattcgtatcctaaatacgttgtaggaagtgatgtcttatatgggtattaggaatttattgtgttctttcttgacattcaattttattatacatatttgtttattattattattattattattattattattatgctgtcaaataacttatccactattttttttttcctttttttgaataaaaataaaatctattaattaataaattctttcaaaataatagaacgcacttcataggaataatcctccatttgaagcacacgatttgtagataaacaagagtctcttgccaagcaatgagtcaatttatttgtaaatcgttttacaaaacacaaatttacagaagataaagccaaaaggaaatttcgaacatcttgatcaataagacaaaattgtgaaggcgtaaaaacatcgttctgaatcagttggacacacaccaagttatctatttctaacatgattctatcacacaaatgagttgcaatctaactcaatacttctttaatgcctattatctcaacaattttaggttgaacacatccaatctttcccttcttgaatacttctaccatagcaccatgatgattttgagttacacaatccatgccaaaagacaagactcgaagactaatatgaaaaattaaaaggaaaatactaaaggaccatgtcaaaagacaaactaatatgaaaaattaaattagtttcaattcaacacataaacacgatcacatcattaaaattaattagaaattaaatggttcgggttcgtgggttttgggctcgcgggtttacgggtccacgggttcgggttggctgggtcaacgggttgacctggtttaatttattattttttttaaaaaataattaaaatttatgtggttttttctatacattaaattaagcattaagcatattttttttttttttttaaaataaaagttaaacaccttaaatgcacaacctcaagcagagccccataaaatttagtagaacacataattcatgacatgtaaagaatcccattcaaaattacattatcattctttttccatccaaacaaaaattgaaaatgatagaagtagataaaattggtcacataccaagcctgtctcactagatggccaccaagttgggcaccttcagactacaaaaaattctacatttactaagcaaactggctttccagtccaagctccaagaaacttgatcactcttgaagacaatgaataacctacccacctattaactgtacagaagttagttgcgtctaagatgaaaccagagtttggaaagaagttagtcacatattaagttaagcatatataagtcacaaatttataacgccatagtctaaattcgttagattaaaataaaataa

SEQ ID NO: 78917 - DNA, 7493 bp, Cannabis sativa
tctctctctctctctcttggttctgcaaattttgcttcctgcgccggaaaatctcgggtagcgatcggaattgtcgagaggtgatttttccggtgagggaatcgcggagtttgacggcgaggtaagattctggaaaaaaaatcttccctggccgtttcattgttggtttgtttgttgtgtggaatttgatttgtttttcgagagttggatttgtttacggttcagatctggtagattttgttagccttgaggaattagggttttcgggttgagatcaaattattgagaattgaggtgatggaggcaggattttgaggattttaaggggatggaggaaggtgtaagatctgttgggtcttcgggggttgttgtgaagaacagaaactcttcgggttgtttgatcgttagaaggaaaggagatgacttggttggtggtgggggtggtggcgtcggcagtggcggccatggttcatcgagttccaggaaggcttttaattcaaagaaaggtaagaagagacaaagattacctgtgagtgattctgggtctagcgatgagctactggcgcctcctcgtagaaggttaggacctgaaactattcgtgtctgcaatgatttaaatgcttttggaaagggtgctgttgaagaaagcgaattcgataggaagagggagaggttagagcgtattcagcataatgaggatggttatatgagtagaaatggttttgatgagggtgaaagaaagggaggtaagctggatgtgtttgacttcaatgagtatgacagtagtctctatgatgatagtggcatcggttttgggggaagaaggtatgcgggctcaatgcatatggctcagagtggttctgaaagggaatatgaaactggatcaagcagacgtatggttgacaagagaaacagttcatattttgagagaataagcagccggggaaatcatcctggtaagggtagatttgagatcaatcgggatgatgcccaggtaagcttatcgagagacaagttgactggtcattcctcagatcaagccattaggcttcaagggaaaaatggagttttaaaggtgatggtgaacaagaaaaagaatttaagtggaccactagataattataattttcacaaagcggaggaacgcataaaggtaaggataggagatgcttctaagaagaatgttgtaactcctccattatactcggcagaaaagattcatgagaagccagccccagttgtcaggtcagagaaaaagtctacgaaatctagaaaatcattgcccactaaaattacaaagaaacccaattgggattcagaggatagtgatacttccttgaagtcagaaccagagacaatgacaagtaataaatctatgaagagggtgagttgtgaaggtgaagatgctccttcatgtgaaaagttacattcaagcaagattaaagacggaaaagctcgacgtggtagtggcacagagaagcaaaagttgcgtgaacggataagggggttgcttgtggaagctgggtggacaatagattatagacctagaaggaacagagattatctagacgcagtttatattaacccatctggaacagcttattggtccatcatcaaggcctatgacgcacttcaaaagcagttaattgatgaggataatgagattaaacccagctgtgatggtattgaacttatacctgatgaggacctctgtcagttgacaagaaaaactaagaagaagatggaggaggaaatgaaaaagaagcaaaggtatggaagcgacagtgagaatgcaaaagaaatccgtgtcaaaagatgtataaacgtgaagcaagattcagaaagcatggaaagtctcagtcatgacgataaactaagctcgttcttaaagcagggtggcaaatcatttaagaatagaatgaatgagaatggtttggttagtgtcaactcaaatggccagagttcttctcatcatttgcaagatactggtgaaaagctggccccaggatccaattctaatatgctgcatggaaggaaaagcagaaaacttggaagatgtactctgttggttcgtaacaaggggataaattcagaaaccgacggctttgttccatatactggaaaaaggactctgctttcctggctgattgactcaggaactgtccagctgagccaaaaagtgcagtacaagaatcgccgaagaacacgagtaatgctcgagggctggattacaagggatggaattcattgtggttgctgcagtaaaattctcactatttataaatttgagattcatgctggaagcaaactacgtcagccgtatcaaaacattttcttggactctggggtttctcttctgcaatgccaaatggatgcgtggaatagacaagaggattcagaaaagattggttttcactctgtagatgttgatggtgatgatcccaatgacgatacttgtggtatctgtggagatggtggggatttgatctgttgtgatggttgcccatcaacctttcatcaaagctgcttgggtatacaggtagtctgaacattaacatttacttttatttgatacctgggtttttttttacattggagaggggattcgaacttgggacctcctgaggagaagtgtgaaaccattgtaccactatttgatacttcggtttagttataatatagtagtgtgttcttcacgtcttaagacgagggagtttttatgaaccttaattgatattgcagacgcttccccctggggattggcactgtcccaattgtacgtgcaaattttgtgggattgccactgggaatgtcactgatgaggacaatacgactcttacaatgctctttacatgcagtctctgcgataaaaaatgtaataatgtttgctttatatgctctaaacatttatctttagtgcatctgcttttttttcccccttatcctttcttacatcctgatttgtatgtagatcacaaatcctgtgcttcagatattgacgtcagctcacttgattccaatagtatggactcatctttttgtgggcaaaaatgtaaagaggtattccagcattttttttttcatttaatctcatatctctctttaaaagcaaatgttgtatttgaaattttgaatcacatcgacatgtaccttcccattatgtgtctctctgtgcatatatgtgcttgtacttatgctgtatgatctccatgcttgcgtatctttgagagtagatgcaaataaatatgaataccctgttttacatatgtattacctgcatatgccactttaaactcttcttttcttctccgataatacatttgttaggccctaggattagtattgtgtgctagaatatagtaaataaaaagggtatatgagtctttgtatgggagggtagtctttgagtgaggaattggtactatacataggtgtgtaagaaaaataagagtatgaaatgaattgagtattctgtctttgcatcacaggggcctaaggacccatattatatatttgtgcttaccactactgcgtaagcctcctaaactctttattttttatctcttttctttggaccatacaatacacattcacttgaaccccatataacacaaacaccggctcgcccacccatccacctgacctagcctcaagagctacgggttaaactttatgaggtgcagtttaatatctggaattagatatatgggtttatagggaatcaagtgtttttgctggtgttgagtttgaattttcacaataatagtttggcagtttcatagaagaatcttccaccaatttttttttgccatttaagttcttttagcgaacaaagtatatgtgcatgtacgtgtgcataatttactttcagtgtatcattgttttacttatttatcttttgctgttaaaagaacttctgcaaaatttgttttgatttgtattttttcaagagatgtctgactttttatacatttctccatctctgttttagctctttgagcatttgcagaagtatattggggtcaaacatgatttagaaggagggttttcatggtctttcattcgtagattagatgaagactctgacttcgcacatcgaggagttcctcagagagttgaaggcaattcaaagctcgctgttgctatgactgttatggatgaatgttttttgcccattgttgataggagaagtgggattaatataattcgtaatgttctttacaactgtgggtaagtgccggtttttcgtatccggttgaaacgccctttcctgatatttctgtttttgcagtttgatttggaggatttaactttgatagtttggtatgtaaatttgcctgattatttatttacctagagcttcaacttaaatgactaaaatcaagtgtcgtacttaccaaattggaaagcaaccatttggaattgcagacatgggagaacatactgacatgaactttctttacctaaacccatacatgattgatatttatcatgtttttatgttcttggaaaaatatcactgtttctttaaccactagactgtagtttctattaatctctgccaaatatcaaatcagttactgtttttcagtattttaattcttccactattttggccttgcagttcaaactttaacagaataaactatggtggcttctacactgctattttggagaggggtgatgaattaatttgtgctgcatctctcaggtagctagatgatattgcccatgtattttgaatgtatataatttagtgatgcctaaatggggttcctgaggtcctaggattattctcaatggtcataggcatgcatgtgcagtttgactgtgtaaagttattatcgtttgatcatttgatttagtagaaacgctcacctgtatcatttgatccatgtaaatttttaatgaattgtggtttcttctgctggataggttccatgggactaagttagcagagatgccattcattggaactcgccatatatatagacgtcaggggatgtgccgtaggcttttctatgccattgaatcagtaagtttttgaaatttttatttatttacgaaatgcagaaggatgtttgttcagtcaacctgagtttgtaactgcttttgtatttttgtgtgcctctgatttttttccccctcattttgaaggctctctgttctctcaaggttgagaaattgattatccctgcaatttctgaactcacacatacgtggacagtggcttttggtttcactcctcttgaggaagcattcaaacgagaaatgagatcaataaatatgttggttttccctgggatagacatgctacaaaagcttcttggggagcaagaacatgaggccttcacgactaccagtaaaggtttagtctcctgctttctattgactttccattgacattttttacagttctatagttttgatttccttatcttttgttcttttatcacccttgatattaggtatgaagcaaatagaatgcaaaggcaaaccaagtattaagccagaggcagcgaataaatcagatattgattctccaacaaagagtgatcctcatggtggtgatgatgctgatttgcatcattctgatgaaacaactgaggaaattgctgttgtggaatctggttcccattgtgtggatgtgcttgttggcactcctttgccgggtagttcattaaatgcttctcctgaacgtgagattccaaatcctattgaagagaccacatgttctgactctccttcagcggccaaaatatgtgaagctacatcagactccaaaagtcagcccccctctacaccaagtcttgatggtgtagagatggaaaataaacctgtatcagctcatctcggaaatagcactgtttctttgcccagaaatccagatgtttctttaaatgaaatttctttgatggacagttccattgaagcttcctgtgaagttaaaactcaagtttcaaacgaggaggctatacagtttgaatctcatttaggggccaaatgtgatttggaaagtaaatgtctgtctaaagaaactaatcagttggattcttctctcaaagataatacagagtctttgaatgaagatggtatggatgatccccatggaaaggatgacaagaatgcgattgttgtacctgcttcgttctcaggggaaaccatagctgagaatgtttccgaggaagtcctggaaaatccagacatccccatctctagttttaatgactctaatgggagttccgtgctgattaaatctgatttggaccatcaaattgactgtgataatggaaaagctccagaagctgcttctgatgcaatggattgtgagtaatgtatttcccattacattctgtcagttacagagctaatgaacatgaaggaacatctgaatccacttcaatgtatttgtcttcaactcctccgccgagcttatcttttgccaatccttgcacatcgtcataacacagaatttttcattcagttaacaattttaagggtcttggcaccataatgtcagatgactcgtttctttcatggataggggtagtcattaggggaaatcattcacccctttaaacttacttttctcttaaaaacactgattctgaagacaatatcttatccttcggagttgaagtttcgaaatgtcctgatggtgccagttataagaagatgtggattgatttgctgctggggatacaaagcaaacatgtgcgagcttaatctgttaggccagtccgagtctgattctgctgaatgttgcgaatttcttctttagtgtcttgtctgcctgaaactctcaagtaacaccgagtagtttgtaagaaggttttagaggtaatcctgtcatttgttcctgcatcagcacagcaaagagaattctcgtgagaattgattgagattgtcataattccttgaatgctgcaagaaatgatgtttcaatggtactgtgtcaagtagctaagtttcaagaatttagtaaaaatatgtgaaattttatgttaggccatttgaatactgcttgagctcaggttagggtttcaaaattttgtaattgtgtactaagaactgaaaagggaatcttcaattgaagaagttccttcatgcatgattgttattattatttttatatatattttttttcttgcatttgaaaaaaaattttattctgcaaagtgttaaatagacatgtagattgtattagacagtgacagtgggcatgatttctatgtatttacatgagggattttttttttttttattaatatatacttttcattatatttgcagttattatgatataaactttttatttacacttttacaaatttaatttttcataaatttgattttaaagttttaaaattacaaacatacgattacatagcattatgcaaattaacccgagaaaaactataaataaattataaaaacaaaacaactaaaatataacatcaaaaaacaacccattgaaaaaaagaaaaaaaaaa

SEQ ID NO: 78918 - DNA, 9829 bp, Cannabis sativa
atgaaacttatgtgatcaattttttaattttgcagaaagggatagtaagagtaacacatcagctagaacaattgttattattattgttgtgtctgctgtggggtttgtgggtctaatcatcttcatatccacatgtgtatgtttgaaattgaggagggcaaagaaattggctcaaagtaagtttttgataaaatcattcaacattggtctacatgttttaaaatttatatgtattccatgtcttatctttccattaattaatttaactagacttattaagagcatgttaatatttttctttcttgataaatttagggtgttcggtaatatttttattttttgattttttaaatctcaaaaataaaaataaaatttttgtccttgaaaaacaaaaatgtgtttcatatttatgtgtttactttattttaaaacaaaataaaaataaaaatgtgttttgtaatttgctttattatttttgttttttgttttaatttttatttaagtgaagtgagagaaagtgggccagaggcctcgagtccgaagtctatgtcgaggttgagctggggtctgagttcggaccgggatacggggggtggggtttggtgttcgtgtccggggtttagggtttggcccatctagtcttggctggggtcgagggcttaggtttgggtcaggactagggtttgggtttgggtctgggttggggtcggggttcaagtttgagttggaggttgggatctggcatagagtctaggcggggggacgggggtctgtggtttagaactgggtccaggtccagggtccaagctgagggctataagggtcagggtcctagtcttagctggagtcaatttagtgttcaacatcgggtcaaagtatgagttgtgctgtgatttacacatgtcgaactgtttttcttaatcaggtcaactcgttttcttatattggctcaaactcgtgctttacttttccacaattttttcacatttatgaattattactaaaatatatattttttgtaacatcaattatttatataattagttagcaaatatatacatttatatataatttttcaataatagtttacaaaaatcataaaaataaataataagaatttgaatatttaataataaatactcaaatgttaagtcatacgctaagactttacaaataaattaatatatttagttttagatttacatttttcaatagttttaagtatagaattatattatttgttattatatttatattttattatcattttaatttttttataattgataaatatttaccatcatcatcatcgtcgtcgtcattatcatcatcatcatcaaagtataagatttttcaacgtgtcgtgttttcgtgctaatttatttgtgcatatgcgtcgtgcctttagggattgtcgtgccatgtcttacttaagcacatattttttgtgtcatgtggtgccaatttgtagcatcatttcgtgtcgtgcctatttatagcatcatgccgtggtgcgttaattagtagattgtaatgtgtcgtgtctaagcccataccattttgtgtttgatcgggctcatgcttgatcaagctcgtgcagatttcatgtcatgtcaaaaactatggctcatatttatagctctagtaaaatctctcaacaattaagtatactaacattaaaaaaatgattccaaaagcgataaattagtaaataactccttataacccgttctaggacctaaactcaaattaaaaattttcctatcaataaatagtgtggagatagcctaaacatcgagaaaatacaaaaattgaggcacctaaaattggcctcattcctgtcgttgaaaccctattcgggtaaacagattcacaggttccaagtacccagatcccatccggttgactagattgcactagtaggcaaaatttaaactcaattttgtcccaaacctgctccaaccaatttcaacacttccagaacagttcaagcactcaaattaaacttacccaataattagaacatagaattacataaaattcacaaaatcaccattaaagctcaagcttcgagtttcaaaaactcaagcttgaagcttgaagcttcagcacaaccagtagcaaaacaacaaccactcaaacttaattctaagctaaataaaccctagaaatagttcctaaacaaaccaaaatacccctgacccaaaatcaccaaaattccttataaaaccctaactttaagtcattaatatcacaaaagataaagagatcttaccctaaccttgcacaactcctagatttgactattttgcaagaattggatagaaaagatgtggtttccttatggtttttcttgagtcgagaaagagaaagaagttgagagagaaagggtttgtgttttgctctgtgtctataaaaactctatagaattctatcttaatatctataaacataataataatagtaaaaagaaaaggataatagaaaaagaaatcatttaaaacttattttattaaaacttggcaaattttcccttacaaaaaaatagaatacttaattaaacttcaggggtaatttgctcattgataaataacccgcctaatcccataagttttaaacgtcacataaaaccttgttaaaagcactaagatggtactttagattagttgtactatcatatggtttccttcatggcttcttgaagttgggtggaagtggttctacttgaatctcctttgagaaaaagtattcttcatcaaacttctcatcatcgtccaagtctccttttgtgataattatctttcggcgtaggtcttgaatctacttccaactcattcatcctcgcttggaggttagcaagtggggctttgatcctcttcatggtttacacgcgggctgcgtgatgtacttctcttctcccatttgtgtttgattttacaccaaagttaggggataaggcctttcatttgcttccctcttaggagggagccataggcgaggtgtgacagtcagtagtcttgtgatccgtaaggggaaacaccaggttagctatacattcccacatcgcctaagaaaggttaagtgtgatgattctgagattgtgtaggtatgggactacacagttgaagaaggcttaaatggattgatttgtactacctatatcaataaggtgcatcttgttttctggtagcccatcatgaaagaactccacagtcaagcgtgcttgacctggggtaatttcaagatgggtgacctcctaagaagttttcccacaaagcgtgcgagtgaggacaaagcatgctgaaaagactcgtgtttgtttgtagggccattcattagtccagtaagtagccagagttatgtactcgtatataagagccattagtccgtgggggaaggcccaatagaggcttaaagtggggccgttactcgagttgtcccctagaatgaaaccttttgagtgaagtttcttctttaggtcacgaggtgttcccctcaatgtgaccttctacgcgagtgtcagctctttggttgtctctgctgacccatagggcacctatctcgtgacatgtattatctaatcctatctcaagagatatcattagtatagagcatgaagttccctccactagcatgcatgattgattcactcctctcttgtcattttcttttgtacttggagagcgaggcttaggttttacctttgagtataccactcaacaccttttgtatgacggccactgtagtctccaacctttggttcttccggtggagctcatttatctcgtcttcataatagtaagtccaggagcttgggctcaacaggtacgtccacttctctttttcagggtcatgccttgaggtgcttaagtcttgtggagcaggtagcaccgggcatcataccaaagatagtcatctaggtggttggatagttcctttgatggggttagccatagatgatgtcaccatgtcatgtggtgtcaagggatttttcgagcattggtttggtttttttttttttttttcagtggtcaaaggtacttgatttttcatagtttgatccttcatgttttagttgtttccaccttgctcatacctggtggatggaggtatatggtctctcttggaagcgaacaagtggttgttatccaagtggatcctgatgtcttggagacgtcgaacgcctcggcatcttggaacgacaatgaattacttaggaaaaaggtagcttttgactttgtttttcccacagaaggcgccaaaatattgatggtaggaactcattaatgatgttagtagctgtaaactatatgtgtgaatgatggaaaataaaagaaataagtaaacttgttgaaacttaagataagttgcagaacaacactggcgaaaataagagtgttatattgataacttgcaagctagggttacgccaaatttccaacccctttgaatgaggggttgagtatttataggtgagctctgatgactcattacatgtggttcccaaggggataacttagtacctactacgtttgttggtctcagaggtcagaggggtggccacagggtagtgcttgtagcgtactattggtcgggtatgttaggtgctacaagtgggtggtgatcccactacttgtttagcccttgtctccaagacttgttaggtgttgtggttgggcatgaaaaagatggtcctgacttggtggtcctaatgcaaaggttctccgtaccttttccatgcccattttcttgtcctactcttgtcggtccattcttcctcacaaatgactaagtgtttaggcttactctcttgaatgaggataccgcttggttctcccttggattattgttaatcaaaatagactgatgaaaatagtatgaagggatggtatgaagacaccccgagtgaccaaacacctggtggcgcaggggtatgctgccaccaaatatttggtggcgacgagggtttggcttttggttccttttgaccttatgtattttcttggaacagattatcaagatttgttgaagggacaaaagagtgtgttgtctaacatgcttaacccatgaccaagatcctttgaggtcccctcaccttggtggggcagggatggtggccctaggctagtggcgcaagggtctattaccaccagccttgcgccactaggtattgtcaccaaggtgagggagctattgcatgttctcatctttgtttcctttgggacttgtcatttctgacattccataaaaagttaggatatttagatagagaatgaagagacagtgtctaagatcctcgggaggccgtccctaaaattttctcctctcacattggtggtgtagggatggtggccctaggctagtggcgtatgggttcgctgcaacctaccttgcatcaccaggtgtggccaccatggtgggcagtcatttgatcaaacacttgttatttgaggcattttctgtccatctaaaataggcccatacactcatttacacccctaaaagtacccccaaaacacccatgtttgcaatcctccaagcactgatgttttcactcttttagacacattcccgtatgtcttcaagactcttcccacatgtcttgcaaagctggtggcacatgtcttgcgccaccatctggtctgtgtttgtaaataattcgtcagtaagtattttgaccataacgttctcaatatgacttagaattggacaattcaagatattttggaaagttgagaacgagatctacaacttttatgtttatgacccgatgtaattctaaatgtaacattgtctaaatccactaacaagttctaactaatcacccaatctttccaacattactcgtgttcatcgaactccactagaaatactttaaatgattccaaacacatgattggactcttcaaaccctcgtaaagtggtgtcttcttggtttgggactactccaattgggataactttgaaattacaccttgtgaaatttcggtcttaacatcctttttcttatccattgcttcacttttaaaagggaaaatggttgcttgctcatttcttaaaggtcctaaggatgaacatttgggctcaaaattgggcgtacttggtacacctattcgatcctaacgtgaactcagtacacctatgcaatactctaaacatttaagaaaatagggttcgagtgccacccaaatgagatttaggtgggtatcaaatttccatttttcaaatatcaaatatccggtgacaccaacccagtacataacgttttttaatacatacatataacataactaacataacctaagcccaaaccacaagactagctgccactcgtaccctctcctcctcctccttcttcatcatctttttattcttcatctacccctctccctacaatttcttcttcttcatgtactcctcccattgtaactttttcattcttcttcttcgtgtatctatctccttgtccttgcaacaacttattctttttaaagttatatataaaattatatatatactacatatgtatactcatacaatatattctatgtacaatatatatatatgtgtgtaaaatatttaaaccttgatttgatttatttatttatttaaaaaatatttttgggttccacacccaatacactatcttaaatggtacccaaaactcaaacccagtacctaaaacagtcgggattggtaagcattttcctacaccccaaactcgaacctaaaaaatccaaacctagtgcaccgacccgaatgtgcatccttagtagagtcacatggtgtcttttaccatcatttttgtctcaaacaagcaaggtctatatatttatataaatatatatatatatatatatgtttctgccaaatcttctattttgtaaataggtattcacaaattatccaatccaatccacaccatctaatccattcaaattagtaaagttgcagatcaaatatttattcatatacatccgtaactgatccaatctaatccacatatgtatatttaaacaataataaatatattattgatattttaaagtaaaaaaatattagtaatttaaaaaatcaatacatagtacatatattttcaaattttaatatataaatgtatatatttactacatataaagataatataatctaaaactaaccaaatttttctttctatatacaattttttttttcattttttttttggattttattgtttgtttattttaatttgtagttaggaatatagaacaacaataaggtgttttattttattgttggagaatttaaaaagaatatttaatagattttggtcatgtgaaaagtatattttaataaatattaaataatttaatatttgaaaagtatctaattcaaaatttttgatccaattcgcactactatggatttgagctattgtgtagattgtattagattcaaaatatatataaaaaaaaattacactattacgttcaaatatatatctataattatatttctacggtgttctatcaaaataacacaaaaaacaacaagaaaactacatgaaagtaataagaaaacaacataaaaataatatacaaataacaaaaaattaacaacaaaataacaagaatatagcataaaagaaacattaaaacttcaaaagatcgcattttctgtaaataatatcttaaaaaatgtaaaaattaattatacaattaaacaaaattaacatacttaacacaactaatcaaacaaaattgatgaacacaaaatatagagttagagaacaagcaccaaaacaaagaaacacacacaacaaattatttatactggtttagatactggactaattcattcttgttcctacatctagtgttagaatcactatctctttcctttattcaatcaattaaactcacagtagtacatcgagcaatgtcgaactaacactcaacctcaggttatgaaccaattcccactccctcccaaaaaaaatgctttgacaagaattagcccatgttcttatatatgactcaatatttttaaatttaattcatgtgggataatgttgtcccatattccttcctcaagatggtggctattttttgctcaccaatcttgaattgctttatcacaagttgtgccatttattcgcttattttgtttggatttcaagtgtctttgcactatgcggatatcgtgcaactgactttaatatcttgataagtgtgaatcgaaagtccactaaagatatagctctgataccatgacaagaatgatgagattctatctgaaaactaattggtaatgagcagagtaacctatgttcttatatatgaattaatattttttttacatttaatccatataggataatatttttcaatatactttgacttgatcgtggactcgattagcttcaaatatatatacatcaagaaataactcaacaaagcgacaattaagttagttggcttgaaattggttagtaacaaaatgttttcagttcagatttctatgagctacaccacatataatatataaaaatttgataaaaaaaagttatataatttgatttaaatattgtaaattactctatttatcacaatttttcccattaggaaatctatttaattttgaagagttagtcaattttattgccacaaatgatagtttagactttaaataaatgtacttttctgacttgtattgtattgttgttcaatcagatcatttcacatatgaacccgtggaagaaattgaaagtgcagaatctttgcaattcagttttgagtctattcaacttgctacagataatttctctgaggaaaataagcttggacaaggtggatttggtgcagtttataaggtaaaaatatatacatttcaagtatgaaataatttatcttttgttagaaataaattttcaagtctatttcattcattatatgattgtttattttttgtgatgtgcttcagggtaggcttcctgatggacgagatatagcagtgaaaagattgtctaagggatcagcccaaggtgatcacgaattcaagaatgaggtaatactagttgccaagttacagcatcgcaatcttgttaggcttcttggttttagcatggaaggaagtgagaagcttcttctatatgagtttgtccaaaatacaagtcttgatcacttcatatttggtatggttgcatttaatgttatgattttgttttgaaagagaaatcaaagatcgataaattttcttatatatatacttgtacgcacatatgaatatatgtagatccaaggaagcgatcaaatttagattgggataagcgttacaagataatagaaggagtggttcgaggacttctttacctacatgaagattctcgtttgagaattattcatcgagatctcaaagctagtaacatcttgttagatgaagaaatgcaccctaagatttcagattttggaatggcaagactttttgtcattgatcaaactcaagacaatacaagtcgaattgtgggaacatagtaagtacatatctatattttttttttaataaaagtacatatttataattttcatgaacaaataatataaatctaatttgttagatgaacaatcagctaagaaccaactaaaacagatcatgtaaattgcataaagaaataatgcagcaaaacttgtaggaaattgagagcataacacgtagagaattttatccatgttcaaagataatttgtggtgaatcgaaactcacctttttctctcattgttgattaacaacagtggcaagattaaactcaaacaacaacatcaaagacaagaaacataaaccagaaaaa

SEQ ID NO: 78919 - DNA, 1914 bp, Cannabis sativa
tctttttactatgaattagctttatactattccaatatatacatggtgattgtgatcctacaagtgaaagtatagaactagtacttgtacatttaattgtactgtatgtatgtattattatgtgtctatattgtaaaaaaagaaaaatgaaagaaaagtctatgatgacctcactttaattggttgacgacaaatgaaatccaatttggccattaataatatacatagccaagcatagcgtggcccacttggcaagggcatgttcttgaagataataattgtatatctgtatatatatgtataagtgagagctcatcatacaattattaattaactatatttatgtatatacacatagcaaatctcatgtgtgataaagggaaatagtgaagtaacagagtacaaatattcttgtgtaaacatgtcatgtcgggtacaaacatgtaaaaaagaagaagaagatatcaatgtttcattattaagatattgtatacgtaatatgttttgatgtttctaatatataatattgttacatataggtagaatatccaacaaatgtgtcgtataagagtacagatacaaagttcagacgttggctgtacccaaattataatttcacactagcgtcgttttggtcaccttatttggtcaaagcccatgaagctgacccaaatggcacagtccacaaaaagctgatggacctttatttagaccaagttgataatgcatggacggctcacatggagtcatttgattacgttataatctcagccgcacgatggttctttggtcccgaaatataccacgagaatggtgttgtggttgggtgtaattattgcctgaaaaacgacatcaaaaacctgacaatggcttatggctacaaaagggcttttaggacagccttcaaggctcttttggggcttgaaaagtttaaaggagaggtaattctgaggaccctttcacctgctcattttgagaatggtgagtggaataaaggtggggagtgtaagagaacagagccggttttgaggtcagaaatgaagctgagttggtttgagaaagagctgtatttgggtcagattgaagagctgagagtagttgaaagtgaaggtaagaaaaagggtgtgaggtttagggttatggatgtaactgaagccatggtagcaagacctgatgggcatccaaaccattttgggcactggccacatgaaaatgtcactattgctgattgtgttcattggtgtttgcctgggcccattgatacttggaatgagtttttgtttcaaatgttaaaagcatgagtcaaatcaaattcattcatcatataactttatttgatttttttttataaaggggttttcttttttaaatattttttatttttttatttttttgtacttgaccagtacacactatatggcatttgttaagtttcaggaagttccaaaggaaaggtttcaaaagactgacacaaaattaaagacatcccatcaggcaccagcttatacattatgcattattatttcattttagccaaatatttaatattgggttaggtatggacgaaccaaaaatgccaggtctactctatacaagtgagagatctgctttatttttcttggtaactactaactagttgacaaaagagttttatatacaaaacccccgtaacaacagatcacatctattcatatatgtactcttctaacatagtttgcttctttgggcaaaaacacctattgatcagattaagtgtgtgacgaatttaaagttctaaatatcctatctatcagactttctttctttaattgtctaactaagactacctaaacgactatttttctttttctatttttatcaatatattcatttctcccagaagccaagtcaagagatagataccacttgcctttc

SEQ ID NO: 78920 - DNA, 7469 bp, Cannabis sativa
ttttagaaaagtggtcatatattttcaatgtagaaaaatattagtttagggaaaaaatattagatatatgtaagtataaaatttcaaatttcccaaagtaaaataggtgagattcgatattaaattacactaataataatattacactttacaaaagtactaaccagtgtaaatgcccattaacatttctttaatttttagggttaaaaaaaaagggaaaaacttgcttgggtagcgcagaacaaatagagcgggaaataataaacggaaatcctataaagcgtgctggctgcagaaggctactcaagtagagatcaacttacagagaataaagaagaagatggctacattgatgcaaagctctcagccatgggtcgagaaatagtacactctctttcatcttcattttgtaaatttttcgttttttttttttttggtttttggtttttggtttttaatttcaatttcgttgttactagtcgacctaagcaagtaaaagacgtggctcaccaggatgaggtggtccgggtcctcaccaacaccctcgaaaccactaatgtaaattcattaatcttcaatcggtttggtttaaagaaacccatattgtttaaaaatcaattttttggttttttttctttgggttttccagtgtccccacatgctcttctatggccctcccggcaccggtaaaacgaccaccgctctagccattgctcaccagctttttgggtaattatctgctatgaacgtctgcctttgaatttatatatcacgtttcgcttttgctttactggttactgaactatggcttttattattttctgctagaaaatggggaatatgggcttagaacttttgcttttgaataattcacggtttgctattggtttgctggttactgaaatgaaatatgggttgaaaattttagaactgaaaatgagaaattatcttgtttgtaagtgtactatgattcaactttgtggttttgtggaattgttttaattcctagaaaattgatatcgggctcaataactttttaatgcttgcactgttatataatattgtttttccattcctataaatttacacattagtagtttgtctctaacttgaattacttgaattataatcactcaagttgtaggtttttgattgaagctgatcaatgatataagtgttgttatttccagctcaaagttgttgttattcttctgtcactttaaaaattaagttagtgatgggggttatattgttcttttcattgcatcccaccaataaagaagtggggtaagaattttttggaatgatctttgatttaatggattcttatgggaaactttttggtttagacctgaactatacaagtctagagtgctggagcttaatgcaagtgatgaccgtggtatcaatgttgttcgaacaaaaatcaaagattttgctgctgttgctgtgggttctgtccaacgtcaagggtctgttatcttgtttagaattttctttagatgttttattttacatgtttctatatattaacgatatttagatctattttacggcaaaacttcaggggatacccttgtccaccttataagatcattatccttgatgaggctgattccatgactgaagatgctcaggcaagtttctatctctgttcttcctagtgtgtattttgtaagtattaagtgatggcatgctaaaaatgtataattgtatctattgcacagaatgcccttagacgtacgatggaaacttactccagagtcacaaggttctttttcatatgtaattacatcagcaggtatgaagtatgttattacattttgtttgaatttgacataatatgaattcatataatagtttctgtgatgaatcttttcatactgcacggtgctcttattttattttgagagattcctttagctaccacggtgtccataataatttatcatgcacctatgaattataccttgagaatgagattaccattccagctagtttgattaaaatacgaacaatactcttatgatgtttctgagtgcaaaagtttgatgtattgactttggtgctattgtgaaggcttgtattgaataaaagggattaagtgtttcttataattattttatttgttcatgtgtgaaagcttgtcaaatcaaacataacaggggatgtcaaactatatgtaaaacttttttgtttcttatcctcatattatatttagattcattgacttgctaatgtcgataatcatctttgtgtaggatcatagagcctcttgcgtctaggtgtgcaaagttcaggttcaagccactttcagaagaagtcatgactagtcgtgtattgtacatttgcaatgaagaaggtctgaatttggattcagaggtgtgatacaaagggttaaaagcttgtgttagaaattgtgaacttaaaaatcaatgtttggatcagccttaaatttttaattctatgtcacaaactatcccatgcctcttgcaggctctttcaactctaagttctatttcacaaggtgatctgcggcgggctattacatacttgcaggtaatagattctgtttagcttttcaaattgtgtctatttgaatatttaagtttctcaactaccatcgtcatagtatcaagccaaatttattggatggaataaaactgagttattgagacactgcagtaacttaaataggcaatgaaaaagataatatgaaatgagagagtgatttttattgaaaagggaacacaaactttccgggaatctgagagactggtttctctccatagaccaaagcaattacttgacattcagattaggcctacctctgtcatacaccccttgcttaatttattatatagactttccaaattaatattattttaggatattctttgatgattaacagaattccatgatgattttaagatactcttaataaaaatctcatgtctccaaatttcaagtctccttcctgtgctactactcaaaaattgatgaaatagctatttacttaaatttacttactcgcatgttatttaaatccatacataaatgatggtttgttaaatgttaagtggaaagacagggagtaggcatgtaatttggggacaagaatacagtttcccatgttgagcataggtataccgtactggtggtttaccttatatttaaggatgtccccctattcttttgtatttccatttattaggattatatttcattttagttttactgtttttgtaacagcaaggaatgctgaatttgatatcacatggcatttttattagcttaaaatttacatgatgtcaaattcagtgctatgatattcttttaaattacaaattttctattctttgtggggactttttggaaggacaattattattagctaattttccatttagtaattctttcttattttgtattaattctaatatcctatagacaatgccggtcctgtggtatccagttatctggctgagtttctcatctctgattgaatcttacttgtgtgctgaaattgcagtcagcagctcgcttgtttggatcttcgatttcttccagggacctgattggtgtttctggggtgagatatgctgcttaaatttgaaatttcataaaaataaagtatctgttttataaattataagtgtatacatacatatatacataaatatattatatttgcttttgtagtttttttgttctatcatttgatgtatggtgtactgacttgtgacgctcactctcaggtcattccacttgaggttgttgaggcttttttcacagcttgcaagagtggtaactttgatttggcgaataaggaagtcaataacattattgcggagggctatcccgtctctcagatgctttcacaggtcaaaatatttattgttttattagcttatgcattagttgtttgtctgtcataggtatatactaatattttgttgcttccagttatttgacatggttgttgaagcagctgatgtatcagatgaacagaagtctagaatatgcaagaaattgggcgaagcagataaggttatccctttgagaaagtttatcatcaaattgaaaaatcttttaaagtcaagagccttgcttttaaacaaaacatccttacatcgactttgggtgtctcaaatattacttaaaaaccactgtggcttccttgtttacctcttgtttcagttagcgagttaaataggaataagacatgttgaatagagaacatgttctagtactcaattttacttgtcttgtggattgcagtgtcttgttgacggtggggatgagtacttgcaactgcttgatgtggctagcaacacaatgcgtgctctttgtaacatgccagaagaattctcttatagcaattaggtgttcgagatgccagtaccaggtaaccatttagtgagattttgcaatttattcaattgcctaaaaattatttaatttggtgaatcagtgcctcgtcccaattggttgcagacatgttcaacgcctcatttataatttgtccagagtttgtgagatccctagcggtcgggaaccagcctaatcctggtctgccatcttgatgctaaacatggtaaaacgtatgtttccttgtaagccatctgagattgtgttccaaaatacataaccattactaatgtcttttatcccatcacggtcatcttgagaatcaaattcaactcaatccttgatttgaggtgcatttctttttgttttttgttttagtcatagctaacccttgtgatttgtgaagtgtaaaatttttcaacaaacattgcacttcgatgggctaaatatttaaattccataatttgaagtttaacttatacaggtccacatcatatactaatttggcatggtcgatatgttagttttgaacgcttttttttcttccatgaaatctatgtgcaacagcaaatcaatcaaaagtttctcaaattgtacacatccaaattaaaattcacgagatatgatgaaatttcttcagtaaagtgcaacaatagacaagctaatggtgatcgtatatgtataatatcgatgtatcagaaaggtaagacttgattcggttgtgaaaagtaaaggccagaaggattgttggtggtggtgttgttgggtaaaagtgcgcaccacactggagtttgagcgccttcgacagcagtcgtctggccagtattgcaagtcatatcggtgatgacatagccgggatgcacacaattaactaaaatatttggatactttttggccaaaatccttgtataggcattaatggcagcttttgatactttgtaagctgacaagtgtccaggccatccttttgcctctgcttctgacttaccttctttgtaatctttcaaaaacatactcactacctcctccactcgctcttctgttagcttttcgccgtcgcttaacatttctttggcccactcattgggaataaactggtaagatatacacaattaattaactaaaaatcatttattaatcttagagagttagtactacgctaattgtggcattgttattggccattattattagaaccgatgatgtaaatggttataggcaagtaatttggttgaagttggggcgtacctgcaattgtcctaaaagggaggaaacattaacgattctgggagaatcggataagtggaggagtgggagtagtgcttcgaccattgcttttgcaccatagtagtttgttttcaagcattcttctgtcttttcatagctttcactcgacatttcactccaattgccctgctctggctgcatattatacaattatacttatatgtacatgtaatagtagtgtagtttattactatgattatgattatagtacatatttacccaatcaccacgagccagttcgaactctttgacaaaagcatcagcatgtaatgtagccccagaatttgctgcattgtttatctgttggtgatgtccagattaaattctattgttttgatatggtataatctcaaataaatacacttataaacatgcaaacaaagtacgtacaccgagccggatctgtatatttggattactaacatcataacatgcaaggggtatatgttataaatatacatactaagctgatgttactttgcactgcacatttaattatttttttttaattaaatataattaagtgatgttaagtgtagcacatgtttaattttttaattagattatgtatttctattttttaatttttgaaataagatttgagattttgattattgagaatttttttttaactattgctgttacattgatgtactattcagatgtgattatatatatatataaaataatgaatttgataaaatttgatatattaaaaaatattttgacaaaatttgagtttgattagagaattaattactttcaaaatacattttatatattatgtccaaacatatattttttaaaaaaaaaatgatagtgataaatatgattataataaagtctaagcatatacttatcataaatcataaaaaatattttgttatataattgagatattctgtgttaataaattatgttatcttactaaaatatcaagtttcccaaagtggctattgatgaaatctgcaagggaatcaatactggcatgattgacgacatcaagctgatggaaaacgacattgtgatgagagaggttagactccttcagtaacttctcaacagcttcaacacctctcttctcatctcttgcagttaacaccacagtcactccttttgtagctaattgtctacatatttcatatccaattcccttgtttgcaccggtaactacagcatatctgaaccccaaactattaatgattttttatcttttttgaagttacatatataaatatttataaaaaagaagaatgtaaagttcatgattataatgatgaagattacaaactaaaaataaatgttgctacctacctacctttgtgttgcgagaagcgaaggttgatccattagctgtttcggagcttgattttatttatttattttaataagcaagtttcggaactagatttcagaaaaataaataaataagttttggaactatattgagttgccttggaaattgaaatataagatatatgtagtgtgtgtagaaatgaggataagaaatcttatagccagccaccttaacgtctgttccatcaattatataaaaataaaatataaaaagattataatatgaacaactttctacaggattctttttcatgtgatgtgacttttgggcgtgcgtaaatggatctaatgacaattgattatcaaatattaaatatttaattgtaatccggtgttatttttgaatatttaatacatgaaggtaaaatatatatgtacatataaaaattaatattaaaattttactcttttttcttggattggatggatctaaaatctaattaaatatatactag

SEQ ID NO: 78921 - DNA, 1991 bp, Cannabis sativa
cgaaaatcgaattttgaatttttatatagaaaaaataccgaccaaaccgaccgatgctcaaccttagattttactcctagatttcttgagaggagctggtgtggatgaaattggtgagtttaataaatttggcatatgtttgtgtgatgaattgtggtctgtcaaggaccgtgcattccatgatcaaattagccctacttgttgtggcgtctttgcaagaatcaattatgcttcttcttgccttgctgctgcatggaattccttgaactatcttccctcgttgaaagttgttaattaggagcttaatgatggaagaatggttatatttgtggaagcagcttgtaaggatatgtgtgcctattctggcgtcatggtgattgagtcggaaggaattgtgaccgaggcgctagctgtgagtatcgattcgagttagccgctggaagtagaggcttgggccttgttccactcggtaaatctttgtcgtgctcgtgactggagtcaggtggttcgcttcagattgtcaagcgttggtgtttggaattcaagctcagaaggcccttgattggcgcatggcatacttgttttagaagtctatataaaggtgcttgattctctatctaaggtggatgtcgtttggattccttgctcccgaaacatgttggctcataagctttcttaatgggcgtttagttagtcgttttctagtttggtttcttttgaggatttgacccctcttgtggtcatttgaactggttattccttgctctgtttgagctttttcttctataccaaatgacatacaccttagagaatcaacttatttatttattttttatttaagtgtttatatattacattacataatttagaatccatctatttagataactaacttaaaatatttaaattttaatagttaatgtctactctaaacactgtaaatagatgttttatgctcatttgtaaatacacatagtacatatctagaaaataccaaaaatttaattattttatggagttattaccatcgaaagtatctttttgaaagagcattgctattaggcaccagtagtgcctaacatcttctcgatatgtcgcattgcgattggttatcgatactttctaaaagctattatattaaactatatgagaccttatgcttaattaaaccaatagcgatactgatacataagaaggtggtaggcaccactagtatcatttagcatttctcttcttgaaattgtctaagagtgaacaaattatcaaaatactcttgttcagtgggaaaaggcgttgttggtttcctctagctaaaatatacactccaaaatccactcttttttctttttgaattgaattccaccgtatttattacttcctaatactatttatttgcccatgaaaaccaaacagtgtctattttttttcacacataataagttcatattaaaatatctggtgaagctaccaacaacttatctacttaaatctatttaaaaaaattatctacttattttctgaacaaaatggccccactcacaccattattaactcatctttcttcctatttttcatctcccaagggccattactcttaaaaaaatctctattttttttgccccagttttcagaaaatgttcctaaaaaacaaaattccatcaaagtactttctttttattatgcatcaaaaaataaaaattaaaaaagttgacctttttcctttcccattaaaaatactcacatgtgacttgcctcccttttttttttttttttcctcactatccgcatacaaaccattacagataattatatcattattcttgtaattattgtttaaaaaaaggaaaaactcaaccatctaatataaactgcatagcatcttcattagattttgctattgaaataaaagactatcacataataataataataatagcctaaaagaggggtccctttcactccttccattgcaccatcataaccattacacg

SEQ ID NO: 78922 - DNA, 6007 bp, Cannabis sativa
tgattgtaattaagtgagggtgtgatctctcaagagagccttgagagtgtattgttatttgttggtgtgattaatgaaagctttcttcttgatacaaaagaaaaaagaaaaatgaaatttaatacatatattttatttaacccaatctaaaaagaagagcttacaaaagtctaagtgcataacctaaagaagaaaaaaaaaatattaatccgtccatcactctattggattttttttttttttttcagattcaaattcaaataaaagcccactacctgatcaccataataaagtctaaagccatagttctaacttctaataaacaaaaaatccagctattcaaattataaaaacacaacagtctaaattgcaaatacacatcagtccaaaaatgaaaaacatagaacaatctatatagtccaaatcaccaccccaggcttcactcctcagatttgccttgaaaggattttcagaagctgaaacagcaaagatgaaaatcagataatatattaacttttaattaaagaaaggaacataacaaatcattttcattaactcattatacattatttccattcataagctcagttttaccaaaatttgcaatccttcacttaaacaaggaaataaagtaaagagactagattttatatgagcagggtgttatagctaagagacacataatcatatattgtttctacatatatagtactaaacatcaaaatttagttacagggtcctcctctacattatactttcgatgtatataccaaactatataatattatatatatgcccatcaggaagataaagccaatacataatcattgcactaatattatctttctgaattatagggtagaaagatgagtactctgacttcaccatgcagctgcactgaacgatgtctaaaaggaagtttccatgtcttagtgatatttgtataaagacacttgggagatgaaattattaattctttagaacatatgcctttgcagaacatatattacttgttcagtaagactaaactcgtccaattaattgtgttacagttaatgactttacaacaaaacaatgagaaattgaaaagaaaaaaacaagaaactttgaaagtgagtcataattgcatagtactttccaaacgaagtacacactggacaatttaaagttagccaatcagtcaagatatactagagctagaacatgaaaacctccactgaaataaggtcaagaaaatctaccatctatcaccagattcgactcaatcaaaagtatttcagcaaaaaaaaaaaaataaatgaacaaaacacatatatgtttattcagataagtcacacacacctcatcatattgtcgatgcttatcctcatttttcaaaacctgcagaaaagaacttggtttaagcataaactgattagaattggtgcaggggaaagacctcatattgcgcttcctcctccttgttgtgtgcaaaagaaattgtgagactatctattatctatcatttatttttgctaatgagaatccttttggttttggtaataacggaaacataacagaaaatacatgaaagtcaatagacatataccctcgagctgcacctttaattattgcccaaacgacaattggggcgtataagtgataaactttctgatcagcggaatgagaccagccaaagctaactgaaactgttctgaactatttaagcgaatgctcacttgcccagctcctctgttattcacattggcacgagcaatcatagttgtatggcgtccaactggaatctgagattgtacattcaatcccaatgcaagatcaccatgccaatccatgacagatagccccagagtcgataaccaacggcccacaggatagtctttatctctcaactgagcctcaaggctgccaccataagctatgtcaccacgactggtcatcgcgcccccagccataaccaactggaactgtttattagcaattaacttgtcctcaagtttaactccagctgatacagcatcccctaggagagtaactgataaacctgcagttgccttgttcctcctgaaattactaaatcttgtttcgctccgtagagtatagaccaagtccttcccaacagtctgcatatcaaaacctaatgaagttgattttccttctccatgctttaatgagctagcaacttccatttggacattggcatccttcttatcctttgaaacctggccagaaaatgacaagggtattttctccttaagcacaaataatttctctacatttattccttcataaccaacatcgtgatcccaaccgtgagtttctagaacaggcctcacaagccaatttgaagaatcaagatgacgataccggtgagtggggctatctgaatcaaatgaagcaggtaagacaaaatctggcatggaaacaggaatagatgccccgccggaactttcttctgtattttcacctaaatctctgggcaaatccttcacagcttctgccattttcttcataatttttcgccgcttcttctcttccttcaattgtttcttcataagaagcttttccctatattctaactcatcataataggccttcttttgagctttggaaagctttgccaactgggcattgttcaaacttttgaatggaggcaatccatcgtactctgattcatcatcagagtctgatgattcatccaaatcatcatatacatcatcatcatcaccaaactgctcttcaggaagcttcaactgtggccttgattgaagcagggatgagagaagaaaaggcaaaggatgtcccctacgattggcaaaaggcttccctggtggactgtcttgcaattttagaagtgcatttgcttcagccaagatttttgatgcaaaagagagcagtaacaaatgaggtttccaaacctggccatttggcaaaactctttgcccagccctatttgtcctgcatgcagaatggttctccactaatgaaactggattcattaaccgcatatctgcagctgcctggcggatggcttgctggacaacatgagatcgttgagtgacaaacatatcataactagaagcagtaccatttgggccatcaggtggagcagaagcagcatgtgtcagtaccacaattgcgttacaccatattgaagggccaaatatctctgttatggtgcgcaacaatggcatatcactaaaatccctgcattgcatgtccaacctatctaaatataacacaatatctggtggtgttttcttgataaagcgcttaactgagtgcagaatcctctcattctgacgctggtcggaccatgaaggtagaaggccaggtgtgtcaataacacgtaccttaatcccttgtacagttcccacaacatcctgaaccttctttgtacccatctgaaaagcatccgtgccaaacttcacttcgtcaaatatagaattgatagtggcacttttaccaacccctgattttccaaggaccataatagtacaagagaaatcaaggggttcttgtcccgatgcctcaagttgttctgccatagcacttgcacgatcaaagctaaaggccccaacacggcccccatttctcccacgcagctgttctgccaaaccaagtctgtacaaaacttgagctacaacaacattatgaggagtctgtccaagcctatgtgcaagccgcaaaaacttcacccttatcatctgcagtttttcacgagtttcatcatactcctctgaatctcctccattaacaggctcctcaatttgttggttctgcatctgagtaacactaccattgacccgaggttgctgcaccacccgaggagtaggttctagtaaaggggcagcacgtcctaagccagcaggaggtgcattagagggagcagaattggtagatttaccaggtaaagaagcattttcttgtgctggctgattcactgcactatgaacttgagtactgtgtttttcttccttatctttctcttctcttttttctggctccttagccttgccattatcatatactacatgaacatccctgacttgttcaggttgaatagccttgtgactcacagtttgcaaatcagtgtcaatcgccttgatcacctctgtcttctccacattcgatttctcagaagaagttgagtttatgatttctggcaccctttccttgatagatgccactgtgttagctaaagtatttttcagctccgaagtttctgcattaagttcagaagaatgctcagcaggagtcattctgacatcaccgttttgattatctttatgttctatagagctctgtggtcctacattataatcactctgcactgaatcaatgctagttccagatttcggttggttactatcaagatcctgtcgatcaccatccatttggactcccttttcaccatgaaccttcaaatttaggtcatcataaacaatcctgacatttcgatcttcaacacccaaggtattttcttctatctcctgtactttgctaacttcagttgaattctccttgctggactcggtctcttgataacactcgagggaggcagcttccttgtccaatttttcacctgcagctacattcttcgaagttacactatcaaaattaccactttcagacttctcagtatcaatcactaaattagagctcttctcaacctcacccccagcaattttagattctatttctcctccaacgctaatctcagaaatctctttcaccccatcttctttgttgaccacaaaagaatcacttccatgtaccttcacttcaaatggcacatcttcaagtacagtcttctccccatctatctcaccaaccaccacatccccctcgacaccatttgcaccaccaaaatcctgcaccttctctttggcagtaacacgtgtctccttatccacctcttctccaatctgatctgggatgccaatcgcctcttcaaagttctctacctcatctccaccattggaaatttcagtaacacccgtcaaacttgcatcactcaccgttaacacatttccttcttcaccatcaacaatctgatccccacaatcaacttttgctccaccctgctcatccaaacgctccggtaactctacagcctcctcaaaaacctcttccacctccacctcatccaatccatcagaccccgaaacagccttctcctctacccgctcctgaaaaaccccaacctctgcagtagtttcgtctagccagcgagattcagaaacaatctcagtcccattttccatccccaaatcccaaaaatctcactcctcaatccctgaacagccaaaagaaaaacccattcaaccaaaaaattgacacaaacaaagcattttcaacgtaattcaacacagaaaatccaattaaaaattaacaaaaaccgaaaaatcatattacaagaagagaaacgaaaaatgcaaacatcacaatcaaatatatacacaaataataatgagaaaacatctcttccagataaaaaaaaaaaaataagccaatattatcccgaactctcagatccctgtccatggttttgtataagggttttggtaaaaactaacactaattaaataaaaatgaagccataaacaatttctaataatagcagacagagaaaagggtcaccttgttcagactcctaaagagaaagattatgctaagagagagagagagagagataaaagatctcgcttttgggttgcttcatttatatacggaaatttacaattttatgtaattaattacattatatgtctataaaatcttatttataatttattatatattttattaattggaaaaacatgttcttaatttcatatacaaactatataaaataaaaataaataataaccatataaatgtatttaaattttaataaaatattatagcaacatattattacaaacttagtaaaaaaaaacatatcattacaaatattattataacaaatatattaaattaataattaataaacattatcaataataat

SEQ ID NO: 78923 - DNA, 1927 bp, Cannabis sativa
tttaaaaagaaaggaatgaccattccaatgtaacaagaaaaaaaaatttaataatttttttatcaatttttttttatgtattttaaattttattctattttattctcatttttatttaatacttccgatcaaacgccaccttaaagttaaagttaaacttatgtacttacagtctaatgactttttatttttttaatttacaaagttcaaagttcaactatctcactcatgtcatgggcagacttttccatgtggggcaaaaattttaattaacaaaaaaaaaaaaagagattctttgtcttctgaggaaaaaaaaatagtagatggcacaaactcttgggtgacttccaatagttccatggttaactgtttgagatgaagattttagagtagaaagaagaaggaaatttagccatggaatcaggatgatgagctgagtttcgcctctctggaatagcatgattttgaaaaactaaagactgaatgaagctctaatgatcgcacttggccccaatactactcatactcggaaaaaaaatctgtatatttctctcataaacgaagactaaagacttcattttgataaaatcttcgaacataatgataaaaaagaacactacaaagtttgactcttcactaggcctcaggtatttgttctatgtgcgatattgagaaaagattgtgtatacccatttcgagttttgatctttttcggtcaagtttcgaggaaatagcaagattgaggttagatcgtatctgggatttgtttacacttatctaaagttcggacctttggttgattttgattcaattctataatggagaatgagactacttataatggagggttggagattgaaaaatttaagagagatgatatggaaattgcaccatggaccaaacagatcactcttcgtgggttgatggcaagtatagtgattggaatcatttacagtgtcatagtaatgaagctgattctcaccactggtatggtcccaaatctcaatgtctcagctgctcttcttgcttttgtgtttgtaaggacatggactaatttgcttagcaaggttggaattgtgtcatctcctttcactagacaagagaatactacaatccaaacttgtgcagttgcatgttatggtattgctgttgcaggttagaatttaaaatcaaaacagtgtttgactttgttgttatgtttttctttgctttgagtcttgggattttattatcttttttctttcttgggtgtgaaatgcaggtgggtttggatcttatctgttgggtttgaaccagaaaacttatgaacaagcaggagttgatacagaaggcaatactattgggagtactaaagagcctggtattggttggatcactggttttctctttgttacttgttttgttgggttattgaccttggtacctcttagaaaggtcttctagctctcttttggtctttctctttgatgattttcttctccaaattcattcatggatgaagttatgtgctgacgttttttttgtagattatgattatagactacaaactatcttatccaagtggaactgctactgctgttcttatcaatggttttcacacacctaaaggagacaaaatggctaagtaagcaatgagtttttttctcaatctttcttttgatatcaaactaaacagaattgagtatggaagaagtcttaacaagttgaggcttttctattttgttgattcaggaaacaggttgatgggttcatgagattcttttcaattagtttcatatggggtttctttcagtggttttattcaggtggagatcaatgtggatttaatcagttcccaatatttggattgaaagcttggaaaaactcgtaagtgctatgtattacactttaaaagactccattccactatgatttgcttatgtcatca

SEQ ID NO: 78924 - DNA, 6301 bp, Cannabis sativa
tatattttgtcaattaataaaaaaaattgacacatcatatatatttttttatcattaaaaaaaggacacatcatatatttccacgagagtttcattaatatttatcatctgaaaaagcgaaaaaaaaaagtataaatatgtgcatgaatgaaaaatgaaaaaaaaaatataaatatttgccaaaatgaatggtagtgcatatcttggtgtagtggatggaagatcaataatttagaggaaataatgtttaggacacccatttctggcaggaaaaaaagtagaaaagaacaaaatagaggccctcgtgcaactggagggcttcaatgtacatcacaactttattattattattattcattaaaattattaatattatttcaatattattatttttttccattattgtattataaatattagtgaagtaaattaataaagctatagcagagggcatgagctgcatgtgtgcgtgtgggtagacattccttctctctttttggtcccactttaaggcaaaatggcccccactctctctctctccgcacttattatttattatgatgtaaataagagtttacctaagataattattttgttatattatatatatacatcattttccattggtttttgttttctcaatctaatttttgagatcgtacaagtcaaattatatatagatgtatatatgtactatatatatgtcaaactctagcgggagctcaaaacaaagtcaaatgatatcaaactgtgtcggcaaagtctctcccttaatgtatatacatttcaatcatttgaatatatagcaaaaaaaaaaacatttaaaattttaaagataaaatctcttaattgtaactttttaaaatggtgcgttttcaaaataataattataatttttttattggtgcctgctctgccatttgtcacatacaacaagcacgtacacttgtccaaatatatgcaaagagatatgtaagaaaattcgaagaagtttcgagctatagtatacatgtaatatatatgtatagatatagtgccgtgtatcatgcaatttataattaatatgatgagtgccctcacaaaagttcatatatatatttgataaattttgtaaacttaggaaagttgaacaacccaactctttttttgggttttgaggatttcatcgtattaacattaattattgtcttcttttacttcaatatacgtaggtaacagctcattgatggattacacttattttttagcttcactctataggcttacattaattgctaaagagactttgaatacgactcctatatatataataaagtaagatgatgatcatgtgcatgcatgaattttcaaccgtcagatcgagcgaatctctgacgtggcaacaaaccaatttaattaatcaggggtaactaagaacgactcataggtatgaacgaagtggctttgtcgtgtcaattaaaaaggaaatattgcacggtttcattagggtttggggggctcaaaatttgaagcaaacagtttcaaacatattaaaaggacacatctacctttttccatatatattcttttgccctatctggcttatatataggtacgtttattacatctctcttggctatatctataaccttgcttgaacaataattatctatcatctatatatgtatatttgatcttaatatgatttaggaaaagatgttataaccaattcatgataataatttatttatttatttttatatttttgtgtatatgtgacgtgtaccttttgtgtcaaatccttttcgaaggatcaccccatggatccacgcttctgtacaagttgctatccaatccatcttttgtagcactcgaagacaaagccatcaatttccacagcaaagtcaaaaaaacaagcaaaacgagagagatatatagtagtctatataagatatataagaaacatatgtagaagcggatgagatgagatatagagaaattacaaaggccaatgtaccaattaattatttacaaataatataatcaatcatataagattgcatgattaattagacccactgcctgcaccatcatcataatgtacgctactactgtacggagccgcccatgcaagcctcttacttagatgaatggtgtagtatgtacgccatgacgataaaccctagtttgccacacacttttctttattttattttattttatttttagggagaaagagacagagagagagtttgccacaacactatgctctattgattgagccccggccttttttgtactatatattcacaattttatttaataatacacatatatatatgtgtatatatagctacttataatagtgggacacattaatgttccaaacattgatatttaaaatgaaagactcatgaaacctatacatattatgatccatctacattattgcgatttatatgtgcatatatatacacacacaaaactatagtattattattttataatcttatctataaatatgacatatacatattttacctagcttatttacttttttgcttttcactcttttgtgtaagacttttacctaagccatgaaaagagattacaaaaggggatattgttccttatatttagagcacactacagagatatgtacttccccttcccactcttatgtcataattttattatgtgctttaatggcaaaaaaagacaatcttttatacacacaaaccaatgccttttttttttctcttttgtttttcttataattttcaatttgaccctcaaaagaatattaatgacaagcatgagctagctatataacatttataagttcttattattaaacaacgtgcgtaacaatttaatgatcatgtcaagaatatatagatgcctctccctgcatatattaatctatattaattcctatgcagaacaattagttaacaatcgatgtatatagttggggttttgtatgtgcaatgaatatcatttaaaaaaaaaatccaagtgtgggtccaaaaaagcttcaagtactaaaaaaatgatcatacaagggctatatatatgcatattctattccatgcaataataaaatgtatttatatatatattacatattaattaatttgggattaataaatattcttttcattgctacttgatcaggggaatccgcaatgatttcaggacaaagtaaattatggtaatatacatatatataaagtcggttggactataattgtagaagtatggggctgcaaaagtttctcaaccatttatataaaaaaaagggttatttttattattttcattagcatatacttttgttgttttttgaattttattacagtactaaagcaaaaaggaagaaacaaagaaaattcaaaaaaatcttattgcatgaaaaaagaaaaaaaaatccaacaaatcttctaatgattttgagtatattgatgtgattagctgaaaggtaagtatttatcttattaggactgaaaattaataaagtttttcactttagttaattaaatacatctattaagaataaaaaaaaagaaagcaataatttgaagagtcaataaggtttatctcattctcacatatgcctccaaaaaatttcctgtatttgaaatgtagtgattgaaatatatcttatatatacgtaatacgtgggcttagttagctgttttggccttcatttcatgtttttcctattaataaaatatgttttccttttatcaatttttatttaccgtatcataaggagtccaaaaaagtcaatgacagagtgttgatggtcttcaaggaattactgtccacagcttcaaactactctctccaaagggtagtccaaattccaaacttgcagttagaatggaaccaaataggaaaaaaaaaattgaaaaaaaaaaaaaaactaaaataaaactattttctgttcacgttgcaaaaggactgtctcttagtgaaaatatatttttgtaaattctatttgtagatcttattgataaacatgtgaaagactctgttttagagtcactattctattaggtccaatggggtggtaggcatgtgcatttgtgtttttctttttcatttttttttcctttttaactttgaatttatataccttgagtttagccacctatatagtttcttttccatacataataataccttaatcatttcattccaaataacaatgcacccctatggcccaaaaacctaatataaatttaaaaagaaataaaacaaaatcatagcagtatattgttcatatcactcattcccatgttactatcaacgtccttccaactaaacttctctgtctctctctttctttctttctctctcttattcttattataatatactaatataatatatctcttttatctgggttcttttaacaacatgtttaattaattaaatacataaacttgcattaattggaaggttattaattttgccggtaattcaaatctttgtctagtcaagcctggagtcgcggtttggttagttatcttaaattaatcaataaataaaaaaagtaaaaatatatatttaaataaacagagattttaatttttatttgtatttattttttgaataaattttgaaagagaggtgcttttactacttgagagtcttaatagattggggtccctcctccttttgtagggtgcatggtttggcctatgtgcctttctctctcttcttcatacggtggttcagagacatcctctataaatatgcacaatcttttggcctaagttcaaaactagagcatgcccataaacatttttacagctctctagagggagtagaagggttagaacttctagagagttttgtcatcatcatcatcatcaacaacaacaacaatggcgttcttcatagttgtccttagtctgatctttgtgctctgtttttgctctgctttgttaaggtggaatgaagttaggtacaggaagaaaggtcttcctcctggcacaatgggctggcctgtctttggagagaccactgagtttcttaaacaaggtccaaacttcatgaaaaaccaaagagcaaggtgattattttcataattttttatttttcttttatatgactatctggaattgctctgttttttttttctttaaattattatttctttaaaaaggggttgtaagcttttgctgttttaatggtctctagtctagtttttggtttaaggtctgataactgattatactaatcaactgctgtttatggtttaaactgtttaactaaacctgcaaatctcatttcagtggttagaaagttccttcttaagccaataagagttgtcttcttttttatttattttttcaattttttattttctgtcattatttctagctttttggtgcgaaaaggaggggagaaaggagtagtcatgattaggggaagggttacccatgataaccccctaaaagagataactatattgcatcaatcaccagcaaagatttctcatctgattcatcactttctttggtttgtaacaggtacggtagtgttttcaaatcccacatacttgggtgtcctaccattgtttccatggatccagagctcaacagatacatcctcatgaatgaagccaaaggcctcgttcctgggtaccctcagtcaatgcttgatatcttgggaaaatgcaacattgcagccgttcatggctccacccacaagtacatgagaggtgccttacttgctctcattagccccaccatgatcaggcaccagcttttgcctaaaatcgaccattttatgagaacccatctcactgattggaatgacaaagtcatcaacattcaagaaaagactaaagaggtttctttttttctttccatctttcccagtaatcaaattctctcaattaaaaatcaagtctttactcactcttctcttatttaatctagatggcacttctctcctcgcttaagcagttagcaggaattgaatctggatcaatgtctcaagcattcaagcctgaattttttaagctggttttggggactttgtcattgcctattgatcttcctggtacaaattatcgtcgtggatttcaggtttgttttcttttcgtttttcccttgggaagtcttaatttttttaaggtatgtttttactgattaaaatgttttattatgcaggcaaggaaaaatattgtaagcatgttaaggcagctcatagaggagagaagaacttcacaagaagtccatcaagacatgcttgctggtctaatgagaactgaagaaaacagatataaactctctgatgatgaaat

SEQ ID NO: 78925 - DNA, 5954 bp, Cannabis sativa
tttaggttttcttcatgttttatctcatatgcaatcccttctttctacaagccactcaaaaggaaaaaaattaattttggtcaaggtgaaatatgcttcgcctagcttgtttgattttcaaagcctacacaaatcacaaaatatagcggtctacagcattgatttctctccgagtttagagtaagtacatagaatgacaatctcaaacgaaatgataaccggtaaatcagaaaaaaaaaattcatttaattaatttaatagtattcatggattatcaaaactatgttgcattttaattctcttatcacctatattttcatattgaacaaattaagatatcttgacccagaagttaccttgtctgcaagtggatcaaatgctgcataaagttcaaaatcttgagtgacccaacaaagcagaactgccagaagagaacagatcaaaacctcatcaatcagttatgaattgaagaaacaagagaatgaattgattctttaaaagtatcaataatatgctcggctgggggtgggtgctattgaacaacagataaataccatagttttcatctcttttaaactgagttttgtgaggtccaattcctctctcgtgcattgaagcataaagcttctggtatgctctatataatctgaaaaatgatatacaccaaatgcattagcgtcactgtaggagctgataaaatatttagtttctttcatagatgcatcaaaagttgacgatcttaccttttctgctgcctaggactactaattgatgctgggaactcggaagaaacatactgatctaaaaatatactgcggtatataaaatgccaaagtccagaaggaccagctatgccgtcgcatgtgtccctgaacctctcaggagaatcagttacaggtttgggtaggttcagatgcgacgataatgcactagatcgaggtaagggatcaacaggcaaatcttcaacatgcattccaccatctagcaaggatctctggatttcactgagaacatttgactttaaaaggactgtctcaatacgcatcctacgaatcaaacaaccaaaattaaggaaaatacataaaaacgatcaccagcttgcaaacatatattttttaattacaactcatttgaggagcatgggggaagatccgtagtgtgttttcatatctcacgttaggccaagaagtaaacgtattccataatgaatttacaacatcacacaacacaaatttcaattatataaaccagagttaacctgcaatccttgagatgataaaaggcacccgaactagtagaaagtaacaccaaataagtatccgcctgtaaaaagaaattgtaatcatcgcgacaaagcaacatacactaaaaggatatgcttaagattaagctatttttcgtattaagaagtgattggcatgtaaaggaatatcacatctgatgcaatcactcacatcaaaataatggacataagcatgcaaaaacgccatgggattaaatcttggcaagcaaattggagaaaaagattcagatgtcctgcataaagacaatcagtggttcgtaagactagtcaaaacatcggagtccatcaatcaaaatctcgataatgattgtattaaaatataacaagagcattggataaattaatcaagcaatcaattctaaaaaatacaaaataaaataaaaacatgtcgtgaagcacttcatgaggagaaaattctaatggaatgaggtgaagcccattaaaatgagaagaaaattctaacaaaaaattaaatacttgaaaacaccttacgaggtgaagcactctcagtggtagtatgataatgcacggggaaaatgctcttgcttaagacaacataggataaccgataacttagaaatgtaagcaaagagaacatggcaaaatccgtgacaaaataaacaatcgaaccagacattgacccaaattaaggcagagctggtttcgaggaaggggcaaaatatttcttcttgaaaagaattgcaactagagtatagttagaaagcagattaagcaccttggttgcaaaaaccttaagttgaaattgtcattaaaagaaaactacacttgcctaaaagattctgatgacataacgaaattggcaagtagtagcacatcatctggatgcagtgaagctttctgagcaccaaccagactcaccacctgcaatcaagctcctattttattaaatgctctactaatacatgattcaaatgcatatagtgcaggaaaaggaaagggaattacaaccttgtgtttgcacattaatattgcaaataaaacaccggaatcagcaacatcttgcaatatggcacctgcggcttgccttgttgcataagcaaggggaagacaggtgtatgcatgaagaaatgtggctgggttgctgaaagcaaagaaatacgtattcaggaagaaaaaagatgaaggggaagaaattgcaaagagacagtcaataacatcccttgtatgcttttaccaaaggacacaataaatctacatacaaaactaattaaggaatgttacaagaaagatgagacacaaaccagctgaaagaatggatgagggaggagaagacagcatcagttcctccaagcaaagatgtcatatcaaactttgaattcttctcaaaacatttatttactgactttgttagaataagtatcatctgcatccatatattacagttaaaaaaggaaaagaaatggattttgcatgcaaaattacaaaagaagataagagaatttcgtgaagaactttgttcccaaataaaactcaaagttggaagcacaagttggtttcattaataaggcaagaaaacaagaagacaataatatgttaaaaatggaaaaaataggttgaggtattaaaatttcattgctacctgaccatacatgaattccaactgcccttttagagattcataaggctcctctgtgcagcttatgcatactaaataaattggtcctttgacaagaaaaaccacctgaacatgaaatcacatgccagttaattaactgacaacgtatatgagggagtaaattcttatgaataatagcagtataattaaaaggtttctccgttcataggactcaatcccttagtaccacgagatgtaagccttccttccatgtcaaaatcataaaattactagttataagtctagcataaactaaatttattaaatctccaagaagtcatcatttcgttcacatctactcgtcctaacttaaaccaagcaactcaaaaaatacaataaaaattaaaagaatcagcaacatagaaacaaactagcctaggagcccttgaatttgagaaatagtgttttaggttttcattcatcttgcttattttatttataaaaaatcttctaaaaaaaggcccaaactaaagcccctttaaatcttttaaaatcctaaaagcagccctgacaaacagctaaaaaaagcccaagtgaacccacaataaaaccatcctaacacacaattaagcctcaagtgtgcctcatcaataagaggcgtatgaggcatagcctcaaatttggttttgaaccgcctcgcctgccaattttgaaatccattcagccattccaaccggaatgttttacccccagaatgcttaaacccgcttaaaggagcttgtacttgagttcaaacctagtatcacactccaaccttgttactttttgtgaagcataaattactgatcatacaccaccgcataggtggcccagtaaaataaagtctcatatcatggagttactcgttcaaagtataaaaaggaagttctcattattcttccaatttttctacattcagaacagcaaattaaacctaaagttgattgtgtaaattatgccaatgcttgcataactagcggttatgctttactaatttgtatgatcaacacttcagtaagaaagctttaaacatatagtaagtaagcagacctggtgtttcccagcccttattaatttgacacgatcccctctgtatgaagaaaatcagtgtcaagggctgcaatgacttgaattaaaatataatgcataaaaaaggattcaggaattgtacccattctcaacaaaggaaataatagcctgtaatgttgctgaaaatcctgctagcttgtgttcatcaccgtatctgaagttaataaaagaatcaaaagaagagataagacaccaaaaaacaatatcacattttcttgcacttcattatgcatataaaataaaaaggtaagagaggcagacctcgaatatattggtttgccagagttactaagaatgaagaaatgcttcttccttttcctccatgatactgaagcatcatcctgcgcttcaattatgaatcaaacagcaaataacactgcaaatatcatcatagattctgccagttggcaaagtaatgaaagcaaaatgatataactaaaaaactcagctaggttttatatggtaattttgtattgtatgcctttatttacagtgtaattttaatttatgccataaaacatgcccttcttgccaattttaccaaaagctaataagaaatttctctgattctgattctgattatgacataactttaaactagctaaagatgcaagctttttagtttatatgaatccttgtataagaataacataagcaaaaaagggaaagggaaaaaaaaagagcaaagaaagattagagtcactactctaattttctttacagatttcaatgtagaaataattcaagttcattcaaaattccatgtttcaacacactaaactcaaataccagttgatacattttctcttggataatcactgagaaaatcactcaagaaattatctaacttaaagagaaaatcactcaagaaattatctaacttaaagtcctctcattctgagaatcactgagaaaatctaacatgcaatacaaattccaaatgggaagtgagtacctcatcaacatggcgttttccaggcacccaagaggcttgcgaatccaaaaccccctcaccatcattattcctcaaatcctttatctcatcatttccaacttcatcaatctcaacctcaccactactcgcaccactacttcctctttcaccagcatacccactactactagggcttcccggcgcatccacctcaatctccgaaacagttctcccccaaacaacaccaccacgtacaaaaccctcaccaaccgccacacctccttcatcctcatcattctcagcgtcctcatcttctccctcgctcgccgaagcaaaaccgataccgtcttgactttccagattgggaggcggcgaggaaaattcctcaacggtgtccgccaatgctacggtcgccaatcgatcctcgactgaattcgagtcgacgaagtcatcatcgccggaggttgaagaagcggaatttgatgacattgaaaaaaacaaaaacaaaaaaccagcgtttggcggagaagtcttggaagaggtaattagggtttgaaaattcgagaagaagaagaagaaggatattgtggtgtggtggctctgccagtctgtggatctgagtcggtgaggtctgaccagtaggtgagaatgggttgattccgataccggttccgaaactgttgtgggtttcgttatggactttacacaataacaattttttgttgggaatttttcatttttacggattttaaagtataaatttgcaaaaatatcactttttcttagggagtgggtaaaaagtcatataatccaacgaccgatccaatcctaactgatctaatagaatcggagatgtaaattttaaaaatctaatcggatgttgttggatgggacatccgatctaatggatgaccgactaaaccgatctaattatcatcaaatggtcttctaattatatttatatatttttaaaatacatttataattttatatgttttatttaaaaatatata

SEQ ID NO: 78926 - DNA, 6576 bp, Cannabis sativa
  modified_base (4020)..(4025): a, c, t, g, unknown or other
tttttttttctttccttcatataccatatcatatacaaacgatatacctatgaccaatatgaatatactactttaaactaatatactattaaatgagatttttctccaagatatacaatagcatacaaaaactatgtactacaatcataagcaaaaataccataatgaaaattgatataatacagtaaaataatttaatattccacaattttttttttctttttcttttcttcatgatatacaattgaacataaagacaatattccctagtgaaatataactatacctcaaacttaaattaatattccacgttttttaattttcccctttcgatcattatataccatagcacattaaaataatataccataatgttaaactaatatactacctttcagttttttttaatatactattacacataaaaacaatataccattgtgtaaaataattaaataactacaccaaacactttaaaacatcataccacaaattgaaaataatatataccactctctatttttttttttttatttcttaatatatcataacacataataaatatataccacagtgcaaaatcaaatgtaccaaaaacttaaaactaatatcttagtggtaatttttatgttctttctttcattcaagtattccatatgacataaaaatgatataccttaaaaaatatgaatgtacaagcaaactaaactaaaacactttattttttatgttattttgatgttgttttattgttgctttcatgtaattttttttatttgtttcttgtatttttatagaataacataaaaatatatataaaaaaaaaactttgaacgtaaaaatataaaaaatttacaaaaattagtgttttatgtaatcatcccttttttatatttgtattataggtgtcttgagttgttaatctaattattttttgattattttatagttgatttatatttattgtgaaattaatttcttgttgtttttaagttgttttcttgctttttcctgagcaaaatgtatttttgtaattttaaaaatatacatgcgtacttttgtaaataaaaattttaaaccgtaaaattataaatataaataaaaaaatggtatttttgaaaatttcccaaagattaatttttcttttattctccacattttttcccttactttcttctttccccagcaaataccaacttccaaacatagcctagttctaaagcttggtagcaattacataaagagatatgaaatttatgtatttacttgggaactaaatttgttgggttcccattaaattttaacatcatgtaagagcaaagaagaaatatttatataaaagtatatataaaatgttcaaaacctattactgtaaggggttccataaacaataagataaggtacagttctcacaactgtgtcaacaggtattgcaaagtttacaccagatgaaactcctgtccctacaaaaagtaaaaaataaaaacacttttcaaacataacacttctaaacatgtaataatgtaatgtaaatgtagttaaagatccaacatttattatgttaacaaaaagtttgtacctttacgagtgaaagttgcagtgtttactccaatcacatgcccatatgaatcaatcaatggccctccagaattccctgtttatgaacttgttaaatatctttgatatgaaatctacaaattcacttgaagaatgataagtaatgatattcaattgttaatggtgaaattgaattggacaacaatctaataagagcaatcatattgacagtcctaaatttaacatttttacaaaacatccaaaaatcaattttttaaaacaaggggttcaatctattgatgatgtaattcaatagaatgattaccagcattaatagctgcatctgtttgaattgctcctctaatggcacctccattgggtgaaggtatctccctccccaaaccactaaccacctgcattatttgaaagaatgaaggaatgaagtactagagatactatttgaaactgaaagataagactaaagaaaccatgctaaataaatataccccagttgttagcgtgttctcgaatccatacggatttccaatggcaaagcagctctgaccaacatgtaaattgccagaagtaccaacagcaacaggctttatttcgtagccttcaacatcaacctggaaatcattttaagttaagctcttccaagcagaagtacattaaacattgtgaagccaagccaaagcaaaagtaacataactaagaagagaccatgaggaaggagtcttgtgtttgatattttacatctgaacttgatactaattattctttctcaacatgatcctaacttaggagttaggactcaatttagcgcttcacttgatcgtatccctctcaaggggtattttagtgataggttctattggaactggacaatcctgtttggtcaaatacttagcgaaaaactcctatgttcctttcattacagtaaccggtgaatagtaaagggtcttcactagttcggtggcagtggcatctttggttggatctatgtagtttcaagttttctcttcaaaactagatcaaacccagaaaataaaatgtatggttgaaaactaaaccttaagaacagccaaatcatatgcaggatcataaccaacaatcttgccttccctgtaaaatccattgcctttctcatcaaccagataaacctgtcaacaaaaccccccaaaatgagctttattcactccaacaaattgacataatcaatttcagcagttgaattaaaggagaaaaaccttacaacgctgtaatccagttgtgtctgtaatcaatttagatacaacatggtagtttgtaacctgatattatagagtatagacaaatacatcactagtttcaaattcaatagcacaaagagtaataacaatgccatgaaaacatcccaagttgaaacttaaaacataaaatgatagtaaaagcttacaatgtgaccaaacttatcccatataaagcctgagcctgtcccttcaatttttgtactgttatcctctttaagcaatacttcttctttttcagaagtgttgaggtttttgtcaatctcaatgtctttaatgaaaacaaccgatggagaggtttcctaaagacaagcaaagattataaataaatgagcccaaatgagaatcttagtccataagctcaacaaactaaataaagattatgaacatgatacccaactgagtatctcctctgattattaaccaatctcactaacctctcaatctcaccaaaacaaaaatggttcaaccaaatggatctgctacaaaatatttaaactttattttcgatattgtaaaatattccaaaaagtttgaaaatttactggtaatctaattgataaaaagaataattagactaaaaaactgaactttttgagcctaaagcctcacccaattgattcaattccaaaaactaaaatgtataaaatgagaacacaaaacattcatctagagagagagagagagagagagagagacctgaaaaagctgcacaattcggtcttcttctagctgaagctcatcctgttgttgcagagcaatggctggtgagtgaattgggtcgagcaaatggagtaaggaagcagctaaaagactttgacccaatagcagagtccttctccttgtgagaaaactcttctgggttctgcttaaaatcgaagatgaagaagcggaaatggtgggaagaatcggagagggagcaagggaacccaaaaccaccatcttcacacataactatcacttcacttgttcttcactattcaatataatatatttctttccttctaaggatagactaagcttttgactacgtgggccaataatgggctcaaaagcccaatatctttaatgtctccattttagaaaaattaacacttttatttttaaactttttaatagtaaaattgtacttttgaaaaaaaaaatgtgttctataactatttttatttttcannnnnnaaaataaaaaataaaaatgtgtttagtaaattttatttttattttcatttgttaattttatttaagttggatccaagatcggggctggggtccaagtttgggtctggttagggtctaggtcgggtctgagtctgggttccaaagtttaggttgggataggagtctaaaatattgattaaaaaaactaattaaaaaaatttcaaaagtgattattttttcttcaaaatttgattctcaattaaaaattgaaaaagtaaagaatatgattttagaaaatagttaaggtaactttcttaggttatgctttaagtaccaagaggtatagaatttacaatttcaagaagggtagactaaaggttgtgattgctaaaaatattgtttttaatgaattggaatatcctcacttaatgtccagaacatgtagtgtgtctccgtgtgatgcaggaaaaataggaaacaagaactctataaacatggaaatggattacagaacgaaacatccagaagaaggttcacaaatgaaagctagtacgaaactggaagataatgcgcagatagaagctggtgctaagctggaagataacgaagaccaaataaaggttctggaaggactcggataagaaggtctggaaggttatcagttggcgcgtgataaaatcataagagagattcaccctccgtcaaggtttgtggaagcagacttaatagcatttgcactcaaaatagtacaacaaattgaaatttaagagcccgaaagctacgaagaggcaattttaggtgaaaacaagtcaaaattgctccagtccatagatgatgagatggattcacttcgaaagaacaagacttaggttgttgtactaaagtcgaaaaatacaaagattgtggagtgcaaatagattctcaaggtgaaagaggaaaataatgagaatgaaccagtgtggttcaaagtcatgttagtggctaagggttttactcaggtggaaggaatagactacattaaaatcttcttacctgtggtaaaatacaaggcaataagattgatgttgtccttggcaactcaaatagaatttgaagttgaacaacttgatgctaagattgctattctaagtggattcttggatgaggagatctacatgaagcaaccacctagatttcaagtgaaaagaaaaagagttgagttagtttgcaagctcaacatgtgatgtgcttatatggtttgatacagtccccaagataatagaataaaagatttgatacttatatgcaacaaattgggttcaaactatctaaatatgatcattgtttgtattttaagaatatgagcaatttacagttgtgtttttattgctctatgtagacgatatgctcataatgagcaaagaccaatcagtgatcaaaagtatgaaagccaagctcaaagagagcttgagatgaaggagcttggtccagttcaaaagatacttggtattgaagtttcaagaaacatgaaggaaggtacaatcaacttaaagcatttagggctcatcaagaaagttatttagaagttcaacatggaatatgcaaatagtacatccgtctcattaggcgaacagtttgtctggtcgaaggacagtgtccgaacagtgtgaaagagaaggatgtaccttatgcagtagttttaggatgtttaatgtggggagcacaaagtcggacatagctcatgttctaagtatcctaagtcagttcatgtccaatttgggcattgaacattgaaaggccctcaaataaggtacttaaagggcacttgagatcatggtttgacctatgaaaaagcaaaaggagaactggagttgaaagggtttgtggatgctaactatgcctcgaatagagatacgcgaaaattaaccacttcttacattttcatgacaaatcagaactgtatatgctggaaggcctagttacagttcgtggttgccctttccaccacggaagcaaaatttatggctaccacaggagcatttaaggaagcttcatggcttcggggaattatgtttgaattgaaataaatataagacggagtgactatgtactcaaatagccagtcctccatccaccttttcaagtatctagtttatcatgaaaagagcaaacatatagacataagactctactggattagagtgaagatagaggaggggctggttgatttagagaaggccagaacagaagataataatgctaacattggaactgaggtcttaacaataaacaagttcaagtactgcttggacttgatcaatctcagaagttagtataatgagatatctagaacaccaaccatgatggctacattctttctttatctctatcatattttaatttaaagaaactaggtagaatttgtggtatagttcttccaaatgaaaagatctctatttgtggttctggttatagaaagttagttgtctcgcagaagtgtgttcccaggtgttgaccgaggttttcggcaactaataaaatattataaagttagtgagctgtaagaaattgagagaaggatttttacgtggtt

SEQ ID NO: 78927 - DNA, 2603 bp, Cannabis sativa
aaaaaaagtgactaaatccacttaatttcagttgtgtattgactaaggctaagttactccgcttctgtactaaaatcggaaattgttcttagcttctttcaagactaggagataatgtttgggcctagaaaaaacacaaacccaaatgttgacttccttttattagggtcggatgcataatagaaactagttactgtgaggttagaactaattttaaggtgtaaaccagtgtctgtgcttattatgcatggacagtacttaaattgccaacataaattttatttggaaaaaataaataaatattttttttcgaattataaaacgagagctaaaatgaattgaaaattacataactaaacaacctcaaatttttgggtagagcttttaggctatgtttagtaggaagaacgaagagtagaatagatatagatagagagtctaagattgatggagacatcaataattctcatctatattgtttagtattaaaagtacaattaaaaggatatagagaaagttagttattaaaatttaaaattatcataatatctttttttagtgtaagtatatgttatttttttaaaaatgataaatttagtatttggtatatttaatttgtctttatcttaaatctttccaaatgtggatagattagacattcaactagttttgaaattttgataccctcctggaagttcaaaagtgacaaaaatgcccttgtgattttgaaaacactcacataattgtgatttgtgagatgaatttttgagaactagatttagtgcaatagtttgacgatacatcacactcgtatgacaattgctttaatttttgtactattcccaagtctggtgattacatgttaactgttcattaatatatctatgatatgtatataccctttatataaatctatgagggaaaatgtaggtggtctttgtgatctcttcaatttcaattgaactcctctttgttttgccttttcattggtgttgaaagtgcaagcaaagagttagaatgatgggaaaaacctattgagattatagggcagtgagtagaactcttcactccttgtgtctgaactaaagaacctgaactttacccaccaatgtctgccactgtctatgcgagttaccccgtctcggtaaccatgagtagaatccaaagtgaaagcaatgaggatggccactgtggctgcagatgagaatatcacttgcatcacattgttgaactgccaaaacaatgaaatttattatcatattataatcaattgttcaccaaaacattaccacaaaatgatttcagcttatactcactgctgtcaaaccagtattaactggaccatgcccagaagtgagaagatactgattgaagtactgaggcacagaaagtcccatgaagagagaaaatcctatgataaactttgtcctgaaactgtttaagttgcagaactggaggaaagtaatacctgcggaagctactcaccaaagggtatgtatgttacaaatcatagttagtttagactctttagagtttattgtagaccacttccatagatttagattctaagactaaacataagtttataacctatatttcacaaaagttagatcagacagaatgtttcctacgaaaaatacttacccacataagcaaagagaacacagtacaaagcagccataataggcaatggtatagaagcaagaacagctccaaatttccctgttagttacaattcataaggacaccatcaaaccatgtagtcattttattctttaatacagagaatttaagactgttgtctctctgattacctaatagggagaagaatatcacaaatactgctgatatctgaacgactctcctacttccaacacgtgtcaatcccaaaagtcctgcattttcactgtaaaaacaacatacattagaatacagctatacaagttcacacattttaaaagaaagccacaattaaggcagcctcattctggctttttggcaacatgactgtacagtctcaaacctcgaacaacaacttgtacacttgtcatttctctcgatgattgaaagtgatgaccagtaaagattataaaatttcattaggcattgaaattatgtcaaatgatggttgtgtcaaattgagttaagcaaaatatgagtagcaaacattctcattcaacaagaaatactacagagagtgaatctaaaaattacactgatgctgagcaggtactcccagtcccgaataacccattcagtaaagtgcctattccctgtcaattaggcatatctactattttagtatcaaactgaactctgacaggtatgtatgtctgatattatgcttaatgataaaatgataagtatttttagatcacaatggtacctgccagccaacacctcgactgagaacagaaggcggtggaattgtggcacttgcatatctagacgctgcaatgtatgtaccaatggactgctccaaacaaatacatttgttaagcttaaaagtagtgtgtgagctcacaaacttcatatttaaatgctagctagtagcaacgatctttactgccatttactattgtaaacaaataactaagttataa

SEQ ID NO: 78928 - DNA, 6645 bp, Cannabis sativa
tcctctttcaacttgtttagtggcattaagaaatatattttatttcactggaaaatggtagagggaatagttatagccttacaggagatgaaatctacttttttattacaaaaacaaaatcaactaacaagatttgtggataacacgtaggcttgacgttttatgacactgcaaaagaaaatccaattgagtgactaagattcaatttctgagtagttgcccaggtttatattcctgggaattggaaggtccagtcttaacttttgaacatcccttagcttaaaagttattgttcttctaggaaatatactgatgaagttttaccttctcatttagtggatactgaatattttatttttatacttaaaacttttcagaaatttactgttgtggaaacttaataattacacctttcttcttggaatatgctaattagttcattcttcttaacaggtttctgcctttctagaaattcatgatatagctggacttgttcggggtgcgcatcaggggcagggtttgggcaacagtttcttatctcacattcgagcagttgatggaattttccatgttttacgtaagatttagattgtcaagaatgcacatgtttgaatttcttagttttttctactagcaaattagtttaggagggtatacagacaaaaagttagtatacaattttttggtctcgctgtgtgtcccaggtaaaaacttgttgaagctccatcacttctaaatccctctagctgtcatcaaataaagaaagaaatcctggaataagccctgttctttatttctttctttaatcatgtttttgaacctgacaaaaaaattaggataatcttgccttgaattctcactcaaagacttttaagtttcattcttctgtaggtgtaattatacttctgtcatttattttcttattttgagattccaaggttttcggtccaccaaatatcaccagaatttccttgtcgcagctattggtattttgtttctgctgtcctgtcttgacagcattgtatgaaaactttttggtaaatttgggtttatttggtggatgaactctttcaccccctgctctcagtcctccataccagcatggaaccattatttaatatttttattgatcaactacctcaaataagttaatctacagactactaatctatttagcagcaaccagtattgtatttctaatgtcaacaggtagaggatacttttcttattgtatgtagctgtagaataaatttgctgtctacctcattgtgggagatgaaagacacgtagttatttgcatccgattgtagtgaactagtgtgaaatatagtcatcttatatgagttgatttgttaagttgggttctcttcaatattgcctcaggtgcatttgaagatcctgatattattcacgtcgatgacacagtagatcctgtgagggatttagagattattagtgaagaattgcgactaaaggtatgtatatcacttgtttctacaatttattggcttgtgtgtataaatgctccattgtacttgaatttggtgtgcacggtgcatttaattctttcagcatctcttcatgtatatagttacatttccctactatatctcttgcagtttaagagatagctgcatactcacttttaaccaagtcaattttggtttctttcaaagcctaccaaacatgtaaatgataagaaccaaaatcagaaaatgggtactgaaccttttccattgaatgatagaaaggaaaattagaggagagttcgaacattttacaaaacaatccacaccatctactctcccctcctttattcattaccacctccacaatgctcatgttctagaatcttcctaatagactctagaattatccccattctcatattctaggctaatgaattaccttgtgacctgccctctaagagtacagctagctctccttgctaacaaatcccttataagttaaacttataacataccccagcagccagctatccacactaacaacccagtcataacagtagagtacttttcaattcttcagacttatcacttggtaattggagatgcatataaaatgaaaaattgatataccatgcttatgtcacaacaaaataagtattggcttgtatgatatggatattcatatgttccactatttgatgttcatgtatattccttccattatatatactgaagagcattcttgtaccctctagaaattctatactacattgaaaaatacattaaccaattgtcttacacattaacaaggtaaaaggccttcattcaagtatggaacgattaggagttaacagtatattatgggttgcaccatttaaaattactggttgaatggattttacaacctttgctcggtgctattcatttgcaggatattgaatttatggagaggaaaatagaggatgttgaaaaaagtatgaagaggagcaacgacaagcagctaaaagtagagcttgagtgctgcggaagggtatgtgttgtacataaagatataattattgtttcattaaatactcttgcagctcttgtatgtcagagcttttactgatgtataattatgtcaaatgtccaattcaattagtaaaatgtaatataaatgacaaaagaagagtagagttaatcgttagacatcattttcttttgtacttgtatgaatattttattatcaatttcagaagcgttctgatttcttaagatagtaatctggcatgctcatatcgtttgaagggtgcggtaataatgcatatgtatttacaggtcaaggcatggcttgaggacggaaaagatgttcgtctaggggaatggaaagctgcagatgtggaaatactgaacacattacaattgttaactgccaagcctgttgtttacttggtaagattcatttttttttgttgttgtatgatgtaaaaatattcattttttatatctcatatttcttcaggcatttttttttttttaaattcttggcaagttagtcctcaattcttttgttttttttcttgaaaacttgttctccacatccatccaagtcaggtagcagcaactaaataacaaaagcatacccaaaaggagtcctactcaataacattaataataatctcagaagtagcagcaaatagatcacaaattcaaacggaaaacctgaagaacttcatgagctagagtgaggagaccgctagagagagagagagaaagaaagaagaggagatcgtgagaggggtggtggttggatagagaatcatgttgtgagagagaaagagatattgttttaatagttgtcgcttaattttttaagagaaattaatggtgtttatcagataaaattgggactaatttgcttttaaaaaaataggttaagaatcagtcatacaaataaatctagtatttaatgtgaaagataccttatctgaataaaaaattatacatcctccgatatttaattctgtattttcttcacaggttaacatgaatgagaaagattaccaaagaaaaaagaacaagtttttgccaaagatacatgcttggtacgatcattcataaactgttttttctcttgttaatttgggtttacgtttaaagtatgtcttttattccacattttgtattattgttaccaacatgccttacttttctgtacattctacaccagtgtcaacttaccaaaattttacccatcagttctttttggatcgaagtgattttgttcagcaacaggaagaactgcagctatattcttcacactgaagaatgcatattgtttttcgcaagaaacaagttgttttgaagaaagaatttgataaaggaggataaggcatccttataaagaaacacaccataattagagcaactaaaacaaaaactattgctataagaagttattttctagccaagagtatttaaggaaagaaggaaatccctaaattccttttcctttgaatcaaatcacaagtatctttgtaagaaaacagccaagcaaacacccctttaaacgggagaaatgatttccgaacaaaattaaaaggcttgacattaaaaagaatatcattatattgtggcaaattgttattaagagtttcttttggtaccttagtattatcaactttttattttactctcaagtctttttattattattaagtaatatctccagacagttttgttagtattatttatatttgttatgtttggatatttcctatatgttagaaggaataagaataagatcgcaatttcttttctagggtccaagagcatggtggggaacaaattattcctttcagctgcgctttagaaagaaatcttgctgatttgccacctgatgaagcggcaaagtattgtgatgagaacaaagtacaaaggtgaattctactttttatatccttgcttttattgaacctccaactacccgcatgcggtttacatatttgtctatcaggcagaatgatattgtaaagtgtgtactttttaataagatactaatagtgaatgctgtcatataatatagtgatacaattacatactaaaaacggcctttacaatggaaaacagcttaaactagatcccctttgtttgtgattataggaatccattcttttttatttgaatgatttgtaattagttacgagtcaccaaataattattctgttttctttctattccattctgggctaggttctggttgtcttttttttttctcctttcaagtttcatctctgaagtttgggcaataacataaaatagctgttccataagctgtaattcttttgatcttttttagttcagagtcttttgttgtgtatcctttaatgaatcactgatatgcaaaacataggaattataatttgtacgagtacaatgtatttaacattgatgcatttatgttgcagtgcccttccaaagatcataaagactggatttgcagcaattaatctcatttactttttcacagctggtcctgatgaggtaaaatgtcttcaattttccatctttttttactttagcttccgctatatttgaaattcacggtattaaattgtttattttgtttattcctaattgccttcataactcttgtcatggatgtgcattagaaatttagaagtttattaaatttccattcaaagcctcatatgagctaccaaaaatactattattgcactacacaattaataactgcagacatattactttaattaccaccttaaggtgtttgggtagaatgatcaagtctcaagaaagatatgttgcagacccgagtttgtttctgaaaaatgagaagctgtcttttcctgtgcttgataacttattttctcctcccatgacaaatttatcatctttccatcttttccaatttatgtgaatgtacatcctggtgtttcatactttcacgttgatgatttattggctcaaaatgtttctaataagttgccttttgcaggttaagtgctggcagatcagacggcagacaaaagctcctcaagctgcaggggccatccatactgattttgagagagggttcatctgtgccgaggtccctgctgaaaccttgattctttttactttctgtcaatgagttttgtttattacttttagttgcaactcttacttcacaagaattaactataagtgttaattccataacctgcctaatgttagtgctgacctgtctgccatacccaatgactagcatgaccctcaaatcccttatgttagttggaagtgtccccaaaccccccctctctttaaaagcagagaagaaaaagtggaaagagagagcaagaatgattgtattttgttttaatagtaaatatttagccggtcatagctgttctttaatatgtacagtttctaacaaactctatattgaatactcaaaacttaaattggttttcaagttgtactagactttgagagatcagtatcctcaacttgtgtttgattcttctgagcttaaagttccaccctttggtgtctccggaataatggggatgggatgcccaagtcccaaatgaccccttgagtttggagccaggcttgggtggaccttatggtttgtttcggtgttgcagcctaggttatatcaatattccttctttttctcccaaaaacttgtgcatggtaataactaagatatagttaattcaaagtttttgaaggccaaacattttgttactgctgttgctttatttttaggctcacttctaaaaatctatcataaagcgttatcatgacatgttaattttgtcaactctttttagtacatatgttggagcaaagaagttacttatttggattttctaacaatgtgcaggtcatgaaatttgaagatctgaaggaactcggcactgaatcagctgttaaggtattctctacaacagaaagtttcaattatattttcgtaattacattcctccaccgtcttcggcatttttaatcatattaatgagtgaatttagtgttgttataattcatccaccgtaccagaaattaattttggattcccaagtgataattatttgttacttagctaatttatcgatattcatgctcttgaaaactgacttaggtattcattggaaaatattgttagcacttaattttctctccccctaatttt

SEQ ID NO: 78929 - DNA, 6963 bp, Cannabis sativa
ttgattactaaggattgcttggacagttaccatgctatctgtctccacttcgatcaactaatatggtggttcactcttttgttaaagcttctatattatatcttgattgtaattttagcttggagaatgtcccaagtgacttgttactcttttagtaattaagtttgatggttaataaaatgttgattatcctttcgaaacaaaatctatggaaaggaaaaacttaccaataaaaaagaaaattggcaagcactggctctcttaatggttgggataatctacattatgggcagcgaaattacaatatcgagaaataaacgaaaaattacaaaataaaaattgtttagagatcaaaattaaacttaattatttatattttataccacaaattgcacttctaataaaccgaacgggcgggtagtgggtcgggtacccaattacaaacatgcaagagcgaaagttgtctaaactgatacaccagaagtctctacttctcaagaatcgagctcctcccatggggatttcttcccttcctctaccatagatctcaaataccaattataaaacctgacccattagcaaaactcatatataatccaaccaaaacgttttcccaagacctttttctagggttcttctgcaattaaggtactgggtaaccgattattttgatttttctctacattttgtttttccacaacttttttgacttgggtttttcatcatttacatttgtcatatcaaaatttatattgggtttttgtttttttttttggcagaggcaatgtctgtgctgattgtgacgagcttaggggacattgttgttgatttgtactcagatagatgccccttgaccactaagaatttcttgaagctttgcaagtgagtttttttaggctattttctaacaacatctagtttttggcccatgatatttttttttaatgagttttgttgttctttgtaagaaaatggaaaaagatacaaagaaaaatgaataagaaatagggttttgctatatttgttaagtcttaatattctgttgttgattgcttattggtgatttctattataaaaatcttatcttttttcattctgttgtgaattttcaagagtcccctctttgaatactgattattgaattttggtgtaaaagtaacaagtgaataatatgatagattaaattcaatttagcttatcttttgagtgtattgaaatagatgaggaaatgtattggtatacctaagcttcttctctcatgttgtttcaggattaagtattacaatgggtgtctgtttcacaccattcaaaaggattttactgcacagacaggcgatccaaccggaacagggaccggtggtgattcgatatacaagtaagaaattttgtgtgtaactgttttgctactttctttttctccaccaagtattatcttcaagttataaaagttgaatgttttttactagttgttttaatgaagtgtccatacactatctttatgatacatgattatgttaggtatacataaatctgtgtaaatgttttcatttcaatttctacttttcagatatttatatggtgaacaagctcggtttttcagtgatgagattcatctggatttgaagcatgctaagacaggtactgttgccatggccagtggtggggagaatctgaatgcttcccaggtaaataagaatcagaccgagtataaaggattctgtggtttaaatagaatcctgtttaatactcaattcgacttttttattaacatcccattgatgcacgtgtgctcactgagttgcttttgctttcagttttactttacattgcgggatgatctagactatcttgatgggaaacacaccgtgagtattttgatcagttactaatcgattatgctttttgtggaactatagatttaaatacaaataaaggacatctatgtagaagaaatgtatcttcaataggaatgcaaaagattattacttcctttattctattcttctaatgatatatgcttgtcaaaagatgaaaagagatatgcttgtaaaagatagtccttatcatgtttagctttgtgaagttttataaatatgttcttttttcgtacttgagggaactggttttgcttctttctcattgaaggttgattctgttggattcataaatttatttatgcaagtgtcctctgacagaatgttgaacttctgctatcggttttgttcagcattcgtgataaaaacaaagaaatacttactttggactttggagttgatcttattttgttttatttatttattaagaagtgatcgatgatatagcctgtatgtcattgcaggtttttggagaggtagcagaagggttggaaacactggctcgtatcaatgaagcttatgtagatgaaaaaggaagaccttacaaaaatgtcaggtttgttcaactgggctatattttaggtttgttcaactttatattcttttgaatcacacaatttatttcttcacttatgtgaacagaatcaaacacacctacattcttgatgatccttttgatgatcctccacaactacctgagttcattcctgatgcgtcaccagaaggaaagcccaaagatgaggtaatggcgagttaatcacatactcactattggtacaatatgtatgatgtagttgggtaatgagctagtcatggttattggggtcatatatgtggatgctggttttacatgtctatcttttattcttgtaagactattatatcagttgccgaaagaaagttaaataatatgtatttctgttgggaacatattgtttctctagcttgttactttgctgaactccaaagctttaggttcgccaaagagaaatatcatactagcaattcttttgttgggttattcaacacagtggcattcatgtcggtcattttcccatgaaagtgacaactaacctctctccttgtaagcaggttgatgttgatgtgcgacttgaagatgattgggtccctatggatgagacattaggtccgcaagagcttgaggaaattatacgtgcaaaggatgcacattctagtgccgttgtgcttgagagtgtaagcctcacacacatacatcggtccttcgtttttagtttgtaatacggtttttgttaattgttttatttctactaaatttgctgcactcacaccagattggagacatacccgatgctgacatgaaacctcctgaaaatgttctttttgtttgtaaactgaatccagtaactgaagtaagcaaatccttactccacgctttcctcttattatttcttttattttttataaaacccataattgtatcacaaagatgttaaccatgctactactagtacttgtatttatactattatttgaatttaaaattaacaaagcaatctatcataatgcttccattttaatgcaataccacttgtaaaatgtgcaagatgctgtttaatggctcatatgttaatgcaggatgaggatttgcatacgattttctcacgttttggttctgtatcatcgtaagtgataaattaaatttcttgcttaatttgggtaactgggcacacatcaggggatttactaaacaccataatctaattttaatctacgatctcagggctgaagtaatccgtgattttaaaactggagacagtctctgttatgcattcataggtgagtttttccatcgaaatacttcctctctttcatgttttgatcttttttctcttttgaagtttctccattgtcatgcctaacatgcttaatatgccttttttccttttatcaaatatattgtgatggaattttttcgtgttgacttttgtcagagtttgacaacaaagagtcatgtgagcaagcatattttaaggtaggttgaaggttaaattccttcttttagtttttcctttgattaaattgtatttcaacttgttcaccaacttcgtgtttgtttgcgggcatggataggttttatggaagaactcatttgtctttctttggtttatctatgattttaatcacatagatggataatgctctgattgatgatcgaaggatacacgtcgattttagtcaaagtgtctctaagttgtggtcacagtacaggcgcaaagaacacaaaacaggtcaaggtaagcaatatactttgtagggtaagggctgatatgtctcaaaggtaatgagaggttttgaaatagtgttttttctatgttaggtaagggctgtttcaaatgtggtgccgatgatcatattgctaaggattgcactgggggtaccgcaatcccacagcagcatcagaagtacatcttaaaggacgataatccacatcgaggtggaggtgacaattcaaggttagttgagttaaatatggtcactgatatatcattgtgcctctatttctcttctctgatgttaataaaaattctaggtatgacatggtgtttgatgaagacattcaagaaagtcctaaacaggatacggggaatcggagccaggaaccagatgtaagagcagagaaacagaagattgagaggccaagtttggaggagtcaaggcatagggatataaataaaagagacacaagacacgggactaggcaggccgagaaaagtagtagagaccatagaggtggtgaattgagacgagaacgggatgatagagaaagtcgacctggtggaagtagaagcagtcgagtttatgttgaagagcagaatagagaaaagcacaaggaaaggcgaaatgaccaagatgaaaaaagggttgaagagcgagattacagtaagaaaagtgctggaaatggccgccatgaagaaagaagagacgacaaatattacagaaaagcaaccgatgatgataggcttagggaacaaggtgaggacagagattacaggaagagaagtgctgataacgatggtcgagcagagaggagggatgttggagattttagaaagaaaagcggggatcatcgaagctatgatgacaggaaagatgatagagactacaagaaaaatgatgttcgtgacacaggagatgaacgaagggatagaaaacgaggcgctgatggtgatggctacagagacaggagggaagaccgggaacacaaaagaccggaaacaggtagcgctgatgagcgagaccgtgatagaaggcaaagatatgacaagagaagatgagtgtttcttcttaaaaaaaaaacaaggtggtggtgactgaagtagattttcttttgtggtcattgtggaaccaagttttggttttaagaaaaactatttattgtctccagcattaaaagttcatccttgaatttgttgtagaattggcatttagacttgtttagacatgagacttaatagttgagtaatgatatgtgcacttaaaatatgaatccgaattttacagggatgtgatcgttttttttaaccaatcacaggtttttttaaaatgggacacattaccttagaaaataatatttgggtaattcaatttagacaagaaactgacttgattaattaaatattttctaatctaccaaagctatatatgaacgcattaaataataaatgtttattcccacacactactcagtgtgattgtatatagttttgaactaagaatggaaagttttacaattgtagtgtctagctatggtgtttgggttggctttgtgacaattcttcaatgcaacaaaaactaggcttatatcaaaagagaattaatgaattgtcacctttctcattatgattatgcaaattgcattgtggttttttataggtctaaatttggtaagtatgcctaaaaatgatattggtatataggttggataacctgaaatgggcaaatctcaaaggcgggattttgcagattgcagactctaaactccaatttactataatggcctatagtgggatcctcatttctcaaccatttgattcctctatctcattaattttcaagctatttaaaccatagataataagccttagcttaatcaagttgtgacaaacttgagtgagactaaaatggcttactctaaaacacaaagcttttcacttgttcttgttctccttactctttctcaatcctttcatcaacaccctcatcttgcaaaagcagacacgaaactgatcgaaaacctctgccacgctaccgaagttccagacacctgcattcagtgtctccaatccgatccctacgctgaattcgccactgacatagaactcgctattatcatgatgacctgcataagaaaccatgctgataccctgcaagttaacatggaagacactgctaacaactccaaaatcaagtctacaaaaagtgtttacaatggttgtgttaaggcatatatgggtgcaaagaaagatcttaatacagctacagagcatttgcagaattatgagtttgataaagctgagaaatatgtggatcaagctatgattaaacatcttgtatgttgtggtgacattcagaacaataaaaacatcactatcttaactgaagtggcttatgagatgaaaatttatgaagagctatgcttttcttcagagagaataattgagagactctagtatatataattatgtaattactaatattagtacttgtcataattcagatgtgtagttgcattatataattttgacaagattgaaataaaatgttgggtgtatttttttttatgattgaattgaaaagtcaccaaaaatatggccaggagaacccaagttcatagagaattgggagtttttcttttactgttttcttttttgatgaaaaactacaacagcaacaagaaaactaagaaaaacaatggaagaagagacacccagatagaattaaactcctcatagtcgcggaacactttagctgtcacctgttgaagctctaatctgcctctaagggaattgctgcaggcccagcgcgcaagatcacgagccacaaagtt

SEQ ID NO: 78930 - DNA, 5018 bp, Cannabis sativa
agattgaatgtacggaatatatttttttcttaccataaacagcttctggaggacatataaggtcttgatctccgccaatggctaaaatagggacattggttttgtggagatgatccttgtagaaaaacgttccactcctatcacgtaagccacccttctgaaaagctgatgttagctgcaacaaaagcttggcaggtatggtacctgaacagcttatcaaatgcttattaaatagtgataaataattattaaaaaataataaaaaaaaaaaacatttgcaacaacaatgaattgggaacccaacacaataggctcaacttacaaatggagattgaaaatacaaaatcaaaaagtttctacacttacaaaagttgttcaaaacaagcttttcgtacaattcttgccgcatcatctcttgagcagaaatttgagatttcagccaagacaaaagataaggaggataggatgttaaaggatgaatagctgaaattattgccccaactggaattgcaggaacatttagagcttgtgcagggtctgcctgcagtccagagtaaagcaataatttcttataccatatttattttattagtagtactaaagtaagtgagtcataataacttcattttactcaccaagggtaaaagtaatttgagtgatgatcttgaagacgtgtagtctagtgatgatgccaaagtagtaactgatgccaatttgcaatccttctcctcagaaccttaaaaacgcgacagaatatcacccgataatatttagtcaaacgaagacatattacggacaaactgagttcagttttcacataggtcttcaccaataaaaattcaaaaggcaccaatctcaattatatgagaaggagaaaaaaaaatgcatactaattatttagtaattgcacagaaaatgtgattattacagtaaactaagattgtctctatttcttgatgattagtgaattagaggcaaagttggcacctgtaatgtaagtgatcttcgaggttagaagactttgaaccaagtacaagaattcttgcatttttgtttaccaataattacttctcgaaatttagcattgcttataatgataaaatgacattaagaagcttagttatagtactataatgtcatgagatagaacacggtgatgtcctaaaagtttaggacattaaaactccagtgtcattgagaaattgttgaagctcatttggggtgagtatgccaatcaatgtttagctgaagtagtgagttctataaccagaccatataaaagccagtagaagcagtttctgcaccatcctttagacttagccttagtctgattttataacatttatgtaaaaagagagttccaacatgatgaaggatcttaacatctaaaacactctggtcagttactgaattagacagatgcatcaaacaggtagtcaattatctatattagaattcttcatatgtccctctgttgcagtcttccaatactatcagaagtcatttggatgtctgatcaaattggagaattgtgaaaaaaaaaaaaaatctacaggttatcatttacaaagtttaccaaaaattgtttattttgagcatgaataattagtgaagagtttttacaatgagctccgattttatcaaagacattagtactatattcacttagttaatagtaaaatcccaaagattatgccaactgagtacaatagaaaactgaaataataataagaatggagttgctccaaagaatgtaactaaggtaacgaatttataggtgattgcagtaaaagttagctttggaacttacagcatcgagagatcatcgcatacaacaaaataccgcccattgagtgaccaattgcatgcaatttgccatcttttggtttgcagtgagctcttatgtactccatctttgataaaagaaggaaagtttcagatatattgaacactactaaagtaatgctttgaaagtgaattaagctgaaattctcaccaaaggaaaaaaaaaatgatttgttcaacacatggaaatttttttcatatacatggcgatataaacaattaagcactccctacaaactagcatattggtgaagggtgtctaactagttattaacaggcaaccaatcctatacttggtcaatgtgggattttaatttatggtaaaattatttagttgtgaagatatacgagtatacaataagcttgaatattgtaaaatgaatataggcccgaaaaacataattctaagtttattttatcagagactaagaaacatgccacaataaaaatacgccatcttgttaatactaagaaatgtcacctcaccgcagcaggcacatcttcttccaggaagttatcgaaatcccagtcatatttaaacattaactcaaactgttgctgcaaatcttcaagtgtagcagaaatgttctcctgcaggtccataaactgttcagggaataatctttgactttgtctcatgatatctacgagccattgtttcattcctgtaactccggtagcgttaacagagttttgatgtgcttctaataaccctgcaagttcaatccttgcataatacgcttcataaaatgatgtaagatatctaattactaataatctcgatcaaaagaaaactgcttcaccaacccttatttacaaagttcgatgatctcccagatgaaggcatagctgtttttctcagctttgccatcaattgcagttgatccgagaccatataggtccaacttcttctggcagagtagatgtccgaatccgcaaaaccaccattttgaccataactaaatgaggaactcgttatgttctcagacacactgttgagagagtcattatctttgtgcaagtccaccaatccaagtgtgctcaacccagaacccctgacttccagaatccatgtatcatatccatttttcgacatacatcgagccaatgagttctggaatcagtccgacacacttatcaattggtatacaagcaagcaaatattcagagactattttttctcatttaatgctatacaaccaggaatatacattattatctctaaagagaaatgcttaataaggaaaaaaagaccacatatggtaggagttattacagtttttttttttctttattgctggaacgatctattcaatgaaatcaaaacaaactaatggaaagcacactaggggaccctctagcgatatccagcattaagagtaaaaactctagcactttgagcgagaccatcagcataaacattttcccttctactaataaacagaaaattataattacatggatggtatgtcctctaaaagtatcaaaacctctgaaggagttattacagttacagggacagggtatgataacatgacctttgaatctcttataccttccaaatagaaaacaccaaatcattttcattcaaacgtaaaatgtgcaaggaaaaaaaacagttgtcacctccgttttaaacgtaattctatttgtgtatccatatcatctctctcattatatatatatatatatatatatatataaaattatatacgggaagcacattacttttcattttttaattgtgtgtagatagtgtgtgcaagtgagtgtgaaaaatgaaaaatttgagcaagaaatgacaaaatttaagaacttgcaataattggatcgattggagactgaatcagacaaaacaaagataaaataatagtaatcaacaactttatcaaataaaaaatagcacgatagtgattagccgctagctatcctctttgatcatgtcttaaaaaatatatttattacaagtcacaatcagttcgagaccccaaaagaaagtaaacaaatatatacctgaggagagagatcgtatccaatggcatttgtggcgatccctgacagcaacaacaatggatgattctttgccaccacctgttcattcatacaccagatataaataataaatatgacttagaaattccaaatatatatataattcgtaaataaataaataactgttcacctctggagaggggaggaagcgccatagggcgaggctccagtcggagttgggaggcttgacaaagtgaagctcgtcagccgtacaaatggaaaagcggttgtccttactcttgtccaccgccgcgccaatagaggaagctctcactcgcaagctccacctccgagtcctactcccaggacaaggagtcgggtcgggtaggaaacccgggttcgacacttccctgttgccaaatgctaatgctgccacggatcgaatatccgaatggagcgcgggtccgaacaacatattattttatttcctagtttctactttagtgttctttttgaaaaaagtggtgttttaaaatgttgttttggtttatacgatgaaatgtggatagagtttcaattttggaagcaatgatattttatgttgagttaataatctcagggataagcttggcttgtattgtaagaagagccttcacaattttagccgtgtacgcaaaagccccataatcattatttataattttatttatttattttttttcaaacataattttatattgggatcggcatcccttgtgttttaattttataatttatttatttatttttttttttttgtaataccctctattttttattttgtaaatttgagattaaatctcactattaaatattaattaaattattattgtgtacatttttacataatatatttttattagcttcgaggttttaccgttatatgtacataagtgtacataatagtgatttctgttgccattgaataataaaatttaactaaggcttcaaatttgtaaaaaaaagtaaaattaaggagatatcgccaccaaaacaaaagatcaggatcaaattgattccaaaaaaaataaaaataaaagatcaggggttaagtgtctaaaaattaaaaaaaatatttgtgacggaattcttttaatattatgattgttacacatatgaccacaattaaaaaaaataataat

SEQ ID NO: 78931 - DNA, 3622 bp, Cannabis sativa
cacattttctaaagcatttcttgtgtatgaaattgtcttttatatatgttttgaatgcacataagctgaaagctattatgcttaccttcaagttggctccttctagtatagctccttctaaattggcattagtaagatctgcattctgagaatgtaaaaaaatataataaaaatttaaaatcaaaaagaagacatcaaatattttgcttgcttttaaggtcatcttcttcatgtctttatgctttcttataaactacacttttaaaaacccacttggggaaaactctactattaaaaatatcttacatttatcaatatagagttgagatagtaaaaaccaaaaaggagaagtagttgggtgattgagtttgtggatgagctcaagtagtttaaaatcttatacctgtaagtgtgcagaacgaaggtcggcctggcagaaactactatcgattaaacaagcatctgcgaaagaaaaatctaccatattagatatactatgcatttaaaataaaaggaaaggaaaggaaaaatattcaacttgtataactgataaaaaaatgtcaaatagaagataaaattaatccaaattcatggccaaataaacaagaaatgagagaaaacactctagagtttgtgaaacttaatatattgaatctcccttacattaattaatatgagtatttatatccccatgacatcataattcataacagctataatcaaataaaatgataacaacctaaggaattttctaaactattctaatgacaattactcaatatttatgagtagaaagttttttgccttgtaggtttgcactcctaagattagcaccagctaataaagctccgcgcagattggcccctgtaaattcacatcttttcaagacaaaataagatcatttataagttttttttgttgttgttaaatgaaagagagtagctctttaactgtcttactcttgcaaagttgcattatgaaagatggcaccctcagcatccacatcctaagacagaatcaaatattagcccaaaacacaaaacaaaactcagtaaacaaacaaaatcagaccaaggtagaaaggtatggaagaagagtaacctatacaacacctacccgaaacttggcactttgtaggtttgcacgcgagaagaatacatttctaagacaagcatggctgaagtccacataagacaaatcctacaattcatgaaaatatatacagtgaaacttgataaacaaaagtgttagctccaatgaagaaagattgctatagaaatcatatcctggctaaccaaaaatgtgaaattctacagcaagactcattatttttcactaaaactgtttttgcaacttgaaagtacaaggttatgaaaagttaccagttttgaaagatcaaggccagaaagtttaacaccccgaaatctaactctttctgactgtatacatttgatgacatcatgacgtgtcagttcattagttaaatcttcttcatcctcctttctacttaagacagcattgatttcctccacaagtccctgttatcaatagttcatgtaacacaagaaaatgaaatatggaaaatcagttatgttatttcatctacgctaaacgaaaaaatatgcaaatcaaagtgcctaactaatactactagagctgataaactctgaattatgttgaaaactgaaatcctgtcctattatgataacaatgcattaagacaagtctggttaattaaaatgaacaatcactggttcatctcatggcagtgattgcagtaaccatactcttataagcggattgatatcctcacaccaaatttgatgtgggatactcttatataacatactcaaagcaatatcatgatgttaacacaaaataagtattagaatccactgactggtagctgatagtattctgcttcccgcaaaagctctgaatattgagtgtgttttaatgtaggaatagcaccatctcttaaccaattaaggatgtgtcggaaatgttttccatccctatcaacaaatacacatccctgcaaattatcgacaagtttaatgactgatcttttcaaaatcaatattaaagcataaacttactcattgcatatcacaaagcatatgtatatgctaataaattatctctcactaccacacacacacacaaccatacatctctcagtaagtagtgactttttccattgccatttatataaaatcattagcataccataatactggtttcaaaatgcgaatgtgtaatctacaaagcatgtttttaatattcaaatcgactagttttatacggtttaaaaatgagcttgattgctttacaagtgttactttagaccaccacaccaagagtcatcataaccgatgtacagccacttaaattattgtgggataaaagtaataataacaacactcacggattggctatgcatatcctaaagctagacaatgagcttatttggatgaaaaaaatctctcttcctatttgtaatctttttcttctacgtcataaaagtgataatctgttttgagcccaaaaaagatcaatgtgggatgatggtttctgtggaaaaatattataccacaccaccactcaaagataggggaagcaagaatttgaaggggagagtcatgacatgttcatggaataaatttgaaaattaaataccatttcaggatctagacacacagtatgccaaccactgaacattgtagcaagcatggaattaggctcacgttgagtcaaagtatcaacagtagtgtaatatttcttccctcctgcaaccaatagtaaattacattcaattacagattggttttaactcatgtttaaataaaaaagaaaacatgtaaagcatcacaaacacaccaaacaacaacaataataaactcgggcagtgctacacaggtcaattcagtaatcacagcagctcagagaccaaaacaggaaccttataatggcagttggatggtgccttaacatgctcatataatgtgtaaagaaagacaagtatgattttgtatttgattggttaatattgttgttcactgaccttttttgtttataataagatacaattaaaagagcaaatcacttgtattgttcctcctgattgaattttccatgtttagatactttgaccaagttccaactcaaattaacgaatgaatgttatatttatttactaataatttataagagagaaagagtatgagttttcctaacaattctgaaactcagacgaaaaaaattgatcacctaatctccatactcttactactaaaacagatgatcaatacagctaattagctgaattagagagtaagctattgcttctatcctctaagtagtaattacatgaaaattaatcaaggaaagtcgatcttcatagacaagtggatctgatcataatctgtgaatgttaataaggtaatcaaaattgagggggtttttactttgagatgaacattcattcaagtaattaatgtaccaaagattatacaatatagaaaattaagcaaaggtatagatataacagagagaaggagctaacctatattgagacgaaccgtggaagacgagtctgaacccatgagagagagagagagag

SEQ ID NO: 78932 - DNA, 4407 bp, Cannabis sativa
ataatccgacaaaataatcaaattgaagactgttctatgttatatattttgtatattataggtaagaaaagtacacgaggttggcaatttaattcattttaatataatttggacttacgtttgtttgtttggtgggctcagaaaaatatatattacaaactaactaggcatttacaagggctttacgcgtgtgaaggctataagtctccaacctaattcaattttatcgtcttttgtttatcttttcaaacaagacttaactacgtccaaagacttattattaccaaacgtctttgtttcagtaccctatatttctttacaatattacaccattattttggtttgatttttattaagttttggtcctatttcctttttctgggaccagcataattattatttcattcttttaatgggggaaaaaggtgtggtattattttccgtactgatctttctaccaatctttgtaacgtattgtacttgaatattgacctttgtcaaactcaattcatatctctcttttttgtttttgcctcgagactatagttgttagtgttgtaatatatgatgatgatgtaataagttatggtaagactcaataataatcaacttgcttcttccagaaaggtaaacaaataagcttgtttggctctttcaaagggtagaaagtagaatcagaaatatcatttgagttaaaaaaagtaatcagattattatgattatatatacataaattccatatgctttgtatacatctctagtaactacaaacacaacaaaaaccattccagacaccaagttgttaatcctttataagaaagagttttttttcagtgtgaaacaaactcaggttgttaagaaaacatgggtcggaaattggatgcacttctagggagaaacttcaaggtgtcaaaattcaaaaccataacaaaactagctatttcaaggatttccatactctcaaaccagcaccaagctcggttgtcacatgcttgttctgatgttaaggagctacttcagcttaatcaccaagatcgagctcttcttcgtgtgagttttcattcttcttcttctttctctataaatccttagtagtacttacatatactaatcttgatatgaattttcttatgtattataacagattgagcgtgtaacaatggagaagaacatgttggatgcgctttccatgatagaattatactgccatctactccttgatagaatcaagctcataggaaaaaagaggtaaactgatatactaaacaaatctgatttattcttcttatgttggtactgaaaaaactgatatttctgagtatttttcaagaggtgaaacgtgccctgaagagcttaaagaggcagtatcaagcttgatctatgcagcttcaagatgcggtgaattcccagagcttcataagattcgcgccgctttaacctccaaatatggtagggactttgctgctcgtgcagttgaactacgcaacaactgtgaagtgagtcctaaggtatgcagttccattccattcatgtcatgatgatactcttcttttttgaaatttactctctttctgatcaatattcatttttttgggtggtttagatggtacaaaagttttcaaccaggaagccgagttacgaaaccagattaaaggtcttgaaggagattgcttctgaatgtggtataactcttgatttagaagaagatgattctgtgaatgatcataaggtaataagcttttgaacttttgccacttaataaagaagaaccagtgttgaaaattgtcattagattctgaatctgtttcaactttggtaacagcaagagaaactgaatgtgaagcaagagcaggagcaggagcaggagcaggagcgagagcgggagcggaagcagataaatgagcttactagagctgctgatgacttggatgacactactcagagactacaagacactgttttgagtgaagagaccaagcaagcagagcacttctctgaatccatgaaaactagaagaaagtacagagacgtggcagatgctgcccaagaggcttttcaatcagcggcttatgcagccaacgctgcaagagctgctgttgagctctccatgtctttatcaatagataagggttctgaggatcatcatggttcagataatgaaggagggaatgtgtcagattttggtacatcttctacaaccaaagctcatatgaccaacacttctgcagactcaagagagactaaagatttggataacaggcagagttttgaaaagattgaaactgttgaggaactgagctcggaatcagaatcagaaccagaaccagagttagaaggtgaagacgatagtactctcgaagatgtagcggagaaggaaaagaaacaagtacaaagaaaagtatcatcttcagatacaaatactgagaaaagagagagaggaacatgccttgaccagcatgatttggataccttcagcgtacccaaatctccattgaacaggcatcacagaccgtttaatgcaactacaaatgaccattgatcacatgatgacagcattaagcctttcatacaaatctacacagtgattgacgtatatttcacgtgttggtttcttgggtctgagtttacaagaatgaataagctggaaatttacaagtacagcacagaaaaatcgagataggaagatggtgtaagcatgcatgacataaatttatttaatttttttgtacaaatagttcatgatgagtgagcatggagtttgttctaggatataaaattttgaattaagtatacttttgagtgaattggatatagttttgtagaaatataactaggaaattataattgtgcttttaatgggatactcctcttgtattgatgtgtaattgcagttgtctgtaatatattctacttatccattctagagtaaattgggaggcatatgaattaaaaacttcagcagcttgcaagatctgaataatctaaaatgaaacaaattgaaacaagactatttaacttgtttctcagaataatgtaagaataaaaaaaccccatttacagatcaggaatgagtcatgagaaagtgagaatagcatagtcaagactcaaaacagccatgttgtgacttctatagcaatcctagctagctttaatcaaaaccagaacattaaaaagaatagaagcaattacagagcaaaatgaattcagatgtgttgataaccaccaaagtttgatacatacatgaaaacaaatttcataatcaagaacacccacatcatcaaataagtactatcttcagaaccaaacaaagcaaaacagatttgattagttatagatagaagcaagagcagaaaaataacaaaaaaatttctacatttagaattctaagacagattgcccccactttgctgccacaagttgatgatatcagtagcctgattgagaagaatgatcatctgtttttgagatatccaaggcttactctctagtagaaccttgagctcttcccaagcatcttttctgggccaaaagtagtaaggactaagagggatggttccatggccgggtattgtttgatcaagcgcaattcctatatttttctccatccaaatgaacttcaatacaagccttggcttctcaagtgccttcactaccactccaagcttctaaattataaacaaacaaataatagtttagcacaaatttttgagctctttaaccggagaaactctcagattaaagggaaaccataatgtgggcagttaccaaatatttatatacataaacatatgttcaatataaaaattaagttcattattgctgtgaagtattaataaaccagcaaaaattttaactacccactaattctgtattttgtatgtctcagagccacaagacccaaaattgaagtaatggaaattatgaacaaagaaacatgatagagacaaaaaagatgaacctcttcctcgggagaagtttcagttgtggcggattcatcaacaggggcctcctcagatacggcaggatcagcagcaacagcggaagctcttagctggaactttggggaggagtgagtgaggttaaggtttaagctggggaagaaggttctgggcttgggagaggcggaggtttgaatggacttaagattatgaaagtgggtttggggaggccatgttgagggcttgaaagttgcatttaagtttgcctggaagtggaccgccatggctggcatatccaccttatctatccaactctaacacggacaagaagaagaagaagaaaagaaaaagaagaagaaaggaggaaggagtatttgagtacagttttttcgcttcagaggataaggtgtcgggcaatcgaatccgaatcgggtccgttttgcctagtatattagtattgggctttcat

SEQ ID NO: 78933 - DNA, 6116 bp, Cannabis sativa
ataattatgcttgctaggttctattatttgccaggaaaatcaagcaagtagatttttgtgcacctttcagttatgtgacaaaacctattaatggtagtttagtgaaggttaagtccttattaccaaactataacagataggaatataaatgtatttactttaatactaaggattgcttcaaagtgctattcgtttgttgaatgctgcaattcttgtatcattgtggttgatacagtttatgaggtgactaagagactgcatatagtgtttctttgagtcccttcggttattcctgcatacctggtcctgctgttgtgctatcctcagcttgtgattgattgttttttactgtcttgaatcttgttcttcaggatccagatttactactactggatgaacccacaaatcatcttgatcttgatacaattgagtggcttgaaggttatcttgctaagcaagaagtaccaatggttatcatatcccatgacagagcgtttcttgatcagctctgcactaaaatagtggaaactgatatgggtgtgtctcgaacttatgttggaaattattctgagtatctcctttcaaaagcagcatggattgaggctcagtatgcagcttgggagaagcagcagaaggaaatagaacatacgaaagacttgataagtaggcttggtgctggggcaaattctggtcgtgctacttctgctgaaaaggtacaatgcattcacatgtataataagaatgcatacagtttcatttatcatcccagtacaaatagtaattttagatttctacctgtagttgttgaggaaatatttcattttcaaatgctgcaatatgttgttccatcataagttcttttggatattgggcaaaaagaaattggtttattattttcagctactggaagcttcagttgccatatttactacactattcttactatttctgccaccctgattttcttactatatctctactttctgttttcacttcaatatgcaatctagacttttataaattcttacactgctcagacctaaaatacaatctttttaacagtatgtttcataattctgccgcttaactttttgttacaatgttaaatcaaagatttaaattttcttgcttgccttgcaatgggaacttttgttttgttttattctgtcctatttttcacaatataatcttgattattttcacggtatggcatttggtgtatatatttaacttaatcactcacctagcaagttcttgtttttctttgtcttccaatttggataaccacagaaactggagaagcttcaagaagaggatttgattgagaagccatttcaaagaaaacaaatgaagatcaggtttcctgagcgtggaagaagcgggagatctgttgcaacaatgaagaacttggaatttgcttatgaggataacgtgagttgattcacaccacaaatgaatgaaaataattatggagtacttgtgcaaatatacatgtttgcacacatgcacaagcatatattcataattataactgcgatatgggtgttgtgacaggtcctatttaataaggcaaatctttctattgaaaggggagaaaaaattgcaatcattggccccaatggatgtggcaagagtactttgctgaaactaataatgggattagagaaaccaaaagcaggggaagttcttctgggggagcataatgtcctgccaaactattttgaacaaaatcaggtgcgaatataatatcatatgctattgttgggtggtctaataggcatggctttttcataatggagtacaagactgcttattgagtttcattatcctcgtaggccgaagctcttgatttagacaaaactgtgcttgagacagtagaagaagctgctgaggactggagacttgatgatataaagggtctccttgggcgttgtaatttcaaagctgatatgcttgatagaaaggtttcgcttctaagtggtggtgagaaggtagagaatttatgagttctgtctcaaacacacttgtctctattttattaggcattttctctcgtttttgtgggtgcttgcgtgatatgtgttgtttcgtgttttgtatatctaatttgaactagttggaagcaggcagcaacaccagacaatctttatgatttcatggaaccttgttgtgtgccttcttaatggtttgatgtggattttaaacaaatcaacattctttttctggttaaaataaataaaatatgcatgcatgattctgaagaattaaatctacattagcgattatgtcttagataaattctttaggaagaactttattatttagcgtgaaatttgtcttttattctttgggtttttactatgttatacaactcttattttcttcctatcgttcagtcctgacaatgcttgggttttctgggataccttgttagttttttaacttatgaatctccggcaaagattttacttaccattgaaacgagctcattttgtataacactgttttaatcatcttgctttcatcaatgatttggtgtcggttggttttatgcgaacattaatgtttctcttcttctaggcacgtcttgctttttgcaagttcatggtgaagccttctacacttctagttttggatgagccaactaatcacttggatattccttcaaaagaaatgctggaggtttgtgtctcatctctctccattatgctgttaactactgcaaatgttccataaaagttatcatcccatctttttaatacaagtttcttattcttctatcaggatgccataaacgagtattcaggtactgtcatcacagtttctcatgatcgatactttataaagcagatagttaatagagtagtggaggttaaagattgcagtttgcaaaattacgcaggtgattacaatgtaagtgctctcttccgctccttgtcgattttacttgattctgaattctgaattctgatctcaattttcatcaccctgcagtattatctagaaaagaatcttgatgcaagggcaagagagctagagcgtgaagcagagctcgaagaaaaggctccaaaagtcaaagccaaatcaaagatgtcaaaggtaatcctttgctctagttgtatctgaaaacctaaatatataatggcaatgtgggctaacatttctagttgtggtcctgatttaggccgaaaaagaagcaatgaagaaacagaagaggcaggcatttcaacaagcgaaagcaaaatcaaaagggtccaaaaatgccaagagatggaattaattggaacattttctttcaaaattcaccagtattatatagtttcttttccttgtgaaaggagtaggaggaggttgggtagcttattgttttagggctacttcaccatgtgtatatttacttacacacaattaatagactttcacgtttttgttgctgtcaatgatctttctgtaaattttcattacttcctcctttgattcaaaacttctcaacatgagctgttaacttcttaacataagttacgcttaaaaactacaaggtaatatactttacgggtcttacaacaattttggtgttgttacaaaatatatatatattttttttatatatattttttactattacactttgtattaaatttttagaaatgctatcttaaaatttcataattattgtaatagagaaacaattgaaaaagaagaattacccatgtactatattttacaatttgaattactttaaagtagttttttcagtagttttaaattttaatgtgaattattatacgatttttaattgtaatttaaattgctctgctaattgcaataaaaatttctttataaaatttcgtaatattatttaaaatttattgttaacaataattttagtttaattacgtaattcttttaatttataatgtgtaatgaatttaaatttaatttataatgattaagaaaaaaaaacaataattttattatataattacatttagcataacataaatattcatgcataatttaaaattttaatactcgctctgttccctattaatacattaaaacaaagtgcggatgatataataattatcaaagaaatgatcccatgataaaaaattcttccaaattctaaatttcttaaattacattagtaaataaaaatagcagatgaagccgctactcaaatttctttattaatgataaatcattcaacattttctcaatagcttcatcatcgtgtgcccttcctttggtctgcaatacatttaaaaccatatacatatgtgaaaaatcctttgccttagttttcataaaaaaaaaaaaaaaaagaaaagaaaaaagaagggattggttttacgaatcctgttaagattagacaacatttgctaataaaaaatgcaaaaaaaatagtttttttctaaaatatgagacccattgcaaaataaaagagagtgaaataacattatacctttatagatggtaccatagcaattgcttcttccacagtttcaggacagagattgccaagcacacaaagctgcataatcaaggagacattaaggcaactgtttgtaagaatattcacagaatgtaagaatattcacagaatgataattaaatccttaactaaaaattaccacaccagtaagcatattaattacctcaaattcagccaattgatatctgcttagaattctgaagagcagcagttaagatcaacgagatggacaaaagtttggaagaaaagaacaagatcatgagtattcaaaaatttaataaccaaaacaacattataatcaatgaatattatcacaaatttaaacatactctcgaacttgtctaactgcatcaggatttttatagcggctaaacctctttacatattgcagagacttctcaaacaccctgaaaaagagataaaatagccaataggacttaagaatttcgtttgcatgttaacaaattatgatatgaaataacacatttacgtgaagtaggaacacaaatcctaatcaacaaattatatgttgtccgaagccattaaaattgaagaacttaacatttggcttgatggtagaaaaaattaaggtctggtacttactgagaaacttgatttagcggatcatcagacatttgttgaagctgatcatatttacgttcaagaatgagcgcaacttcacaattcataagacattttgccttcaaaaactctaaaagagagaagaacgaaaacaacaagttaaagaggcattgatctggattaatttgctcataaaatataaagaacacgagcaattgtataatatcaaatgattcagatttcatctagctacttattgttgatttctttcattgttaatgataattaatgctacaataacaatcttgctaataatagaccaatttaaactaagcaaatctacccattgttttttctttcatgaagctaactattgataattacatgaatattttgtcagtttttctgatgcattacaaagagaaaaaaataatttttcaatcctgtcatttacttcatattaattttgttttataattaatgttttatatgtatatttcctccacaatagaaaagctaaattatctacccctaacacaacaccttcggcagctacctttttcttccaaattcaaaaaatttcaaacttattttctctcaatagaaatggcagctagggttttatgggttaagaaattttttttttcttcttcttgcgacagccgcacacaagttctagggttaaaaaaatctcttcttcagaaaaatgtgttttctagggttttgaattttctttctcttcttctctctaaactcacgggtaggttaggattgttagggttttgatttcttcaagcttttcttcttttattcttacaactgctcacacccgaacctcaaacaaccatggttcaagtccagaaactcgaaccaaagctcacggtttaaacacacaaactcagcaaaataatacctcacacaaacccgaataataaactcagaaaaaacaaattttggtcaaactcccaaacagaaacaagaacaataattcaaacaaacagattttttatttgcccaattacgaacctaatattaagta

SEQ ID NO: 78934 - DNA, 2629 bp, Cannabis sativa
  modified_base (899)..(912): a, c, t, g, unknown or other
ttttaataaaatattaattagatattaaattttacatcaaaattttacaattgtgcattggagcacaaaactaaaatttggtgtaaatataccataaaactattttttgaattttgtgtcaaatatgacacagcttttacatctttcattagagatggtctaaagtaaacaactacttaaacttatttttaaaattgtaaactatctaaaactttctcaaatattacaaataattttaaaaaaaactacaacatacacaaaaatatgaaaaagaattagaaataattaaaaagtagataaaaaatacatcaaaactaaccgattagggggtttactataaatttgaccaacttaatattctcccaattatttttttcctcgttaaaaagaaaaatacaactaaatcctcttaatatttataattgtcacaatatatgaccctaataaataaaaatggtggtaaaaatactttatattacgattttgttgcaatagtatgtcgccacgcatttttaagttagcatttaacaactaaaagggtacgactgtaacaaaattataaaataaagtacttttcctgatactttttttattagagtcttaaagtatatgaggcctaagacaaaatgatatttctagtattttaatgtaatggtaaacttttaaaacctcttaagagctcaatgttcaatcttttgtaactacacattaaatattttatttatatactaataatttttttccacaatattggagccctgagcccaaggcgcacacttagctcaccaacccagatcatatgtgtaacaattagtgtcataagtcccaaaaatttcaacttgatggatattagttcccaaattaactatttttgtaagggattatttcacaaatacacnnnnnnnnnnnnnnaaattataaaaatacggtttcacgaaattttaaatatttttttagattttttaattttatttacagaaaatacggtctttttatgttgtacttttgttaattcattgttaattttttattatttgtattttattttttattgttgttttgatattattttcataatacttttatgtcattttcttgttattttcgtattatttatatagaaaactgtcaaaatataaaaaaaaattctttaaaggtaaaaatgtaattttttttgtgtcttatgttattatcttttttttagtcctcttttctaacatatctttttactaattaaaaatacacatgtcgaaaaattattagtacaaatcttttttttttttttgaaacagatcatattttttatttaaagtaattaaaattacaccaaattattttttaaaaaataattcaataatattaaaactaaaatcacgcgtgagagtgggacccattccaaacccaaaacagcctataaatacccaaaaaaaattaacaaagaataagtctcaattctcttcttcctccttattctcgcatccaaacactcctcttccaccacccaaacacaaaacaaacccatccaaacacaatcttttcctattcaattatccaaacacaatcttttcctattcaatcatccaaacaccccccttcttcttcatcttcttcctcatataaatactccattttctctgaaactcgatcttcgatcttcaattcatcagtgcatggcagtagtgagtagtaatctcttatcgcgtgaggtatcagacctatgtctcggaaaaccaccacttaggtcactctcagctacagcaaccatcgccgaagctttatcggctttcaagaaactcggcgaaactttcttaagcgtttggacaacaaacggcgacgtttcaggctctgatctttcttgtattggaaaggtttgtatggttgatgtcatctgttttctttgtaaggatgagaatttagcttctccggctaatgctttgaatgctcatctctctgttttgattccgaagattcctggactcgttcgccatttagaaccaaatgcaaggtttgtataatatatatatatatatataaaatattatatttatatttacgtttcatttctgtaattttggtttgtgtgttaggttaaaatttaggtcaaatttaggtgactctgtaatcttcaatcttgatttttttttttgaattatttttatattttaatgaactgatttaaaaattatataatataaatataattattgaaaaaagaaaagatatatttcattaatttattgttgattttttatattgtaaattattttaattttgattttataaaaaaatagaataaaaaattattctgaaattgatagacagggctaaaattttattaattagaattattttattgataataattaatttaaaaattataaaatataattaaatgaactgttctgaatttctatatggaattttttttaagagaaatgataaaagatattgatattatatgcttattagtaaaattaattatattgtatcatataatttaaggttataaattaagaaaatatcgctaacaatctttaaccataaatgaaaaaaaaaaaattatatatttatggattttaatttttttttacaaaaattatggagggttgattttttgttgttttcaaaa

SEQ ID NO: 78935 - DNA, 8046 bp, Cannabis sativa
cattttaattattaataaaaagtaaaaagggtataattgtaactatacttaaacatacttaaaaagttacacatatcactcaacgagttacaacatgaattaatatataataatctttcaaaacaacttaaagattaatgagaagcaatacaaaaaagtatattttttttttaaataatatataaattttaaatcaatcataaatgatagtttactttaaaataaatagctcaatcctgacgtacacgaaacacaatactattaacaacactccttaattatatcggatccatagtgcctttggatagataactattgggagatactaataatattatagattagatcgatttatttaatgaaacaaattgaaattaggcaagtaaagacaaatgtaaattagaacactgatttggataaaatgtgacaaataataggagcataataagagaggggggcaaatactgctatccaccaatttgtacagaaatgttttaccaaaatcaaaatacattgaaaagaatggtagatttaacaaagtactgacaactgagaaaggaaaagaagtaaaaaaaagagaaatcatgagagacaattatcttttatatcaaagcatttaagataaggaactagttttacatgccatggaaacacgaattaacatcattcccaccaccaccaccactactatttccatttaagacgagcagcaaccggacttctggttcacgggctgtcctcggatctggaccgttggtggcctcgcattgttaacgggctggctagccatcctgtatgataatgatatgtaagaacagttgagttggaagagaaaaagaaaatgggacaaaaggcaaaatatcaatcatgattacctgttcttaatttcagcagccatggccatgaaagcttgctctacatttgttgcattcttggcactagtttccatgaatgggattccaatttcatcagcgaatgcctgaacaatgattaaatggtcaatgtctgttctcgaccaccactcacagcataatataacaaaatcttatttagatttaccttagcagtctcataggatactactttgtttgctgtaagatcgctcttgtttccaactagaagcttgttcacattttcacttgcgtagcgatcaatttcattcaaccattgcttgacattattgaagctctcttggtctgtgacatcatagacaacctgaacaaaagcagccaattaacataaaataaagttgtacaggggaataccaacatgggccatatctagaaaggcacacacaaaataacaaaaagagaaataatgtacttacaataatgccatgagccccacggtagtaactgctggtgattgtcctgaaacgttcttggccagcagtgtcccactgcatatccaaacggcaggaatgacaattagcaatcgcaacagagaaatgcatcacaaattcataaaagaatattggatgaaggaatgtgattacattacaacaaaagtaacagatatattattctttaaaacatttgacaagctttaaacatcaggcaaatgcagtgagatagataatagcatcatgatcataaaagcaacacgcaatgaggaaattcgtttacttacaatttgaagtttaatggtcttcccatcctgttccacagttctgattttctaggaaaggaaaaagaaatagagaggttagagacgcctatattaaagatattagtattagatatgtaacatagtattgtacagaaataacaacttacaaaatcaaccccaatagtgctgatgtagctgtccaggtatgaatcatcctataatgccaaaacatgaaagtcagataagaactatactgaatgatcttccatataatatttataagaacaccagacgttcatcaacaacgcaaaaaccaaatgaccgtgaactatactaacttcaaacacatagcatagcacatgttcgaccatcacagagcattttgccaaatatatctcctttttaaatgcaacacaaataagttttatatcccaaaagagaaaaggcaaagaaacttacagcaaacctcagaagtagacatgatttaccgacaccagaatctccaataagcaaaagcttaaacagatagtcactgcatgtatgagatcaccagaggtaagaaataagaattttacgtcaaaaggtccacaactaatgatcattaaatctgacaaatgatttcgcagtggttaagcaccacaaacagcttaagttccataacccataggtgacttcgtccagagcatcgcaaataagggagctaaagtaatctaaaatacttatccccaaattctaaaaaacaacataccaattcgggcaatcatccgaagcaattcccctaaagtaagtatctaaacttcgtaaatcttttacgctttgaagatttgaaccagattcttccaattaacagacatatataataattgttccaccgaattttatcaaaattctgattctcatccagaaatttgttaccctaattttgacccaaaaccggtcaacggatctaaaccgaaagcaaatagatcttaatccacaacctaagttaaaagtaacttttcaatccaaacaatatatcaaagaatcatagcctaattacactaaatcgaaagcacaaacagtgaacgtttttcagataatacataaattaaaaaaacaaaaacaaaattaaaatacataacgaaatcatagcagatctaaccaaattcgataagaaaaaaataaacataaaagatagataactccatggccctaagatcacaaaccaaaataaaaaagaaaggaaaaagatgtgataaaatagagcttactattcgggattcatggctgtgatgaaaaagaagaagaagagatcaaataaatgagtggaattgaggatggattgaattgaatattggcaccggagaaaattgagagagcgagatttgagatcttcaccggaaaaagaaagagaagaaataataataatgaaaataaaaagaggttgggttgatgaagatggtgcgtgtatttaaagcccacccccaaatcgtcgggaacgaaggggtgacttgctaactggttcgaccctttgccacgtgttttgtctctttctctatttaccattttacccttactgtcaaaaatgctaaattatttttcaaactgagttttctccgcaacatcatctatcattgtcaccttaccgaatcgcttataaacgcgtgagtctcactctctctctaaagctaatgttaaaaattctctcatttacacatattttttctttgaataatacactttcttttttcttatttattctcttatatgatatgatgatatctctaaagtatttttttttttaatggtatctctaaagtatttaatataattagtaagaataattatgtatatgtaatcaactctctctcgttattttctttcttgtaatttttcttttatttttcgtgtttgtaattttactgcccataatatcgctagatgagctttcgcccagaacttaacaggtgttatggattcatcctgcatacttatgtctatcttttgtaatgaccgcgaggtctaactttctatttatttaacgctttattttcaaaaaaaaaaataataatgaatgtgataataaatactatcgatatttgaactgttatactaaattagtttatgagagcatagatcgttgttatagttttttttacaagtatataaaataaaataaacacgagtatattacactagtttaaattttgttttggcacaagaaattattttaaatttttctagaatattttaaattactataaagtattaaattataactatttagatgatatcaaagtagcaaagaaatgtattgatatatctatttttagaagttagattatagaatttttcatatacatacaatttatttcaaaagtagtggtataaattaactattttttgtaattctagcattaatcgttaagtaattaataatttttccaacattattgtaggttggctaatagtgttgcacattctatagttcaatggcctaaagagccggcactgaccctcctgtgcttagagttcgtacttaaaagtgccctaattttttagaaaaataccatttttttcaattttcatacaaaacgcccatttgtatttggcccacaaaattaccataaattaaatatttcaatcaaactctttttttgtctcaaaaagttttttcttttttttctttttttttctttacagcccatataatataaaaataaaataatgttctattaaaataaaaatattaagtatagaagttaaattttttttaatacaatccattcataggtaatatcattaagaataaaatgagataaacttaaaaatacgaatgaactaccctaaaattattacaagttaaaaagctggataataattaaactcttatataatattatttttttaatttttatataatttaaattattggaaaatacaaagccaaaactaaattaatttaattttagatttttgagtttaaaattcgggtgtctgttaatttttttttattgttgtacccttaaactgatccaataaaacaaatgaaaaagattttgtggtaggcaactgtgtcataatccattttggttttaataattactataccttattagtggaagctactttaattaattttcacttgattgaaactacgaaaggcctaaaatctcccatttatttagaggattgctattaagcaccaatagtgtatagcatttttttgacatattgtgttgcgattggttagcgatactccctaaaagttattacaatatattaaattatatgggacccaatatttagttagaccaataacgatattgatacaagtgttaggcacacactaatgccctttatcatttgtcatttatttaatatatatgtaaagttaatgattgattgattcatattgtaaccaatagtcatagttttaaagaaactcattactttaaaactcgtctatttagtcgaaaatacttctttcatgtgcaaacaactttctagatacccacttttttattatgagtaatttgtttgtttgttttctccttcttttaattacctttaaagaaattgattaatgctactagtgcttggtttgttgtgttattggaagaatttagacaatatcaaaatttgtgtgagtatttaatactattaaataatttggataaaacgttcgagtactcatttagagtagcgagtattcaacaagctactaacaaactggacaaaaattagaaataataagaacacagaaagtatagtagttcggtcagatctcagtctgcttaattcactgttgccaagatttcagcttagtctatttgatttggatcactcctttacatagaaaacaagtgtccttttagttttacataactggtatgttttagaatcgtttcacaataaatgacaacattaaatcaagataaatgttaaagaataaatttaatccgttctgtattaagtgtagcaacgtatgcgacttgacaagtacgagttgcctattcataccctcgcacaagctcgtagctttaggtgtgctttgcatttgctaaatggctaatgggcctattgtttggatgtctgcatttctaatatatcgcatagacggacatctcacgtgttgataatgtgggacatgcaagtccttgacgagtcatcgaatacgattagtcattaggaccaacctttatgtaaaaaagcgatcttcactagtcgtaggaggggactacctagtcatcacatatatttcgttatacacacgacttgtattaaatcctttcggtcctatatttgtctttgattgtgcaaggcatagtatgcgactagaccatgtcaatgtcacatcatcttgtgagtttagatcaagcgagactaactctttgagagtcgttaattaacaggtcgtcctttcctcggggattggatccacatgtcaattttataggagactgctctcgagtttctagacaaaaaattcgcactataacacatgcccctagaatttcgcgattgacaactgtcatatagggaaactatatattaaagagaagcaagcgagttattgtcacaagatggtgacctttgattgtcttgtcgagggtttcaaaaaatggttgtaataatttttttattttcccaagatgccacgtcatcaaaaccctttggggtatctgtaggcatgctcgttggattgaaagacctttggtatacttctgccacgtgtctgtatcccaataaataaggaatgttgtatttaacctcaaatacaaatcgatcccacttcattttcctcccattcctcaatttctcattctttcttctctgagaatttttcaaacttcagaaactctccaaagttttgaattttcaattttcaaagacaaattctcaaaggttgaagaacctttcaaagtgattatcgaacccaggaaaaagaatcctcgtatagaaggttagtatttccttcccattgcgtctgtaaatttatttttctgaatgtccgcatgccttctgagattttagggacaaaaattgcataggatcaatagggcttattaagataatcaaaatttaggacaaaacaagacaaagtacagaattttctctggaaaatttttacctgaaacttgaatactcacatgtttaataatgaactttgaatatttgcatctttatagcagaaccctcttacattctcgcatatttaggttcatttgtcttcaagtcaaaaattggcagtggttgagtgtttcgtaaaaatttaatggttatttcttttggtgacccttaggtcattgtgaaacactcaaccactctgtgccatcttttatggctagaggaaacactacgggccatctttcactctcatgtactacatcaaagcacctcttccaccaatgatcccgatttcaatgcatgcacaagctttttgcccaaaacaaccgagtcttcgagtgcaacactagctccttgtcctatattgggagtgattggatgccaagcgtcacctaccaccacaactcttccagaataagccaatgggttaagcccaagccacaaccatatctgtcagtcatgggtgctctgatgattgtgtcatctagagtatgatctataatgtgtagaagtatctcggcttgaggccaccctgcacttgctctctcgcttgctttctcaattcctccgggtcagtgattttaggacctaatgcgaaaaatatttttggtacaacattatacaccatcatgttaccgaaaagatatatatataggtacgtacctggagagtggagagtaaaggtcatattccagtatactttagaagaagagataggatactatacaccatttccattaatgttggtgattgtgggtggatatggctgaccattaggaaagtatgcaagcccacgaatactacaatacccaacatatttaggctcaccgaaccccatccactcagctatagcagatccaatcccttcacaatcaattacaacctgcgccatatccatataataaaacgatcataataacataatattaatttgttttatgctttcattaatttgctattatatatatgtatatatattatatatagtgttggaaattattgttctaaccaacacacttaaagaaacaattaatacaatagttgcaaattggtatttttgaaaaataacaattcaaacctttgttgcagcccaatgtgagagcccaataccaagtccacaatcaaaaactatttatcactcaagtgaatcacttaatggttcggcccaagaatcaaaggcagccaagagaaactttctctctccattcaacaacttatcaccctttgatgtgtaattccttcggtcaaagcaagagtcaaacaatgactctacttttccaatcaatgaccgacccaccaagctccagcccaacaagaaatcaacccaaa

SEQ ID NO: 78936 - DNA, 2433 bp, Cannabis sativa
  modified_base (439)..(439): a, c, t, g, unknown or other
  modified_base (506)..(511): a, c, t, g, unknown or other
aaaaaaaaaaaaaaatcacgtttaaaatattaattaaatgcagcggtggtgattctgaacaattgaattaattaaaggtatacgtgtcaattactagctttgttcatatcatataaaaatatgtgttcattgaaaacttgtccacttattaagtaagaaaatgtggtcctatcttctatagattctttcatgtgatccacacatatttcttttattttattaaaaaaaattctaaatatttagtcatctataatgaatgatttttaattgtttactcaaactatttaattaattagtatgagaatttataaaattaggattaattatgaaatattcatttttatactattttatgtcactacaataaaaaagagcaaaaatatgttatatgcatcggcaaaaataaaaaatttggtaaaaaaaagagtaatttgcggcntaaatacttaagtttaattctcaattgtaaataaatatctaaatttaatttttggcggtaataatannnnnnttatatttctgaaactctgtaggtacataatcgttaaatattaagccattatatctacgtgtcactttcttattggtatatttgaactaattttttgaaataataaaaatttaatgatttggacccatcaagaattgccacgtagcaattttagaatagaatcacaagtttttatcattttttaggataaataccattttggattatgtgtttgtaaaagttaccaattgaacccttggttttgttaaatgataaatggacccttttcaaaatgggaaaaatagggtcatgagctcaatttttaataattttatttttttaatataatcaactttaagataatttctaacacgaacagatacagaatatgtaaccaattttaccataacatttctaaattagattattattaagtttttttgacaaaaaatcagtttagagtcttatttgtataattttaaaaaatataggatctattttatcatttaacaatacagataatctaattaataacttttgtaaaatacaaaatctaaaatattatttacttttttttaataaatgcatacttaaaaatgaagttaaaattatcaatttggattgtccaattagctaaaaagacagtcattaaaaaactaatgaagatcaatcactaactaatttatgtcaatttatgttgacatttgttactctttatctttctttacctatttgcaacaatcaattttaataatgattcactttttctttttcatgtggtaatttacatcaatgacaaatatgtggcgacttttttatcatccacataaattacaatatgggatttattataaaaaaaaaacagctatttttagtgacaacattttagtcacataatttttttgtgattaaatgtgatttttagtcacaacaaaatattatttgtaattaaaacataatatttagttacgagttatcactaatttagttttagtcacaacatatattgtgactaaaaacacattagtcacaacaaattataatttttgtgactaatacatttagccacggacttgttagtcacaacataaaaattgtattttataattaatcacattttttttgtttactaaaagtaaaaatttttgtaataattatgtaatattattggataattaaagtcactttttattttaggaataaaattatttaattacccataactttagatagatatttatcctgaaaatcaaacaaagaacaataatttagtgataatgaggcaaattttgtaaaatttaccaattccaattttcacctataagctaattttatggtacacctcctaaatgagtgtattgtgcagcctattgtattttggctaggtgaatagttatataataatttcacacaatacatactaaatttttacattattctgcaaaaaaattaaattttattttgttaaaaaaatatagttctaacaaattgtttcacccacatctaatttaaaataaaaaattatctagctagccaaacaagttgttcgcgccacgataattacaacaaagatatatatgcaacgtgttgtcgaaagactctaaactttctactttttttttcaatatttatttaagttagaacccacttttttaataggaataatggtattggcaattttgcaccaaattaacttttttttaataaatacatgataaaatatcttattaaaattaacacaaaaaattatgtaaaaatatttagaataaattaaaaataataatttaacttaatttttatttaaattacctactcttaagttaaagcacacttaatcttgatcttactatacacataagaaattaagtttattatttaaaaaggtaaatggaaattttgagtactaacagatagagcctattaaatatttttaaagactctgt

SEQ ID NO: 78937 - DNA, 3514 bp, Cannabis sativa
aaaaaaaattgaaaaaacatatttcgacatatgatttcaggtgtagaagttaacgaaaaaattataataggagattgtaattatcactccttacaaactaaaattaataaacaaaaaataacaaatctaatgacataatccgaatcacatttgaatttcaaagacaaaaacacaaaacacatccttattaattaccttcttcaacattttatgcatctttgaatatgtaaagagaaacaagagtggttggctaatgttggtgaaatggaagtttaacccaacataatgatgggtttaagctttctaatattagtgaaatcaaatcttttaaatttagattttgttatgaaaaagaggagaacaaagaaagacaatccaatcacacaaatgaagatggcaagagctttggaaagtgacaatactgcataggtgccagtaacaaatgctatcatcatgaatcccaaggccaatattgttaaattcatagacatgttgtagttagatacaaactccttatttgcacgttcatcaccagaagatgctatagtaagcaagaggttgataaaaacagccgtaatagaaaggaccaaggctattgcgtctgtcaccatgaaggcttgaaatgctgcattattcctaagaacagcactaccttgttgttgtccatgtccaaccttattatcgtcgcttatgtaacctcccggtaatgtaagtcctgctgtgaatgtcaccgtcgcaatcaatgcagccgcaaccaaagtagactctctgtagtttgcgattctagtccttaatttttctttttgctcaagctttctcttctcagtatccgtcaatatttgtttgtcgtctttgaaaaatgactttctcaaacagctctttattgtggggttttctttgaagatttttgataattctctctgtcatataacaacagtagaatttttatctaagaatactgttgacaccaactaaataaaatcgaacatgagaaaaaaaaatcaacttattaattgaaattaaattaccttgttgaattcatggtaatgaacattatagagatcatgggctatgtcatgaatatttttgttttgttggttgaataacatcttattcacttttgggtgggacatcaaagcttcaaaattcttttctgtacattttgttgaagtggcaaacacatgaagcaatggggtatttccttcattatcttttctatttaaaaggtaattattgagtagtgaagaatgatctaatatgagttttaatgtggaaggagattgtttcctcacagcatagtgtagcaagttcttgccttcatcatcaacaacttcatagctatctggacacctcgaaagaatttccttcactatttcataacctccaaaagggttagaagctgccatgtgaagagctgtagtgccatttttatctttgaaataggcactgctttcatccttttctaacaacatcttcacaatctccaaattattactcggagtaggcatcacagcataatgcagaggaatcaaactatccttatctgcgtgtttggtcagatctaatatgttctccaaaatctttcttgttagacctgaagaattattttttgaaaaaattacaatactaaaatgtctttttttaaaaaaaaacaaaaactagtaattgcagcatggaattctactacctgtgttttcagttaaaattgcagcatggagtccatttctgccgtaagggccagtagtgggtggtgaggagcaattgtttagtatttcatcaaccaaatccaagtactctgcctccacagccatgtaaagtggtgtttctcctgcttcattagccaaatgtgtgaaatgagggtcttgtttagtcaaaatccttacaatcttaaaatggttgaacctcacagcctcatgcaaagcagtgtccatttccttgttcctctgcctcatcataccatgaccatccacacctaaggtggccttctcaagatcggacctttcaagcattttagcacgattaataagaaactcaacaataagatcatggccgtaccttgctgccaagtgtaaaggagtctctcctcttgaattggtttgcaacaacagttgtggacacatctccaatatcccttccaagaaggacattgtactactttttgaagcaatgatattgacatggacaactgtattcttttctggggtcaataattggtcaaggcagagttggttgttgactacaatattcttcaacacttggatttctccattggctgcagcttggaacaccatggaatccatgcctgtagtgctgttagaatcaggctcaccaataagcaaggtacttgaagccatataataattatatctgttatattgtcaagctagaattcataaatatatctatccttcttcccttgttctcttcaacttcactatggtttttttttgtttcttttccattgtttttttaacttctcctctaagcttattcttttctcttttttctttcttccctcatacatttcttcttcctcaaatttttttccatttcatttttttttcttcttcttcaatcttcttccaccacctaaactaaaacaagaaaaaagagtggtcgagaaaaaaaggtgtgtgtatagtaagatgtatagttctatcttaaaactaaattagtagtaatatttttttacacattagcaatattttaatactatagatgtggtggatgtggatgtgtaagaaggaagatagatgaagaataaggaagaaggaagaatagaaaaaagaaaaaaggaaaaagaataaagaaaagagaaaaataaaaattatggtagaagggagatgaaagaggaagaataaaaagaaaagagaaaagaagtaaaagtgaaaaagaaaaagaaaaaggaggaaaagaaaaaaaaataagaaaagaaaaagaaaaaaatataaatataaatttatttaataatttttaattaattttaataattgttaggaaaatttattgtgattaattataatatttttccactttgtatgttaagaataaaatacttgttaaacactacaattagcaatataaaatattaactaaaccaccacaaggaataaaaaatatacaaatcaaactacatctttgcaagcatatttaaaagtgttcagagttagagtttcgttgaatgaatttcaatgttcaagaagcaagagaattttatagggttctccatatagttctttaagatacataatctttaaacaactttgactatgtgtgacttgattattaaaaaaagacacataagcaacttaattgttaaaattaagtagtagttagccagtcatactacaaaataatataaaatataaatctcgaaattctataaaaaaatcattcatcgagaaatatttataaatttttaaatggcaaagaatttctaaaaatagtaattttttatttgaatcctcaaatatcatactcaaaaccaaaagtggtttgatccgtcacaaaaaat

SEQ ID NO: 78938 - DNA, 6085 bp, Cannabis sativa
agaagcaaataacataaactcaaataacaagatatcacccagtcttcattcctaaatcactaaactacaatctttcactcaaaggaaagcagacagaaaatgttacctccttaaaaacaacgtgctctttcaaaaaattacgatgattttgggcatgatgaacttcaggatcatctgcatttaataattaaggactgttattatcatcacaatcaaatgagcagcaaaagccacattatcgaccaaaacacttatgtctgcactataacaaaatataggacacaaatggtgtgtataacataacaaacagttgagaaggttgaagggattacagattaaaggtgtataaaaacctctcccaactcactattccacatgcaaagggttcagagggggagagagagactaaattatataatcataacttattattgaaaacctcaaaacaacatgatggtatatgtaaagtgacaatgacacctaagtattcaaaatggtcagcaaccaacagaatgttttcaggagtggtactgatgtcaatagagcttacactcaagacagcctataatatccatgatcaattcatcaccaaatatcttctcaaagatctgaggactattgagcataactgcagaaaaaatacacaatccagtcagtagcaattaaagtaacgcatttaaatagcatatatgagagaagagcacttactgatcccccttactattttgtatatcatgtgtagaccttcaacgttttccaagtcttcatacatcctaaattcaaccatcagcttccgaaaaaattcttgctgcatcaaccaatctatttataagagctcaaaaacaatactaaccaatgataaaagactagttgcaaaaatgaaaagaaaatccgcacttaaaaccattatagcaaatgttttttcatatcctttagaggttagtcatcaagaataatgaaaagaagaaaggcccaccaaactcatcaacaggaaaaaatatctgaatctgtagattagggaagcatgtacaaggcttacaagcttacatcattcaagataagttctgtcaaccgcatctgatcagcaataccactctcaaccaaagtctgcataagaaccagatgcatttagatattgacacaaagtctcctcggtagaaagaaatggatccaaataacaataataaaattacatgactagtaaattatatctcgcgcacaccatcatattgacattgcatgtgtagatacactaatgtcatattttattaagaatatgagattgaaaaaaatgctgaccgtatgcttaattaaccactgtaataaactggtgtaagacgaagtgaaacttaaaccacacaaccaattgcaagtgtgcagcaatgcagtatcataaataaatatcataatcccacagtcaaatgaataaaaattcttcaatcacctaatcccacggttatcagtcatacagattcacactttcatcagctcattatgacatccagagagtgaaacatccaaacaaagaaaaaatttactcttcccaaggtaggactgaaagaagaagaacttgaaaaatgatttccataaaaaactatctattcaatgttctaagctttaaaaatagtgaaaacacaataagattaagagtaacaagtactacaagatacaaaaggggggagaacaccattaataccttaagtattaagggaagtgtggatggtgcaactgccggcagctccctcaactcgctatttggaccatgaaatgtatcatctgcatacaaaattatatatccagtaaaacgtatgtccatgcaaaaaatactacacttaattagaactcaggtctgtcattattctgttctttttgcaaaaactgccgaagaaaccttgttgcccaataagaaaataatgagaaatagatttgaggaacaccattagtgaaaccaatttgtcaaatagaaaacatctgaccttctacattagacattaatgttttcttatttctggagtatatttattgaaatgtaaccatataataatattgcatttataaccagtcatactcactaacgacaataacatattcataactgaatcaaataaaagcaagcagaacagaaaatggaatttttgggaggtagatgataaatttagtagccttaaattgtctttcacccttaatctaaacaaaattctccaatcattgctgaaatgctactattaagaaatacatgattcaagtaaaaaaagagatgaaaaaactaaagaatatccattggattatctggcctctatcatcaaatgtttcgtcatcataagcaacattataaaacagatatcaaatagagaataaaaaaaatacttactgttaagagaatggaaattcatatttctttgcacattgcagatatggtccctatatatacataacaccaatgatgataagtaaagtcaagttcacgaagaaatagaataaatgaaagataacataggaaattaactgtccagcagaaagagacaaaaaaacaaagaatttcttttgataaccgggaaaagaacaaagaattatagctaccatatgtaagcacagcctgttgtctcctgaaagcttagtgctaactctgaagaaaattctgggtctctccatgagataattgtatcttccaaacaaaagagaaaataacatagagtttagtacaaatccatgtcaacacaatctcagctatgacaaaggatagaaaacagtgaccagcacacaaataccttcttgttttctataaatatcatctgcactaatacgatgcaaaagcaatgtctcatgatcttcctcatcgaaaacaaataaaccaagctcttccgatcgctgtgttataatgatattctcattcagtcattatacaaacaatttaaagcaatcaccaaagatgccaatttcaaagggctgtgcaattctttaatactaaatatgcatagacatgcttaaacacagatcaaggaaaagaaccaacctccaaatagtcaacagtgacatgcccagttccttgatcatcccactttccatcatcattcaaacggtacaccttaacacgctgaaatttatgtccaaaaactgggttagatagtcacttatatttaatagtatcactgtagtagaaaatatcaagagaaaaggatttaaacacaaatatttgcacaagcaaataaagtattgggaacaaaatatacatacaagaaaaagagttaacctgtcacaaaatatacatagtataaagataaatattagtgccatttaattcaactgcgataacgttacaacaagtagaatgaacaaggaaattttaatttgtccacttggcatattaaaattatgtcaacattttaaacaacaaatagcagagaagaagcgtaatataatcaagctcaagcacaatgaaatccatacgatgaatataagtaaaccaactcagattaaagtgagttattctatgagattgccttctactaatggtaatggatcacataaccaactaatcaacaaacttcgtggaatgaacttcacacaaggtgacattagtgccaaaatatatataagtgaacaaataaatgccaaacaaatagaatgcacaggaaaaatataagtacaaaaccaactcggaaagctccagtttcctaactattaaagcataaaacagagattcagtaaaagccgtaaccaaaaattccctgcattactgctttgagaatcttatgtaaagcgtatccttttacatgtcaactcacataaatgggattcctttaacatactgtgacctagattttgagaatcctaatacaaatttgatattgaaattgtcctaaaagctcaacaccactgatgaacatctttgctgcataagctaattaacttttctgacaatttgggttgaaaagcttgagagataaacacacgacaccataacctttatagaggaaacgtaatagtccgtaagacaagaaaaaacgcaagagcttgctaccaaaacaattacaaattctatgtgccacactactcttctgttgcctcactactgcaacgatttatactactgaagcaaaagcaatagatagcagcaatttactctaagaagctaaaaaccaattaggatatactaacagtggacaaataaaaagaactcagctctaactttgctaaattcacaaagtacggacgaacccaaaaaaaaaaccaataataattaagactcgaaaactcaaacccaaactccaaaatcacctaatacaaagaattacccgcatcgactcaaattttagggcaaggtttcagaagctatccaatcaaagtaacaccacactaacctgcatcgaactagcgtttgcctgtgatttctccggcgcgcccattccagctctcgcgtaccggattcgaattcgaatagattgaaatcaagggatacaaaagcgtttacacgaattagggtttcgagagggaagacgagagagagaaaaatggccaaaaaaaaaggaggaggagattacagtataaggtactaatagaaaaccctaaccgccattaacgtagcagtgtgaaccttcgcttttctctctctctctctctctatcttctctctctctctctcttctttttattcttctgtgcaagtgtctcggtccccgaccttcaacaaggaagaaaagtaagaaaatactattacgcttgttagagaactctgaatacccaaactaaccttactcttttcatttatttaccaaaatacccttaaccataaaattcaatcagcgaatatctccacgcgcttaccccggagaagaagaatcaaggaggatggtgggtccctcaccgggctgtgttggaacacacgcacggttgctcgtgattggttggaagctaggaccgtgtgtgacacgtggaacgttttcttaggtggggacggttccgaccattaatataacgccacgtttaacgttgaatgaggtagcaccgaacgagggctgtgattttagtacggcggcttaggcaaaatctttggggatttggatttgttaggatgagagaactagaagtgacacgtggcttgatttgattaggtgttttgagaatactagtgaggtgcatcacaacttatcaagtactgcaccacttgactgaaagttttacaggacttgttgagttggtgctgatcaaagaaacacgtggttatgttttttatttttttttaattcaaaagtgaaaaaaaaaaattaaaaaaaataaaaagtttgttaaaaattaaaaaaaaaaatactttccaaaaagaataagatgtactccaaataaatgcacttttttgtattttttttatcagcactcttttatattctaaatttagtatttttgctcatccacctattatttatgtattaaaaatactaaatttagtatttttgctcatccacctattatttatgtttgaattttttaatttattaaaaataatttttaaactatttatagtattataaattattttttctattaaattttatcacacctaataaataaaataataatatggttatttaatcagttattacgttagtattatgtcaacgtcacgtatgtaattaatttgaaaaaaaataataatttaaaaatttttacgtaacttttttaattattaattaattttaagtttaataattttcttaaaaatacatactttttttttaatgttaaattatacacgtggtgctgatgtgacaattagttaagtaattgtgctatcattttgtttggcatgtgtgacaaaatttgacaaaaaaaactaatttataataaagtatatagttcaaggactgttcagtgggcaccataatacatatgtcgtagttcgaagataaaaatcctaaatagtttttatttaactcaatttgttatatatacgatggtgaataaaaaaattataaatttctaaaatttttaaaataatttatttatattgagaaaaaaattaaatgatttttattttattttatacataaaataaattgtacaaattttatttatagtactataaattatt

SEQ ID NO: 78939 - DNA, 4541 bp, Cannabis sativa
catgagtacatgactaaaataatatcatagtctttttagagggtcggattggttagaactatgcatgttctacgattttttgataagtgtttttaagtttgacatgtctaattttgtatatttctagttttcataagagcagtttgtgtgagagttgttgaattgagatgtgttatggatgataatgtaggtttaatgcttgaacaaggtttcaaatgaaatattacaaagactggatgccttatatcatattggcatggattggtgtatattatatctttctattgacagtttgcactttatttcagtattgcttatctcttttgagtttgaaaaaagatggcattagtagaagtaagtgtaacccagatgtccagaacagattgtatgatattgacaaacacgcataaatgtaagcagcacatatatttcttctttgttgtctttcaaggagaataagtgaaatagttggcttaagaattgatgagtgtatttcacattaaaaaaaatctatttgatgttttccattggctgtacgggaacttttacagccatattgatattttccactgctacagattcaggaactagttgagatgcccctgcatactttacagagttatgtgggatatttgtgaatgatgttttctcttggtggggtctgggaggagttgataaagttattttaagggtatcagaattgctgtcatttgcagtaaatgctatttgttataaatgctaatatgacatgttttttctgacttttatacggagaaacttagtcaattgataaaaaaactcaacctattgatcttccagatgtgttattgtgttgtatgcactatgcatatttgcttaatcatccattatattccaatttgtcgaatagatgcgtatcttcatatcaccctggctctttctatactttttttttttttttgaatggctctttctatactttattacaaactggtaattacaatttattatgtgcatggccgtactcaagaattctaaggtaagtattgttggtctttgattgtgtattcttcaaaattactgttttaccattgtttgtgtggcctgtaatacccaaaatggccaaaacttgaaatgatagtcacttgtttgttatgggcttgttctcaagacatcaatcttttcagttttccctaagccataaggtgatgttgttttccccactatcattatgtcaaattataagctgatttaacttcttagttgaagttggtttaaaatgcaatggtattctaacttgctttagtggaagttggtgcaaaaacgtacatgaggatacacctcagctgttgccattgaggcacacgcctcgcactgatgaggtacactggaggtgcacacctctgaggcgaggctaggcgtattgaggcgcacgtcgcagccttgagctttgttttgtgggttacgactgttttgttgtgggctcacttgggccttttcttatttttaggcttttaaattacttgaatttctagccttttttaacataattttaataaattaataggaaagataaattagctgttaagtcaaaatgtcgttacagtctgacagattcacgactgccactcccactcttcatctccctcacgcactatctccttttttactatctctcaaagtcaaggcagctcctaggctagtgttggaagtaggaatatgtcttccttatatgtttagacttttatcattcctctattaatttgatattttgtttgaacttgaaccttttatgtatttggtttatgatttgaagacttaactagtaatttttatgagtttgatgactttgtcatggagttatatgttgtttgttatgaattttaggagttttatgatattaatgaagtttttcttcttattgttgaggcgtacgcctcaaggtttacgcctcgtgggtggtggggctaagggaaaacgccttggttactgatttcgtttttcaaaaccttggcattagatctatcatttgaattgaaactatctacttgacttctttacttgcagtgtgtttctctacaattttgtgctatctccatcttcgttttctagatgaatggaactaagtgatgtcccaaaacctctttttcatgttatcagttttagggttgtgtccaccatgcatagtttcattaaaactcctagctgacctatacatttcttactcttttccgtaggtgacattcatgggcagtattcggatcttttgaggctttttgagtacgggggttttcctcccaatgctaattatctattcttaggagactatgtcgaccgtggcaaacagagtttggaaactatttgcctcttgcttgcatataaaattaagtaccctgagaacttctttcttctaagaggaaatcatgaatgtgcttcgattaaccggatttatggattttatgatgaatgtaaacggcggttcaatgtcaggctttggaagacctttactgatagttttaactgtcttccagtagctgctctcatagatgataaaatattatgcatgcacggtggcctttctcctgatctaacacatttggatcagattaggaatttacctcgtccaactgatgttccagattctggtttgctttgcgatttactttggtcagatcctggtagagatgtcaaaggctggggaatgaatgaccgtggagtctcatacacttttggtgtggataaagttgcagagtttttaactaagcatgaaatggaccttgtttgtcgtgcccatcaggttagttgctgtctctctttggttgcctctcacccccatctttctcctcagttttggtttaaaagatgcttcctcctcttcttccaggttgttgaggatgggtatgaattctttgctgacaggcagcttgttacaatattttctgctcctaattattgtggtgagttcgataatgctggtgcaatgatgagcgttgatgaaagcttaatgtgctctttccaaattctcaagccagctgaaaaaaaacctaggtttggttcaacaatgatgtgaagactgtctagccttcattcctcttatgattgcaagtgtaagtttcatgccacttctgtatcagagcttattgttcaccccttcataagccattgtgtttaaaatatagttcgtgctgttttgagggcttttaagtttcatcttatcatttcatagcgtaagcctcaagttgttcaatgtttgagtgtggacgtgcgtgcagtctgaactgctcttttagaattcaaaaccacataccgcaccacaccatgctattttggaaaaatacaaactgcaactgcaccacaaatgatttaaaccgcattttttatgcggtgtggacaatttttgccgtgttgatgaacacccttaggcggcaggagaggggtgggggtgttcaaatccccatatatatatatttaaaaaaaatcatattacttcattagcaaagacaataagagagaaatatgagtagttgtcttaagtttgtggccaattcgtcactttgtcagaggtcatggaagtggttaattatgataaatttcttatccaaagtcatggtttatggaaataggaataaatttcaagacaacatactgcaagaaaaatgagaaaaaagttcatttgacaaaggagttattattcttaatttatagccacaatagttgaattagacatgttctgtatgactttaggttccaagagtttgtatgaaacctttttgttttctagtagatttagtataagcattctgcatatgattttaaccatattaaactaattatctcttactcaggattaaaaaagtttgaaggcagaagaataatggaattaaaaagatggatatcttcatcatcatcaccatgcaagttgagatgagttttttgttcaaattgttgtgttatatggtaggagaactgtgacttctcaagtttaaaaaagggtcaactatttttagggaagtggctgtcaagaaagaaagcctctaatttcacacgctccttaattagtactactttctcaaatattttatggtgcttgctgcatataacatttgatttgtaaatgactgcacctgtagtcgatgaacattgaacccccttctttgccaagctgtttcactctctaaaatcttcatacttttttatcattgcatgaaattctctacttctaccttgtttcattgaaaatcagaacatggatggatgctgcattatttttctctgcaagttccatggcatgagattgatacctttaaattgatctaagcattgagccacagacctcccactgactattgtcaacttctttcagatattaattttattgattcagaagagaagaacttgcatcagtattctaatttcaattcaaatatgagttgattctctccatattctgaaaaatatttactatagccttttgctgaccaagaaattgtatattcatttctcgctataatctataatacaaacatttgaacacacctcctaattgttttcttttttctttt

SEQ ID NO: 78940 - DNA, 2545 bp, Cannabis sativa
ccttatgtaattcatggccatatcaataaaattatttaaaaaaaatgaaaagcttatttaatgataatcaagttgcttttcatattgcctcaaattccatatttcagaagcaaactaagcacattgagattgattgtcatttgttcttgaaaaaattcaacaagacctgatctacataagacatgtaaagatcgaaaaattaagagatatttttacaataactttaaatggggagcaaatttattaattttgtaacaagttgagcataattaacatatgtactccaaaatagagtgttagaatattaattataagaattagggtaaattatatttaataatttccaatttaatcacctaaatttgtatataaatatatagggaaatgattttgtaccgtgatatactttcacagaatgtattctgtggtacattagatgggtctcaaggtacattaaatgagtgtcaaggtacgtttctactttttaactctaattacccctagatcaatctcagtcgtcagatcaaataactccttcatctgacggctgtcgtacatcacggattacaatccacataaaaaagtataacgagacacaaaatcatattcctaaatatatattattctatcaaatactatacataattcaatcaccatattttgcatttacaaagattactaatttttttttaccaaaaacatactatacattaaaccgtaaaattctacaaaatcataatttagacataaatatcatgtttacactttttctaaaaaaatgtgcacatagcactattcatattagctttggcttccttccctatatcaaagtctttttcttttttttttttttttttggtatagtttttcagcattaaagcaaataaagcaatgtagttttcattacttcatgtcaggctctaaatatcgtcattttaaatgagaatcgaacttgtcttgtttctctttttcctcaaaacattaaactcctctagttcatcttttgttactttatttacaaatgcaataaaacatgtcttcatctggagagctcataagcagatggcacatcatgcaatgggtgaccttttcggtttctttccatgatgcggcgggcaaggaagacctgctttcccaccacaaagatgaatgccctgccctttccagaagcacctctagcagttcttccaacacggcgaacatactcagatggatcacgcgggaaatcaaagagaacaacatgatccaccacaccagcaaaatccattccacgtgatgccctgcaataaatttcatcagaaatttctatgtatgcaaaagcaaaataatcagaacataaaatttttgtttgtaaattctaaattgtttcaaacaaataccggaggaagctacagcagttacctatcagtgcaaactaaaatctgtgatcccttctctggacgagaattggaaaactcctccaaattagcaagccgcgattcttgagccatagcagcatggaatggaagaactttaacttggttctctcttctatcaaaacgctttaatgcattctcaactttcctacaggtctctatctgttaatacacggaaacaactgatgtaggattactgaatttcctcacaaaaaccacaccaagtagagagaagtatccatgcctaaggaggattttctgttaccttgttacaaaaaactattgttttgggaactggactttcctccacaagctgcagaagtgcagatttcttgttcataaatgctgattccggagttttctctgtctcttcacctccactacaatctacaagaacctgaatattgacaatcatgatcaacacacatgaaatttgcatatgactccgtacttcaaatttcttagtaacaattttaattcttagaaatcataactagtaaaagcaatcatggaactgacctcatcaaggccagtgcttattcggtgcatcccaggtcccatagttacctcacaatctggaaaaacttcaactaatttgttgtatatgccaactggtaaagttgcagtcacaaataaatattgtgtggtaacaggtgaagaactcatcaaattctgtagcactgattcaaaatcttcatcattaaagagaatgtctacctcatctagcaccgcactgcaccacaaggtttcaactctgttagcttcagtaataaaattatttctccaggcagtaattaataaaattctttatccagggtatttctggataaaagagaaatcaactctattagttggtcttattccaaaaaaaaaaagaaaaaattagtttgtcaagatcatcacctaaagatatttttgaagtaaaatttggtttgtaaaagaagcagatataacatgataagtctgatgtgtctaacaaaggtgaaaagccataaagaccaagcatgagttttttttctttttgatagatttaaagtagcatttatacaattaccgaaaccctatcacgtggttatggcttggtagctacttggtgtaatataaatcccacaaattactcacacatgagc

SEQ ID NO: 78941 - DNA, 12677 bp, Cannabis sativa
gatcctggtaaaataaatatccaatagttcagttcatggatctcttttttatctaaattccatgcacaatttttctcttctcttcagcttccctcccatttagaagacctagtacaagtgaagcaaatactaggagaacctttaaaagcttacatcagcaggttcatgattgaagaaacaaaggtaaaggggctaaccgaagaaggaaggttggccgcaatactggaaggtatcgaacctgtaggagagttgtggaaggatataataagactaattgtgggatcaatggcaaaattcttggattgagcatatggatttatcaagctcgaaaaagcagtgcggcgtgtagataccgttggacaaaacaacacaccactacagccgatacatctatccagctagaccagaattcaaaaaatcccaacatatctaatcaacggaggaaaaaggtcacacagtggcaataaataaggtgatgggaagaaaagcaagttcaatggcaactccgaacaacatcctcgggaaaatgcctcaaagttcactacattcacagtcctaatagaagacatagagacacaactttgcacctgagtaccaagcttatcgttacacataactttgccttgcagagcaaaacatcgtccaagcctggaggaattggtggccttctttgtccgcaagggctggttggttatgttcacattacttttaggaggtaatgggacaattttaggttaaggctcgcttacctttgccttccccttgtccttcataggagccgaggttccaacatcagtagagttttctcttttttccatgtcaataggctattctagagaatcttcctcagagtcctcatctatatcgcgagtttagcttgcagtcgtgccatcattttctccatttgatgagagaaagcttcttgctctgctagctttcgttgagattcagctagctcgccaaatactcggaacaccttgaggtcttgctcatagtaataatcatctctaatttcactgttgtcttcttcctcctcttccttgtattatgggtttttctcaacaaattattcctaatgttaagttgtctcagctcttcggctgccagctttggacgcttcttcatccctcatagtgctccacaaggcatgccctggagggatcagatagcatcgtccatgatgacatactagcctagaggagggggtttcttgacaacggtctttcgagtagccaccatttttgcagatgcaaggcagcttcaaatctttcttcaactctcaatgaaaatactaaaatatttatcgagatttttgaaaattaaactaaaaaagagcttaagaaattaaataagtaattaagtaatagagatggagattttcacgtggtttgggtattaattaatcctcgtccacgagtcaatgattaaccgaaaggctttggtgtattacaatggggtcttacaagctgaagaattatagcttcttcttatttttcctcacttgggtttatttggaatagagaagaagaaaccctaaaatatttgaagtgaattgtgtcccgtgcacgaaggtgtaatgagatatttctatgctaggatctggatctaggcataatcatgacttgctaggggtactgtgtaaactagccccactattggggtagatacataaaatacatgactcaaggcccaatggcagaagtttggctcgtggggcgaaggtgtctgtacaaatgggacatgctcagttagggacaagtgtcatgcgcgagcactaccacagtagacaatgatgttagataggcgtcgttggacaaaaaggatgtgtttcatttggtggtgcacgcgctaccatgttctgacataggagacaagatctaatttggtgggaccaagcgttagagggaagccacatcacccctcaaagggcctctagaggcgcctcttggaattcctctttagttgcatcctagtgctcattcggaggtctttgcttattacgtcttctggatatttagaagccttccagatccaaaggagcctcgtcttcagaggcgaggcttctccgcttcaaatgggcccaggcccattgtgtggaaggattgtgatccaggccattccgaacaaatcatactttggaaaggtcgcttgtcaccttcaaaaacacggataacatataaaaattacaatccatcaaaccaagttaataaatacatcacactcattcaaaatactttggactttgaccaaatcctaattccagatgagccttgtataaacatgccacaagataagtcagagacaaagtatggagattaatctgcaatcgatccaaaagaatttatactttacttgaaaaaagggcaaaacacttcccacatccattcttcaaagttgaagagacaaaccatcaagagctaaggaatgaacctgaaatcttgaaggaggatctcaacttcactcactaaattcactcaagcacttagcgcaatacttttatactaatattagtcttttaccaccactctaggatagaaatatttattttctatatcttcttgcttttcgctattagtttttcgaattagtgattgacttgatcgttgaagtccaccaccacctgtgatttgaccatctacatacttattattattattattttaacatgattattattattactattatttattcataatatatgaatagttaaaacaaaattcttaaattacctaataaatcatatcaaaatgttaagccaaaaaaaatcataccaacatgtttttgagcaatttcattacttgtattgaagatgtagttgtagatggtgacttgaaaaatcactgctaaatagtttttcgggtatggatgtatatgcgagcttataaatgtcctcgtaaagagaggacaacattgtcacagaaaaaaactgaaggaatttcctttccatttacatctcatatttacagaataataatgtgccttgcttcctctacaaaattctttaactaaccaccccaaccagtcctattctagactgcagacccctttatcctatcaacctcctttcctttacacacagtattactataaatacatataattaaattataatttctaataagcaaaccatatcaattaaattttattttatgttctcttgtccgcccattcccccctcctttttcctttcccgtttcttttttattgggtttccctattcttttagattttcttttgtgttccacatcatctgccaacctcgacacttgctttgaccagtcagatcggagagtctttcataagaaaacatgtttctgccatgaaccagctcgagaaagataacgagccatcatcaaaagaacccgagtaaagataattcagagcattcttttaatatgttttctcgccaatcctgacaacttcaagaacagtagcattgcagaagaagcatctttggcaattcaacagatgtcttgttatgcatccataacaagacatgtgagaacaaggcacaaatctagcatctgcttcactggtataacagatgcagcaaatgctgtcattcacatctgtttcttcttcacaacccatctcaccaactttttcagactcactacggctaataaggagagccaagaaatcttctagctgttcaagctttgtaagataactatcccctctaaaagatccaccctggaaagcatgaagtaaacaaaatagattagaagatattggtaaacatgatgtgataattctggtggaaattccaaagttgaacctaatttaagaaccttgaatatccattcaaaaaaaaaataataacaatatacgtgcatttcaggaaggagcattttcaaaattgtggtgtcagttcacatttttaagagcaatacctaatacctatatagagggaataatctaaaatctaacttgatgttatattgcaggatatgttgtctgctcaaagacttgaaagttacacgaaattaggaattttaaagagagattattcccatcttagaaacataagcggaaaggaaacccaataagataaattaaaatggaaaggaacaaacccagttgtaatccaataggaactggaatccacaatgaactctagcagggcaatccatacttgcaaaaatggccaccacatcgttgttttccgcaaacttcatatgttcactagcatccaacaagtttaaaataatcccaacaagaggtgctagtatcattcctctgtttactttgtctaaagactgaccatttcgtctaactgacctgcaaaaatttgttgcaaaggcaagtaaaagaactaatatagtagacactaaattctttcttttttaaagttacactaataataaataatatatacatgaaacttgaaccgtagacccacccgcccaaccccatgactcaaccacaggtggaaacttcaaaataaaataaaataataggacaaatagtaatattaaaaagactatcctggttttggtggtttagggaagaaaaggggaatatatgccacaacgaatgaaattaataatcccaaagaaaaattggactagacataatagctagccatctctagactctacctttaaatgcagctggactcacaaaggctaattaccgattcatattaggatgtacgcaattttaagacaaaacaaaagataaactagagaaagaaaacataatttaatagataaaagtagagtgaatcgctagaatggaacgtacaagtcaaaaaactcagcatctgctgcacaagttatgtggtttagaataaagacaatcaattctattaacctccggaggttcgtgtcagttcctctcagaaatgcttgaggtatctcatgggaacagaattccaaaacccttgtaagattacacgagaggtcaaatatgaaactgcatttcttttgatgaaagtctaacacctgcaaagatgataggcagcaattacacagaaatatctcatggcagaaaaagataacaaggcaggtttagaaatatgcatttataaaaacatataccacacagaataaaattcatcatccgacacaatttaaacaggaaacctccatcaaaaagctgcaataataataaaattttggaaagcaaggagcagattttcttacccatttaataacaattaaataccttaaaccacttagttagataaatattgccaagagaaaaaaaggtatactactcaaaacactaaaatatcacaatgatacctggtatttttcttgcatttctcgaactgaaactgagaattcagtcattgtccagctgagcatattaaataggcgattaagaaatgctgaaaacagctcttcatcatttatgcaagcttcccttaacaacctctttatgaatcaaaagttcaaaccaccaaaacagaacaacaagattgacgatcagaaaattaccagcaaaatacagtataaaggtctgaagcaacagtgaccaaatttacctgaaacataacagatgacaacgaagattctccgtgctttgaagaacaaaagccagatcccttgcacaaccgcagaagaatgtttgttactgggatccaggatctgttgtcaaaggcagaaagcaatgctttcggcatcctttgggtagctgctttgttgctctcaaaaactgccagatattccttgtactgtaccaatacagagatagactgaagaagaagatcccttagttctgcacttgatatcctaggatcattgaagtgtgtgactacgaaagtaacctgacaaaaaggacagccaattaatttgaatctccgtcacttgataaaatcaaaatgtaacaaagtaattactggacaaaaaggacagccaattaatttgaatctcattatagacaatacttacaaatgaggcaagcccttgcttgataaaaattgatgatgggacaaatggaggatcactcttacgcaacacatgaaaacaatcaacctaaaaagaaattgtagacagtcattaagaggacaacaaaatatatcatgtaccactttattggctcgaaatcactcatggttcattgccacatgctaattaagtacatattcacaaacaataacataactgaaccacccatttagactagactgaagaaatatggcatcatctaattactaaaaccttacaaactgaattttttatgcaagtaaacgaaccaactgtaattaatttgcattacttccgaaaacatgagagagagagagagctctagggaaaaatatcttaaatttgcagaaaattgttatcttaaaagggagaatcattaatcaatacaaatattcaaagcatttccagaaattttctgtcaagcatgcaactattgtctggcaaaagatagaatgaaacaataaatcaaaattcttatagcaaggagaaattgaataatctataaatctataaataaaatatgtaatatgacatctccaactaagatttacaggattacaaagaatcaaatttaccagagattccagataaaattcaggtatgtataagaacagtgaatccactttactaagaattagaagcaattggactgtccagatgcatgttgcatacattcctctttgcttccatcgagaaaacagagagatgcgatacctgaaaggcatacattgatcaacataagcaactgtgaacaaactcaatctatactccacaagagatgcggtaactgaaaggcatgcattacaagagcaagtgctacccctgaatttatggaaaagcacaaaaatatacatgtactaaagattttccgaagaataaaacaaatataagtaaaacattttgagtaacatatcttcaagacaaacatcttaccatgcacaacgtctgacgcaatctataacttcttcccggtaattgttacgagcttctttcagacgcttaagttgttcactacatgctcgttctcttatttgtttatccacttcttcaagtagggatattgattgtgattggtgagacatgtaatatgaagcctataataagatatacataagtgcataagcatattataaatacaattcctgcagaatgaaataggaaagaagcccccataaattataatcaagagttccaaacagtaaacaaaagggtattacctatgagctgaataagaaaggtgagaaagcaagtaaagaatactgactgaggcgtacaatctagttatacatcagaataataaataaataaataaaataaaacaagggccagagaacagctagataatgactaatacagattgtacccagcacaaatgttttagattagctcctacctatcagctaacaatataaggtcaaatgtatgtaatacacatttattaactgtgagggaaaaaaataacagatcacgtcacaaaggatagcagaacaacatcaagcaaagatagaagtaaaatacaaatataaagcataacaaacagaacactcagcatttaaaaaactgttagcctgcatgcaagaagaataaaaatagtcaacagcactgaatctttctaataagaaaatactacttcattacagctcctcacctgcttaaagttgggtgcaagacctatatgatacagcaacagcaaaacatcaagaagttcttcttctcttaatgtcgctgaagacatgttactctccctgggtacaaacctcaactgctgcacagaatggtaaccaaactcagattcagattgatcactggagcttggtttgtctgctatctcatcgtttaaacttccagcactgcattctgcagcaacatgagcagatctctctgaaatagggccacagtgagaacgagaacctttgtttatgtatctaatagggttcttcaagctcctagcaaaatcagcatcgtaatttgagcagcaacatggtttttgcctgcttaaatgagttactcttgtttcttcatcatccatacagccttcttcccaccgaactacttcatcatcttcatcattgacaagatgcaatttcaataaatgattaaaagaaccaccaagcctagaaatgtctgttcgatgggaatcattttttaggaacaggccaactggaaaactccgctcaccacccctatgaagaaaaccaacatcagaaccattttcactcctcttcagccagctgcagatgtcccccatgccaaagccttctgatagaaaatgaagtagaactgtgtacaaagaaaccagaacagaattgctagaaactccaggaggtgggagattgcgatctgcccctctgttcttcaataagaggttttgtaaaaatgtcctaaacaccgaaccaggtaactgaggaggcattacaggaggtatgaactgtatcactaagcgacaaaggtccctatgtttctcctcaatctgtatgaagcagcagcaacacaacgtgccatcagtttagtatgcatacaaaactccaagaactggatctctaattcagataagccattaacaaatacaatcaagagaatattaccaacttattctgcccacacagtcacacactgaaaatgaaaatttctattaaaagaaaggtttcttctacaaaatatttactaaactaacattgagaccctctaatgatttgcagtttaacctaaagcagttgcaagaacacagcaataatggcatttgatattaggtcctaagcacagatcaaattattttaccagaaaacttaagaaacctatcgaatcattattttgtttgtgtataatttaagtacttagaatatcgatttacaagtggcactgtagcaagtagctagttaagaattcattcatactccattatgcttaaaagaatgcaagtgtaaagcccaaattctatataatctttgaacctactttagaaataagtaagaaatgtgcatgtagaagtatttgttcaaaataaatctggttttccaaatctttgaaccaatgccacttacgaatatcccttggaccaccaacataagatgaaggcagaataattcttcaccaattaaagaaccttgtgtttcacccatttctatgtcgtcaatactcccaaattatagataatgaatagctaagatcttgtactctaacaatcctttaacataaattcaaaagagtaagctaagttattaatccattttcagaattaggacatactgttaaaaataatatatatgcatatatgtatgaaaatttgttggatagtgacggtttttaatcaccatatgtatatgtaggtacttttagtaatttcattgcatagataaattgtatttctatttgttttatatgtcagtatataatataattataggagagctctcataaattttcagaaaactattgataactttttttgctagaaaaactattgataatttaagatgccaaaattaggattcaaagagcttattgcacgtgtgtatatatatttcaatacaaaaacccgtgcaattatacacccgtacaataagttgtttgaatcatttaaataattcagaaaatttgtaaaaggtttctgaaattttgtgaaaagtccactgttaactacattatatttcctcacataaaaaatggaaaactagagttgcaacttttttatgtagcgaagataccaaaataccctatatatatatggtgcacttcattgatgattaccaaaaaaataactataaatatcaattttagaaatattaaactattttgatccaatggcgaataatagaagaaaaatttatataaatatctcagtataaagattattataaaacagtttatcagagcacttaaaaagaagaaaaaaaaaaagctgagcatgtaccttactaatggcttcagataaagctgtagtcgtcaacaacatgctgctttcatatgacacttcttcacatgaaccaggccaccaaacagatggcatgatagactcaaggtcttgcttgtttgggcacttccgtgaaagaaaaccttcaaaaagaaattcaaaatctgttgatttccaccaaagaaccataagctgttctctcctcaataagtgacaagccaatgcaagataggggtatgaccccgaacaagggcaatctgtcaggaccaatctagctgttttgcacccacaggagagggcatttaatatgtgttcaaacaatggagttgatccatgaaattctaggaagacatcaagaattctatcaagacttaaatagtcatgcggtgcttgcactccaaacacatccatcatgaatgacagaaatggaccactagcaatatattctatgctctgaccattttcttcaagcaaggcaaagagttcctcacatatcccatgagtaacaggaagaaagagatcttcaaatgaaacaaacctcttcagcctcctcaatttctccaaagaagaatgtccagcccgctccacacagtcaatatccaacagccttgataagcaagaaagtaactgaaaagcgcaagtattgactgttggaggtggctctaaagggagatatccttcaacggggtacttaaatgggcgggaaccaaaatttaattcgcatctttcaccttgagaaagagaaattgcaggataatatccaaaccctggtcccatctgacgaatcccacgaaaagccacaccaagagaaatgccatttctatagaatgttatttcatgctgatctagatctatgcagcacccaataacatcaccggcacaccatgactgcccatatgattcagcttctttgctccattttttttctctttttccatcaaaagcataagaatcaacagcatcacctacaccattatggtcagtgaaagggcaggaaatagttgcccatcctaactgctggacacctgaggtttctaatataacttcgtacatccatttccctttccatagacaagcattagccctaacactgctgaacatagctaagctctctacaagcaaaggtggtctgatgattctgatatcaccacaaatactggattcttcaagagcaattttgtggggtccaccaccattatcaacaacacaaattccatctctatgtctgaggacagcacctgaatctgaaaaaaaatcagaacattccttctttataatatcacggactagattgctgttgatttgatctgatattgaaccaattgatttgatagggatgccaaatatgtattcaagagttcgttcaactgattgatggccaaaatcatcacaattagaaactagccaagattttgatgaacccactttactatcctcaccattcaataacacagccaacccagaagaaagcccaccaattcggaggctgtcttctgccattcctgaaagagataaacactaaaccccaaatactaaccctatcacccagctcaagattcttaaattacaatatgcttccagagaattgcaagcctgctctcaacgctattgatttcgaacaaaactccaaaattctgagaaactaccataatcctaacctgaaatttcaaagttgcaaaacaaattacaaacaactataagtttcagaaacaagccccagaagcctcttcagtttcattgagaaaaaaagcggtattggagagagagagagggaaagaaaaaggagataaaagcggggataaagcttgaactgaacaatttccaataattttcgtaataaagggagggaaactcaaccatataactaaaatatatggtatagcaccctgcaaaattaatatgaaattttcaaatttgttatgtcccattcttgttcctcaactttccaaggaaccaaacacggatcacccgaaaaatattgacaataacaataataaaattgaacgaaattaaaaaatggaaagcgaaatacacaaatcaaaaagcacctcaaagcgacaaatcttcagcactctaatactgcaaggtcaaaggaaagccgcggcaattaaaaaagaaaaacataaatgaatgaagaactcacgggtctctcggtgaggtttcctgttcctggaattagaaatggcggctagggtttcgcagaacgccattaattgacatcacaattctgaaccccacttcgtcgaccgatagagaaggaattggaaggaagggcaaatgcgtaatttcaaactctcccagagtctcaggagacagaaaggacaggagaagagagagggaaggagggagcgagtgaaccacaggaacaaatgatgatgcagctgcttcaaccccacgcacgctgactctcaaccctaaaaacggattatgaccgacacgtgtcactctccaatcggatttaccggttactgacgtggattcccctgctaaaatacgccacacttttctttttgtctttttaattattattaattcctcggctaatttgaatggatttctcaaagtttcaacttgagacacctagtgtgggttagtgtagattggtcaaccatgcaccaatctccaaatttgataagatatgagaaattgccttttattacttttttttttttttaagtcatttatctaactattattttcgagtaaataccattttaaaatttgtattttgtgtaaattgctaattagatcttttattttattaaatgataaaataaatactgtattttttaaaattgtacaaataggaccctaaattaattttttatcaa

SEQ ID NO: 78942 - DNA, 1281 bp, Cannabis sativa
ttatcactaatttttttctattccaaccacacattacaaaatatattctttattattatattattttattaatataataaaattatttaattatgtgtttctctataaagtaattatttagttattgtaaagtttattttcttaaaaaaattgtcatagtttatgttccactaataatagtaggacattgtagactcccttatataggatggatgacatttaagattcgcttagatcatttttgtgttaaaactttactatgtctgaatttttgttgttccattaagaatgaccattatgtcgctatttacttaaaaaattatggttcatgaaatctctgttattaacaagagctcaaattttttgtaggacataaatttttggggttcagtgtattgtacccaatttgcaattccacatctaagaaaaaccaaaggaaagatagtggttaattcttcatctgcttcatggttttcaacaccaagaatgagcatctacaatgtaagtaataaattaattaattacctcataaatctattatgcttgatatcccaaactcatgaacccaaaaaacatatatcattaattttcttggtttagattatacatactagaagtgtaatatttcaggctagtaaggcagcccaactatccttttttgagacattaaaagctgaatttggttctgatattggagtaacaattgtaacacctgggttgattgagtcagaaatgacaggagaccaattttggtcaaaggtaaaacaaaaactaattagcttcaaaaaatctagtgattattaagtctaattcaaaaataattattgtattttttcagtcaagaattaaaggtgtcccagttgagtcaggtgaaaggtgtgccaaggctattgtggaaagtgcttgtagaggagatatgtacttgattgagccatcttggtgtagagttggatattggttcaaattcttttttcctcaattagttgagaaatgcttccacttgaccttaattcatagaccatggaaacgtgaatgaaagatcattagctgggatttgatcaaagcctctaccatttaaaatctctgaatttatggcctatgaggattaacttaatgggctaaatgaaatttagaatattgctttggtatatgttatgattttattaagggtatatggttttcgttttgtaataattgaagaatgtagattaatttgtatcatgtaaaatctggtatgtttgttatgttttttgttttcaatagtatgtttttattttatga

SEQ ID NO: 78943 - DNA, 5381 bp, Cannabis sativa
aaaatttgtattatttttaactgtgattaaaatcactaaagaatgataaaacataaaataatatattttgataaaatactaaatatatgtcaataataatatattgtctaatacttcgagttaaaataatataatatttaaagctaataaatatgaattttcacaattttcaaacatatgttttatttttcaataaaaatataaatttcattctattgagcatacatattttgtaattaaatattaatatccttaagtatttatttattttttatagttaataatataatatatatatgtttaaatattagcgtttaatttttattttgttgcacaatattatttttttctgaaataaacaaatattaataacaacatcaataataaaattaatgtatacattttattttaaacaaattaatcatcagcataaagctttgttatctagttatattatatttattatagattccatttagcatttgtttttttagggtgtgtattataaaattgccaaaacatttaataggaaagaacatatttattgtatttgtttaaaccgttccatttgcaaatcttggcacacataaatgaaaaagtctaaggtttccattagatttcctcattattcgccaattatttttctttgataacattttatctcttttcttatagaaaagtttctcagttctgctttttttttttcctccttcaactttcttttaaatcgatctcatcaggtattttgagttgcatttattctatttgtagctacaatttttttttttttttttgtggtatatgctatatggcctcaaaagcataacacactaatttgatcaacattttaatgttgatttgattttttctacaaacttttcttttgaggcatgatttctttaacagataacatacgcttggcaacaattgtgtcaaagattatgatacatttgtctcttgagatcttatttaacaattattgttcattttatataaaaattaagccttgtctaatctgtgagaatgaaaccattggaaaagatgaagtatcaaaagaaattcaatttgtattgatgtttctaatcttcttctacatttttttttttgataaaaattatgatttcaaggaaagtaaatgctgatgaattatgattcccattttacgggccatcgtttgttaaagtggtattaaatgctataatttagaatagacctattaatttggaagcttctgatttctatttagattctaaaatagttgcaggaaagaaattagttacatattgtgtatcatgttatatacaagaaggactaaagtggcatcttgtttcatgaacattattcttaaacctctaactgttttatttggtctcatgttttaaaccaagtattctacatttaaggaacaatggttattgttctaattttcctcttagggaagatttttgtattttcctttcaaaagttatacaaacattttatttgtttggtagtgcgttacaaaacagtacatatttggtttttctgatatttgtgttaacgatccagaatgggaagtaagaatggagattcaaaagagcacatattcttgcacggtgagctagatttttggattttagaagctaaatcacttccaaacatggatttagcttcggaaagaatgagacgatgtttcacaatgtttggatcttgttcttctcccctttcgaaaaaaccaaaggtgcgttcaaccaaccattcaatcattacgagtgatccttatgtttctgtttgcctagcaggtgcaactattggtcaaactagagtaatatcaaactgtgagaatcctttgtgggatgagcatttttgtgtacctgtggctcaccctgctaccaaagtagaatttcatgttaaagacaatgatgttgtaggagctgaacatataggagtagtggagatatctgtggaaaaaatcatttcaggaaataaaatcaatgattggtttccaatcattggtaattctaggaataagaataattgtcgtaagccttatcctgaattacacctttctattcaatttagaggagttagagataaccctttatataaggagggagttggaggtggaccagactatgctggggttcctaatacttattttccacttcacaaagggggaaatgtgactctttatcaagatgctcatgtacctgatggaatgctaccagagatttcacttgatgatggttcaatttatcagcacaggaaatgttgggaagatatatgtcatgcaattttggaggctcaccatttaatatatattgttggatggtcagtttatcatcgtgtgaagcttgtgagggagcctacaaagccattacctactggaggagaactcactcttggagagttattgaagttcaagtcacaagaaggggttcgtgtagttttgctcatttgggatgataagacttcacatgacaagcttttgttgaaaacggtaggtatatataaatatatatatattttgatcaagtgattttaactaaaattagatgagtactaatgcttgttaatataccaaattttgtcaaactttttcacatttttgttgtgttatatgtgggttgaagtttaattatcactagcaatgaacttatgaatgttatgattaaattaaattaattagtttgttgacaaatattttaaaatcactacaaataatgaaatgcaccacacacacacactaaaggtggtggtggtgtatatattaaattggtctatatttacggtactaaaaactgagcattctactgagaaatcagagagcatattcctacgtcctttgtattgatttcctagcctatcattgtaaattcaaaactttgtcctaacaaatagttcatttagttcatgagtttttttgccactatattgtaattatgatgtctttaactcttatttcaattactggacatgtggaagtagttaacgatatacatgacagtcgatatgttaatatgagttctatgatcatgcaagttcattaatcaaagaattgtacaaatagtaatactatagtctcttagataaacttaaaacaaatagagtagtgaactcttttgattattggtcacaattccaatgcaggatggagtcatgcagactcatgatgaagaaaccaagaagttctttaaacattctagcgttcattgtgtactttgtccacgctatgcaagtaataaactcagcatgtttaagcagcaggtaagaaatttgtgttaaaattgattgatacttcttaatttattcttgaatctttattacctcttgtgatataagaaattgataggccaacaagctaacagttagctatttgagtttgttatgcctttttacttcttctctgattatttgaatcgattcctctagttcaggttgtgggaaccctatttacacatcatcaaaagtgtgtagttcttgatagtgccgcagctgatggagccaaccgaaaaataactgcatttattggtggtttggatttgtgtgatggaagatatgatactccagaacacagactttttcgtgatcttgacacagtctttgaaaacgattgccataatcccacttgtcaagtaagtggctcctgaaaaaataatttatttttattttagaaaaaacatacctaaagagaacatttccaagtatttaggaacacaattctaagtccattaattgtatgtaactaaccaataaacaatacaatgtataatattgagagaaacaaaacaaacgtacataattatcaaacaagtattgctattgggcaccagtagtccccaacatcttttataagtggcatcccacagttggttaacaatattcttaaaaaattattttcttaagttatatgggaccgaatacttaattataccaatagtaatatgacactgagaagggtggtaggcacaagtaatgccttttactaattctcttattaaacggagtacacatagttgcgccacaaacaaaccaataaaaataaacacactggaaggggaaaagttgtagagaaaaaaaactaggaccatagaattccttggaaacagagggagctaggaagtaaagcttgcaaaagctttagaagcaagacaattgaaaattatgattttattttctatcctacaaatacaaaagtactagaattgcatgaatttaaacaaatgcaaataatttaaccacacaattacaaaaatatagggtacactgatgaattggtacctagtaagcaatgggacaatattggttaagttagacttcaaccaatgatagtttcagtcaaatataaatatggcagactcaaacatattctctagctcacagtcttgcttctttgcatgaggacccagttaatccacgtatagttctcctcaatatatgtcttattgtctctatgcctcatatcttggtgatatgtcgtttgattgattgaaaataatgctgatgaacagcatcgtgatcaatcgaattggatttttgctagtgatgttttttgtaattctcaagagttgaattgtggttgcttttaaactattaaattgtagattttctttttaactattatactttatttttagacaatatactttatttttagattagttattaatttttcagtttaattttgcttcgatgcaactagcgaatatcccttgcatctactttgttctagtagctacaagataatagtcattcttatcatctctacttttttgttttaaagaataatatttaagtgtaatacatacttttcatttaagaatacatgattgttcattgttgtaaaaataaataaataaatgatattttacatgtgtaggataatgctgaaggtccaagacaaccttggcatgatttacattgtaaaattgatggtcatgctgcatatgatatattaaaaaattttgaacaaagatggaggaaagcaaaatggcgtctctctcgacttaaaaagattacaacatggcaggaagatgcattattaaagttggatcgagtttcatggatactaagtccatcatcaaatcctagtggtgatcaaaatttatccctctacaatgaagacgatcctgaaagttggcatgtacaggttcgaagaaaatgcttcattccttgtgtcccttaaagttttccaattgtgttttgtattaaaatttcctatagatattgtgcttcgtgttcattttcatttgataggtatttcgctcaatcgattcaggatcagtgaagggatttccaaagggcatggctgaagctgatgctcaggttacaatctacaatttaaattaaacgtatgcattactatttatttttttttttttttggtcctttttttttttttt

SEQ ID NO: 78944 - DNA, 3399 bp, Cannabis sativa
aaaaaaacacaaatgtcctcttaaaaaaacacaaatgtcactcaaaattcatccccactaattcatatgaaaatgtttttaaatatcatctcaaatcaaaccccttttcaaaaaaaaaaaaaaaaatcatctcaaacctaacttcaagttaaaaattgagttaaaaaaaagttcaaaattaaaaataaacaaattaattttaatcatcacacaacttgatttctatatatttttaatttcttttgatattagccaggttagtaataaatatatatatatttttaacaatgaactagattaatttatttattgtttacaaaagttgttgggaatgggaaattaattaattaattaatattatataaaaagtacagtacagtaaagaagggaaccggacagtaaatagcatagaagagtttactgaaacgacttagttggagtgcgtgacaagctttaggcgtttattcgagggaaaagcaccaagagagaaagtggcataattagtaaattatacaaaaaattaggggttattgcgtaatttaacaattttgtcttaattaccggttctatcctcacacacaccactgacggttgcgcttccccgcttctataagtaccccaccacactctcaacccaaaccccacgccattttcgttatccagaaactctaatttctctctcctagggtttcgattctcttctttctttctctacaatcttcgttttctcttctctctttttagccttccatggctcaacaggaggtccagaacggaggaggtgtcgagaaggacgcagcagcacctgccgtatctaccgtcactttcacggccgtgaagcctcagatatcagttgaggcacctaaggctaatgacgccgtacagttttacaaggctgcgtttggagctgaggaggttggccggaccatgcactctaagcgtaaggccgagcaagagacgccactcattctctctgctgagctctcgcttgctggctctactgttctcgtctctgatctcgtcgcagactcggctgctccgtaagtgttcctgtccttttccggtgatcatccgtgttttcgtagctttggattaatgtccgtacatatattactgtgagcgttttggtttcttgcattttttttttcttattttccttttaaatgtttctgtgtattttttttgtcatttatgcttttgttttggaattttcttatggattagatctgttggttcttgtctttatccaactattttgcttcatttttgtgttcatttgtgctccctcgatgtacggtctctagtttctttcgctttttatactgttcagtttgttctctattattttattagatttatcacctctgcaacttgaaccttctctcttcctttttgtttgttttttatacactattaaccattaaagcttttctcatgtctataccagtgtcaagtcagagggatctggtggtgttgtgctttgcctagagactgaggatgtcgctgctgccatagccaaggccgtgagcgccggagccgtagctgagggggaagtcgtcgaaggtgaaggcgcgtgttgcggtgggagcgtggggaaggtcactgacccgtacggattctcctggctcatctgttctccagtcaagaagtgcgctaccgtggaagcttaaaggccgttagatctaatcagatttagacttttttttttactgtgtattttcttcacttttttttccctaagcttttgtagcgagtgaagatgtgggccccttcatatcatgaaatggttactctcttacatgtcagtacttggtttaatcatagggactcggttttaggcctaaatattttagtattttgatacggtaatgatatttgatcatctgtcgttgattttgaattagacaaactaatcatgcgcctcttttaaccgacacgtgtctctctctctttatttttttttggttcaactaacattaatgttgcctttgatgcttatttttattttttattgatagtagaaattaattatcttggtttaaagagagtgcaaattgggttttggtaaataaatttttcgttgacgtactttttgtacgtagccaatgaggtcgtcgcacgagtccaagcaagtcattcctttatggttagaatttttattttaaactaaataatagacaatattaaatcttatctgacgtggcaatgggagggcgggtttggtttggttttaaagtggtcctctcggctgattgaatggggtcatttttcatttggttttctcgtgagtcagcagtctagctactcggaaaaggtgcttaagtaaatttttattttggaaaaagaaaaattgaatgattattacatttttatttatttatttatttttattttggaaaaagaaaaattgaatgattacatttttatttatttatttattaaaatgttgatggttgttcaaatttaaaatcactgcaggtttcatttatgattctatttattgttagttttggttgttatatttgtattttattctatttaagtaaattcaaattcttgatctcaggttctttgattattgaaggtttgtttggaatactggccttttcctttttggtttcaagaagcaaatttatgatgatatgcctaatcgaagttatattaaaatggtataatttgtaaaagcaaagagttcctttattatattaaaatgaaacaacaaaacacatgttatctcttttcttagtagtgtcatcgtagtgacatgttttacttttactaaaccttaattcttaattaagcattattttttttaaacaaagccgagacaagaacaaagtacagtttgtaattatattaataattaatgcttcttgtgtccacaaatccaacattaaagtacatctatattaacttttttctaatctattcttagactagctatcaagaaaaaataaaataaaaaacgaagtgaaagaaagtatgtggcaaaattataactaatagtgttgaatcaaattaacgaaactttaaacaaagcaaggatgagaataacaaatcacaaataatattcggagaaaacatatggaaaattagaaataaaaacataacaagaaatgataaaatcaacaacaagatatatactgatttaagtctaatagatcgatgtgatctatgactctactctcgttctagaatgtaaagtaaaacgaatagagtgaaagaattgaattgagtgcattgatttatgaaagcactaaggccagagtttatatacaagtgcagaaccaaaacagaacaagaagcaaaaacaaagaatcagttacaagtaaaacagatttaactaaatgtaacagaaagttagttggatgagaccaactgactttgtttctcttgaca

SEQ ID NO: 78945 - DNA, 4581 bp, Cannabis sativa
  modified_base (591)..(597): a, c, t, g, unknown or other
  modified_base (996)..(1010): a, c, t, g, unknown or other
aaaagagggtaaaaataaaagaggacaatataaaaaaaggtatagagtataatttcctcgattaggggcccaaaataaaattattgcaaaaatgtaaatatgtttatggtattttcaaaaatatcatatttcatttgaacaatgatccattttttgtaaggcccaaacaatgccaagatcggctttagagactcaagttgcatttcaatcgaattattatcatttcattattgtactttgcaaacaaaaagttggttggctactctcttaaattggatattaatcacaaatttcatagagatgaaattaacttcaattaataagttatacaatatctatatatctatataattttattgtttaagtaagtgatgtggctctctaaactaattttatataaccctattgaagtttcatccggaatgtaatatttgtatattatatagttttgcctaattgatttagtggcatatagttatatttttttgtttaaataatttggttcattgttcaagaaaaagtctaatcaagtcatcactatcttaaataagttgttcattccccacacctcaaaataataataataataannnnnnnaataataataaatattattattattattattttggattttttttttttacaaaatttataaactgtactttctattttataaaatgataatttaaattttgtattttttaaaatgatacaaattaaataaaccctgaacttaattttaatcacattcaaacttgataataacttgacatggatatattatgatatgaatggttacatttttttcatctccatgctaccaacttgttttaatttaattatagtaaaaaaaaattaagttcatggtctattttgtaccatttggaaaaacatatgatctaaattgtcaaataacaaactaaatggtcaaatcaatgacttttacaaaacataaagtccaaaataacatttattttaataataataataatnnnnnnnnnnnnnnnaataataataataataatgtgattgaagatcacactaattttcctatctcccaatacagttccacatatcttttctctaccttttttcaatcctacttttccatatataatgttttctttagtgcacgattataaattatcataaatataatttggcatgcattatatatttttaagtattttgtggccattcattttagttggttgattaattcaatcattattttcattgtcatatccatgtccaagtaattatcttttaacaattatatcaattaatttcactatacaatgacaaaacacaaaacccaatagctcaacaatatttttatgaagaaaaagacattttgaatagaaaaccaaataaatagtggcaagcatgaaaaaactagataaaataatatgagtgagtaattttcatccttttatattttaatttttatatatttaattctcttattttatttttttgaaaaactttcttaagtttaattttatttgcaattttgaggtgtcacttaaatatcgctattaaatactagctggatgattatgtacatctgtgtatatctgtgtatacgtgaatggaaaattttgaagtcaatacaataataatttagttgatatttaacgatgaaatctaaataacacctcaattttgcggaaaaaaaataaacataagagttttgctaaaaaaaataataaaaaaaaattacgtgtataaaatcaaaatataaaaaaaatttgcagcaaataactcaaatatattaataataatagtaaattcatcaaatacactattatttattaaaaaaatgtcataattaaataatagaatatttgatgattttattttattttatttttcaatatagatttttgagtagatatatcaacttggttggtaggtactacttagttatcattattcaataaaggtcacacttaaaataagtagccatatatggagaagatacacgtggctgaaacccaagtgttggttaggtacttggttttaagacccatcatccatgttgtgccattgtgcaattttggattcacaattcacaaccccactcctagtaggtcataatacaattttttcatgagaaatgctaaatggcaccattagtgcttagcaccctcttatgtgttaatatcgttattagttcaactaagtatcgggtcccatatggtttaatataatggcttttaagaagtatctctagtcaatcacaacggaacatgtcgagaaagttctatgcaccactgtccactggtgcctaataacaatgctcttttttcattattattattattaagaaaagataagatgtggtggtgtctagcattattatgaggtgttatattattattgatgtaattaagagtattttattttacatgttttaatttaataactagtataaaatattactaaatatttgcaagtcgtcacctcatggtgttgttggacactctcacggacaaccctgagatttatggagtcttaagaaatgaaaatagtattagccctaagctaagacgggttaggcttgcacttagagcccacttaacttggaggtcccaatctttttctcttttaaaaatatgtatatatatatatatatatatatctattgatttagaatatgagtcttatatgtgtatcctatttaagacaataatagtttagattgtcgaaaattataattttactaacattaagtacttatactgttgaaaaaactatttaatatatattacttaaaatttaaaattttgagtacttatatactatatttaatttaattattaaattaaaatatataaaagttaatacttaaatatattaataacattattaacaccttgtagatgtcttttatcattttttgattgagtattggtatagggtactaaggtgtttagtgctattaccattataatatggcactttataattagttaacgattctttataatttttattaaagtaaaatatgtgagattcgatattaaaaatatgaaacattacaaaatgttaggcatgagccatttagcatttctattcttgattttatatgttctaacttcaaaagtaaaactaactctccactcaattaatgtataggtcttcattataccacctacacctacccaagatcaattcaaagacattatcaatgagagtgggagaaacataatcccttaaaatcacaagacttaattttttttccaattatctaacatatatgctccaaatatataataggataaccattgcttatatgcttttcatatgattatatacttttcattagcttcctcaatgtttgagagtctcataataataattattcttattgtgaattagttttaaaataaaactttctacatcttaccatatacttattttattctactttcaacactacacttttacatttctaacatggtataccataatcaaataaaactctaatgagtattcaccatacaaaaataattattaaaattcaaaataattaataaaatatattaaaaataatgagtaatattatataaatgtagaacatgaataataaattttttttttaaaaaaaaaagctttaaaatgaagaagaaaactagagcaactgttgtattgtatttttttagtttagttctttataaattttaaaaaaattttattttagagaaattgttataagtgctcttagagtactcacaataacttatgtaaaatagttataaatgtaaaaatatagttaagagctacaaagaagtgattaaaatacctatgacctattattgctcaaaattttaatttccttagccaaatgtagttacaacattcataggttggttttagtgcttagatataattgtttattatttttatagtgtgttttgttgatttttgagtgtaaaattatatatatataatacaatgtataatattttactatttatatactataaatatattatttaaatgatataaaggataatataaagaatcatgtataatgtaatataaatgtgtgatataaaataaaaatataattttttggtgtgagatattttaaagaatataatagagaagatattaaaagtgatctattaataagactttcacctatactacactcccatatttgatatttatttaatagaaaaacatttatatatgaatttcaaaattttaattttaacttaggtctcatgtaatttaggaccgatcttgattattcttaaaacagaactagagtatttaattgtttacatatagaaaagagattgataaatttagttacttttaccaatattttttttcgtttatatctattctatataaaatgtggctatataacagaatttttgatttatgagaaattattgggtgacttttttttaaaaaaaaaaataacaaattattagatgttgccacataaaggtcagcatccatctagttagttaaacctaaatataattaatccacctaaattgttgcaattaataataaatttgttcatattgtttaattttttttattaaaaattatttt

SEQ ID NO: 78946 - DNA, 6133 bp, Cannabis sativa
attaatctaaggatcactcgatcttattgaagaaaggagagaatgaaagtcttagagtagcaacacaccaacaaaaatggctcaatatttcaactcaaaggtgaaggatcaaaagttccttgttggagatataatactcagaagggtattccaaaacagtaaatatcatacagtaggagtactagaactaaagtgggaaggaccatacgttgtggaggaggtgatcctaccaagaacatacaaactagctcgactgagtagggagctgatcaagaagtactggaatagtaaacatcttcgacgatactaccactcatgttatttattttcaatttagatttcaatttataattgtaataatttcaacgatctatgtaataaatattgtgcacaaaattaatgaataaatttaattttttaagtatcttacttaaaattgtttaaattttcttccataaaagattagttcaccccactggatcatgttcgattatggcccttgatggtcctatgacccatacgatcctcaaaagagactggtccaaggaccagttgttaatatcaaagatcatgtttgattctggctcttgacaaacctatcaacccttaagatctaagagagagattggtcttaggagaattgtcacaatattttatcatcttcaaatttagtccttgaggggcctctcaaagtttacgtttaaaaacgagaaaactggtgtgaggaccattcgtgaaatattagatcattattgaacttggaccttgaaagaccaatcgataatttgatttaagactcgttaagactcgaatttggtccaacttagacatacttgtctataattttataatgagtacccaagagattacgtgaaccgtgatcgacacttgctacacaacatgcaatttgtgtataggtataatgactactaggtatgaaactaccacccgaataccaatacaggacaagtatttgctacttgcatcattgaacgaaaataatagtattatttgtctaaatgctcgaaagcaaggcatcgtcaagtagcaagtgaccaaggccatgatacccatgatcacttaacgggcatatagtacatgccaataagggtatacacaagcaatgagggcatgaacctaagtattaagagcttgtgttccaaaaataccaaaagcaaaaaataacataaataaagtatgaatgataggcctcaccatttgttcttggtactcacactaccatagttgttatcatagaaagtataaaagaataaggttagtatcgtatgcaaagtaacgtggtcaaaatatattgatacctgaaccaatgagaattattagtcgatatacttaatgggcattggaaaaaaaatcaataaatatgctaagtacttataacaaaaaagcaataaggtataaaaatgtcatttgtaaagtactgctaagtacgttatgacatagtcttagcatgaaaactaaagacaaaaagtaaataaagactaaagatgacaaaagaagactaagtggagtgaggagcatcaagttgaagatattgagacttggtaacttctcgaatcagacacttcttaagttgcttctttcttgtcttctcaagaatggagtccaaattcaagtgatctttgttggctctccaaacataatagaagaaagtaaaggcattatttgaatactcttcctgagctgcctttgcctccttccgaagttggtccatctcaggaaccaacttctttcgctcgatttcagacttctcaagatggtcaggaaatttgtatctacctgggacaccttgagcattagttcctccacctcttactgtttaagcttagcaatgtcatgaagggaaatgatctctttgtctttcaaggtagtatctgcatctctagaagtaataacacatttgagatccaatacctcctacgaagagcttctaactcagtgcagaggtctgaaaatgtggtattataccctgtggagtgattatgagcatgagtgaccaacattagtgattgcaaaatacatataacaaacatataccattaaatgttagagtaacatcaagacataaagaaaatcaagcaaacattgaagagaaatttggaggagttacgctttgtatatcaagaagtgctttggcgaggacaatactcaaatcttgtctctcaatctcattaaacacccctcgggtttcaccgaaggcccgggcagaaatgacagccatagtccccatagtagattgatgatactgagatgaggtagcagatgctgacaaagtcccacatacacttagaggaggaacagatagaggcggaatggacagagacacactctcttttcttgcaggagacgaagtcccttgagctcttggaaactcctcaaggagggtctcactaggaagatcaacctcaacccaagccctctttgttgctcgagcagaagaactagacatgttggaattcaactgagagtgaatgaaacaaaacatgtctcaacctacacaaaaataatccaaaattagaagaataacaaactcaaaagtaaaaaaaagagtatcaaacactcataagtgagactcttcctcaaaagcaacctcatcaaaatcatctgaaaatttctgagcatgctatgttcacattaacttcgtcatcaactaactcagacaaagaagacatatcctctctaggtacatgctcttaagactctgcaactttcacttggataagaccttcatcatcaggaacttcttctggaacatcaacaaaataataaggatacaactggaccaccctaaggttctctgacttaacaagagcctgaacattcttttattctagaggcatgtctctatgtattttggccctagaggccatagaaggagtcggtagctgtctaaaacaaggacctacatgcctaaatttagaatattcttccttagcatccttggtgaagaaataacaattaaaatacttcaaatatttggtgttgccagccataccagtgagaaaggaggcggcttgcatgtccctagggctcaacacgcatttgaaagttcaagttactctaatggatagagattcacactcattaagctagggcgtttaacctatctgggctctaaggagaaaatatgtcctagcatcgagattttgtaggtcacctacctaggccttagggtgtgtgacctataattacacactatacaaatactcttagcatcttttcacagagcaattgatcgtggaatatcaaccttgatcacacaatttcacaatctagagatgacaacaatttgacccatgatctcctgatctagagggagtggacacacacatccatcatcaaagattgtggaccacaattctttatcattgaaacttgtaaagttcttgggtactattaataaaggacccaaagctttacttaagaggattgagatttttatatcaaagcaatagctttaattctctgactcttatattcaatatttttagggtgaccttagcgttttggtaaccaagattactcaggctaatgtaatcgttgcaataagaaatctaaaatagagtaggttgttactattcgtctagacaaggtcaaaccactataattctgtgtgtttttataattattacttagtactctattctgtttattaattatcgttctaaaggtgtcgtattctatacatacgcctgttgtccaatttcataagtcaacatgagaatttgagtccaagtggagattattagcatttgactcaaattatttatttatctatatttgtaaagttgcaatttcctttttgggtaaatattaattgtaagaaaattagttttggtggccaagtttaaagtatcttggtggccatgttttagagtgtcttgggcccaaattttgtaactttataaatatgtgagtgtgtgagaagaagagtgagctatgaaaagaaaagtgagtgtgactttgtagtgctctcagagtgaggaaaaagtaaatagtgtattgggatagtgagtgtgtaattttgagttataagtgatatatatctctctttgtgggttgttagttttatcaaaccaagtaaaatttctttgctttgtttcattattattctatacccatgaagtttatcattttctcccaaagttctctaaaaaaacatactcattagctaaaatagagagtagccttaaaaaaataaacctaaccatacaaaaaaaaaaaatgactccctataatagagaatgtatagggagctccctacatatttgttaaatttgttttaatagtattttaataaaaaatactattacttttttattattttattaaattaaattatatttaataaattaaaattataaaatattattaaaataatcaaatactaattaaaataagaagatgattagagtaaaaataataaaaataatattttagcttaaatttaactaaaaaaataaataatacccttagagatgctaacatggaggataaaaatgaaatttatgttgttttcttttcttcaataaaaaattaaggtgattatctttgtatgttgaagttgaacagttttatgcgtggtgtatcttcacgcggttcaaactcaaaatggctcgttgagatattggatggtcctataccgagaatattgttgtcctatggaattagaagactttacgaagccttccatttgttgcagacagatccttttgttaaggttaattacttaattaatttgtttttctttcatgagcataataagaaaaagaaaaaaataaatctttaaatatatatagatgtaaaagtttccaaaatgtatacctaaataacaaatagtaatgtaattttgttgtacttgagtaattaattattaatcttacttaaatatatatgcagaaactagtggtttcactatcatctgataaagccctatgggatgctattatgaacaacgaggtggttcgcaagttcatagaacccttatgcttattaggtaatttgttatatgtacatatatatatatttatattaattacactctttaaaaataaaattatgagttatatatatatatctttatatgacatagtaattgatgatattaattggttatatttattgtagctgaaagtgagaggcaaaatgttacaagcgaagaagaaccaaacaaggctcctatcactattttgaaatggatatgggatatgataaaggcaaaggctatggaatttataggccaatttctgtctctgaatgagatcaacgataatcctgttgaagaaaagaataataaagagcaactagaagacaaagttagatcttctttgcttctttccattttgatcttattaattgtggtggttactcgagctactaattgaaataataattaaagaacagcgacatttcttctacttctaccatgtggtgactaatttacaggaaccagctgcttgctagttcaacaaggctgtagattgtttggagtcaactactgtaattttactgcacacacatattcttggcttaatgagggaaaaccaatgaaactgagggtttcattgacatatatatattaatatacattctatttttatcaaacacaaacccgctttctcatgagctggaatcaatcctttgacattcctgctatgctatatatatatatatcctgttcctttatttttgttttagtttcttgttggtgtttgtttgttttatatagttgttgatgttattgttgttccttctgatgatcctctgctttgatgcttgaattagttcttctgaatttgcttttcgggtatatatatctgctgtgtgatatcctctgttgaattcattatattaagtgtttttttggctgagatgttgttaattatttttgattaatagatgttagaaaatatatgatataataatagaagaaataaaagatgaataataaaaccaaaaaattacaattctaatacaaggatttgaaaataagtgttacaattctataactacaatacaagtaaatagaaaagaaaagatagaagactagaaatataacacatgaacatacatataaatataaaagcaatataaatagtttatatatatatatata

SEQ ID NO: 78947 - DNA, 4366 bp, Cannabis sativa
taagcccaatagatatagtaagctatttattaatgggccgagggcttggcccagtgggccggcctagttttttcccctgtaatggcaaaatatagttttaactaactaattttagcaaaatgaaaatacacactagtgtttttgctcacctttcattgaacttttcaattgaatggctgagaaaaatccacagcttcaatgaggaacaaaaccaaaacccacttagaaaattaaacacacacttctctctgcaagtttacataaactaaggtatgcttcccagttcccagtctctttcaataaccaaataactgtgtatagtctcaactctcaattcaaacaacaaggtcttgtcttttgtaaagatagaacctttttacttgaaaacttaatatgagaatgaagtgtacacaatttttcttcttcatgataagattttcagttcagggttatcctctttagttgtagattatacataaagatgcaaactttaggatattggcccttaaagggtgacttgtggatagtatctgaattgggctttgaaaggaggagctcaaataatggtagaaggagaagaaaaactatatggggtcttgggttttcatcattgcttgctaatgattctagaggtaatggatatgggggttgtcatggaaagtcaagatttgatttgggatgtgggttttccaaacttaaagttggtcgcttttgtaagcctaagaaaaattctttaggttcttcagttgctttggtgtttgcattggaacaacaagcaattggtagtgaatttcaaattgaagaagagttcaattcaaatgggactttgtctgaaaattctgagattgatggtaatctacatttgagttctgccaataatggtggtggaaaagaacaaccaaaaagagaaactggtgtgggcagtgagggagagaatggtggtaaggtcaatgttcgcgaactcggtttgagtttagggttagctaaaacagcagatgatgtagatgagattcttaaggacaagggtgagttgccacttcaagtatactcaactttgattagaggtcttggtagagaaaagttacttgattctgcttttgctgttcatgagtggcttaagagaaaaaaggaagaaactaatggagttattggcccaaatttattcatatataatagtcttttgggtgcagtgaagcaatctgaaaaatatggagaaatggagaaaatcttgaatgatatgagtcaagaaggagttgttcccaatattgtaacttacaatacaataatggcaatttacttagagaaaggacaaggtgtaaaggcccttaacattcttcaagagattcaaaagaagggtctcactccatctccggtatcctattctacagccttgttggcctaccgaagaatggaagatgggaacagcgcgctcaagttctttgttgagatcagagaaaaatatcaaaagggagagattggtaaagatggtaatggtgatgaagattgggaaaatgagttatttaagcttgaaaacttcacaatacgaatttgctaccaagtgatgaggcgatggcttgtgagcaggtcgaacttgagtactgaagttttgaagcttttaatggctatggataatgctgggattccactgggtcgatctgagtatgagcgattattgtgggcttgcaccagagaagatcattatcttgtggcaaaagaattgtatgatagaataagagagaagtattttgatataagtttatcagtgtgcaaccatttgatttggctaatggggaaagctaagaaatggtggacagcattggagatctatgaggatttgttggacaaaggtccaaagccaaacaatatgtcacatgaactaatagtctctcatttcaacattctcctaactgcagctagaaaaagaggaatttggagatggggaatcaggttacttaacaagatggaagagaaaggcctaaagcccgggacaaaggaatggaatgcagttcttgttgcttgttccaaagcttccgaaactactgctgctgtgaagatctttaagagaatggtggaacaaggtcaaaaaccgacaagcctttcctatggggcgttgcttagcgctcttgagaaagggaaactatacgatgaggctaggcaggtgtgggaacatatgcttaaggtgggtgttgaaccaaacttgtatgtttacactatcatggcctcagtttttgctggacatgggaagtttaatttggttgaaacagtccttagtgaaatgaattcgtcgggtattgagccaactgttgtcacatacaatgcaatcatcagtggttgtgctaggaacgatatgagcagcgcagcatttgaatggtttcaccgaatgaaagctcacaacattcctccaaataatgtgagttacgaaatgctgattgaagctctagctagagactctaaaccaaggcttgcttatgagttgtacttaaaggctgctaaaactgaggactttgacctctctccaaaggcttatgacatggtggttgaatcatccaaattgtatggaattcctattgatctaagagttttaggaccccgaccgccggacagaaaggatacagtgaacaaataggaaatctaaccatatttatagtctcaatcatttgaatgtgaaagtaaaaaaaaaaaaaagaaacaattcatttggtggtacttggtgccctgaatttgtatgatactagattattcaaccccatatatctttgtacatttttggctttgtttatagtgtatgcagcttcctctcatctcatatttgatgtaccaattagtcttttctacatggatgaaaaaagaagcttcttagtccatataacacctttcccagcttgttacagcatctttttctaaataaagttttaagagttatcttcttgtaatataataggtaccaccaagtgtttgaatcaaaattcatgttcctgaattgtgtaaagaaaagggtcatcatcaaagtatcaaagaatagaatataattaaagaaaaagtaagcatttttaatacaaaaaaacagattagattataccatttttaatacaaaaaaacagattagattatacctttttgttttggatgaaataattaattaaataaaggagatgttttttgtcaacaatatctatactataatggcagttagcatcaatatttacaactcagtatatatatctaaagatataatttttattctagaatctgagtctctgactacatggaaatttttaaattaaagttaatttttctctctttttttttttttttttttgacaagtagtggatttctttttaatgttggctgctgtcttagctctcacaagtggacactgaataaggtattaaaatattcaaagatgaatcaattattgttatctttacccaacaacaattattatcttgtggagcacaatcttttgtttgtatttaacaaacctaatatctaatagtgtcataataacaaaaaaaaaatatatgttttttagttttattttatttttcactcaaaaaggtgatttattagaaatttaactgggttggcaagacagccagataatctaacattaaatatagatacataaaactttttgcaatgcttttaagtatcatatcatatcttcatattattatatattgtaataaagggtggttaattaatttaaaatagatgctccagtgaatcagaccaagaagaatgattttggagaatatatgtacaagtataaccagctaattttccataaatcccaatattcatttttgtaaattatgattggaacaccaaactaccaaagttgtgagccaataatgttctcagtggtactttaatgaactttaaacatcacagctttaaatcctctccttcgtttattattgctttggattgctttagatagataatctagcattgctttggatatcgcaaagaatcaaggttttaagtttattattgtagagagtaattcgaggttgattatcaacgctcttaataaagaggtttcccgttgagagattgagaactatatttctttttgtttcaaattctctcctttgtttgttagttgtattttctcgaatattaataggaattgtaattttgtggcatataatgtggctaagtaggcgtttacccacaagagatttgattgtatcccgacttcttctatcccgaaacacttattttataatgactgtgaggtctaatttattttgattataatttatatgtacgctttttttttttaaaaaaaaaacatcaaagctttaaatactttgaagtttggtttagaagcagagctttaaaataaatcccattttt

SEQ ID NO: 78948 - DNA, 9047 bp, Cannabis sativa
  modified_base (506)..(515): a, c, t, g, unknown or other
ttccgctcagtatttaaagctaagctcacaatcaagaaattaataacacaaacactgattttatttagcctctcatttatcttagggccagtttggcacagctgtgctgtgggaaaaagcaattgtacctgtgatgtgagaaaaaatagctgtagcaaaactgtggaaaaaaactgagtttagtgtttggtaaattataaattttaaagtattgtgagttgttaagatctattataatgataatgataatgataatgttataatctagcttattataatcacaaatatgtaaaatcttattttaattatataatattttattttttatatatttttaattaatttttttaaaaatataaatttatatgcatttcataaaaataatttatagtatttgcttattatgttttatcaaataaagtatataagaaaatttttaggttaatgttgtttgttaataaaaataaaatataaactatttttttaaaaaaaataagagatttaannnnnnnnnnttttattataattagtttattttttttttagtttttttaatatgtaataaataagtaaatatggttttagtataaaaataattattatagtcttttaatgaaaatatttttttctaaaaattgggttggaacagctttagcttttagctgtaacttctctaaaattttttcaaaaagctgttttttgattatttgccacacatttttatcataaattttttaaaaaggagcttttaacttttttaaaagctgtgcattacatatcatcaattcactattaatctatgaacatggatgattaataatgatatatagccttagattcataatcaattcataactattaataattttactagttaactacaaatcaaagaaacaaaaagacaaaaactcatgtttataatttcgtggccacctgcccctgtggcatgtaaaatgcgctcataaatatttccagtgtgaaactgaaataggtgataagattgagaccgactaaatgaaacaaacaaaatacacaataaataaggtttgctgtgtgttgcttttgccttgcataatggtcaaaaagtgaccaataattccaatgctccataaatataaatattagctaggtagcaaggttcatatataattaagctttaaactccaaatacaaatgctctattattctcatgatggaaattatatctattaattgtccaattgatagtttcgatttggacgagtctcttacgctaccgcaaaataatccaagccctccgggaaatggaataatcacgacgaggacaacatcaaatacttgtgcgatggtggaggtcatgccaagcgtggtagcctccaccacggccgcagctgacgctgcctctgccgaggtttgttcggtttgcatggaattgtttttgccgggtgagagtggcaaacaagtcccatgcggccatgtttaccaccaaacgtgtattgccgagtggtcctttctcaataattcttgccctctttgccggtctaaactttttcaagactagctacctagattttcattttcatttcatgcatatataaatatatatagctgaaatatgattttaattagcttgtttttctttgttttattagtcaattataaaataacatttttcaattagtatatatttcttttattgttcggggctaactttctctctctatatatattctgaatacttcgtcgttcacgtcgacataacaaactatctattatattaattaagtaaattaaattcgtaattcataaccaactctattttattaattaataactacctccatttatatatgttttctaaccttcattttctgcaacactaataaaacggcttcaaggtctctatcttaagtgagaagatatatatgtgcgtagttgttgatacaagtgtttttttaagcaaaaatattcctaattataattagcggaattacttgatatattattatttctttttaaatttacgatttaaattcttccaatgatttctacgtaaattgctatatagattttaattagaattcaagttgttccgttgattgttacgtgagttgttatataaaaaaaaactacttttgaaatataaaagtaaaaaaatctctttaaagtataaaaaaaacttcttataattgacattaatacattagtcttaattaaataggctacatattctaattttatttcattttacatgtatcattatcacacacagtactacacatgcatatgatgtcatgaatgaataagaaaattcttcattttgttttctttatgtacaatcttccatcaataagaaaattcttcactttgttttcttttttctgattctctttctttcattttattttttttccatattttttcttattaatatacaatttcatatatatagagaaggagatatttgaatctgattgatcatcttcatgattatatataaatgttacgtacccaactccaagatcatagttatctcgtattgaagaagaacaaaattatatatatccacgtataccatgtttctacttgtgggaaagttttggttctctaactatttatttattattaggtaatttgtggtataaatacttaaatttaatttctgattacaaataaatactaagtttaatttttgacgataataataattaagatataattttgaaacttataagcacatattaagtaaattattagcaattactggttaatccatgccaaaaaaataaatttaaatatttatttataattgaaagttaaacttaaatatcaatacaacaaattacattttattattttctcagatcagattaattaaaaccataagttaagtcaaatataatatataaccggaccgcataagcatttgtcttttcttttttctgcaaacaatgacaactttgaagtctttgatcataacatataattaattataaaatggttaatgaagttggtacgtagtaagaaaaaatggataagtactataagtagaagctttttcagaagatggaccctcaaccacccactcccaccaacctaatgttgctctatagtatttatatatacatatcatcttaagaacatacgatttccttactttcaattattagtttgaacaaaatttaatgagcatacagcaattatatacgatttggggtttaatctgtgtgtaatatatactggactgaaaattcatgtgaaggttagcttgtttaattattataattcaaaaaaaaaaatgttaattgagacttcttaaaacttgtaaatattacattttcgcaaaacattacttgctacattttcagcatcttattaaaaattcttttggtataagacaagtgctgctgctgccttgactttttctatttattagtaattaaattattaattctcattgcctttaagatttaattacaattgtttcacacctaatatatctttttgctacctaccctttaataagagaaccatgacttttctgctagaacaatacatgaacttttaaaaagtcaaacacttaaattattcttttatagtacacagttcaataaccttttcaactttactttttcaaatatatgtccaaaactttatttataattaatagaatatatttataggataaagaacttattctacaacatgaacaagaattaaaaccaaaatattattttatatgatctaaattacattatacaatatattaacatttccaagacctaagatttatgttaaattatattggacaaaaaaaaaatgtgtgctatattttttttagaataaatacttgttatttataaattaaactggtgggtcatttacaattacagagtaaatagatggaggaacaaattccatccaatagcaagcttcatccaaccctaaatcatatctagccaaactatgtgcggtcatattagccgttcgtttggcatgcataattaatacacctgaaaaaaaaagaaagaagacaaaaaaatatctataataagatcgttaaaagcagcaatacaattcgatcgaccatataatatttgtaaccatctgagcatccgtttctacatgaccaatttggagttccaactgtgaagcccataccaaactgtcgaaaagtgccttggcctccatttcatgtgaagaaaaattaccaattaaaggcttggagagggcagcaatgacatgaccttcactatttcggacaactacacctacccattatattgttatttgaatccacggttgcatccacattcattttaagtttcccatagtcatgtggcagccaaggtgtatggataacaggggttgttgtggaagtctgaggtgttgaattttgttgtggtcgattcttagcttgagcagatcggtaattggacaaatagtttttagcaaaagatgctaattgtgcagctgatttggctttttgtccatgtacaacacgattcctttcagtccatatacaccataatgtgcaaattataaactccattttgttgactgaatgtagtgtagtcaggtgaattaaataatcacctttgtgcatcattccagcagtgttccagtcaaaatgaaagttagtggcacgccatactgctcgagcgtatttgcaaccaaagagtgtgcgaccaattgactcccaagattgacaacaatttgaataagtcgagtctgtaataatgttccttcgcaccagcattgtcgcatctggaatagcatcgtgaaatactcactaagaaaaaatttaaatcttttggggtagctgtaacttctagaaatatttccaccaagccgttgatggagatgatgtcgaggagagccttgtttcttccagtgatgcatcataatggtaacctgaatggacattgtaaatacctaaagaatggtgatgccaaataagcttgtcattggttaagaagtagcttaggggtatcgtaagtaaatgatccacatcaaggctggaaaagtactcatgaagcagatggcagttccagtgtcgatcttctgtgatcaagttggcaacaacagcttgagcaggacctctataattagttagcacaaaatttgtgtggtcgggtatccatggttcacttgcacaatttatgtttctcccttcaccgattttccatcttagtccagcacttaaaagctctcgttcgaaaagaatgccttgccaagtaagtgaaggaaaatgaccatgaggtgcttcaaaaaatgagttgtttggtaagtaacgactttttagcaatccacttaaaagagatgtaggattatcaagaagtcgccatgattgcttagctagtagagcttgattgaaatgcacaaatgaccaaaaacccattcccccatcgaatttatttttgtataagagttactagttacaccaatagatttttgtaccattttcatttgatccccactaaaagttagacatcattgtttcaagctgattgcaaatcgtgatgggtaaccgaaaacaactcataagataagtagggatagattgcaccacatctttaaggaggatttctttgccgctaacagaaaaagtttgtcattccaggttctcataagtctccaaattttttctttgacctcattaaacagttgttgtttatcacgatctgtatatgctggtaagccaaggtatttttcatgggagtctcggatgggcatagacagcactctatgaaattgtatttgtgtagccaaggtcgaatttggtgagaaagaaaggaccgatttgtcaagattcaatacttggccaaaggctcggtggtaggtatctagagatctcttgatagcatggcaagcactttcagtagcattacaaaatagtaagctatcatctgcaaataaaagatgagaaatcggtggagcccttcttgtgagagaatagccatgaagatgtcctagttgtttttcattatgcagcaagtatgaaagaccttcagaacatattaaaaataaatagggtgacagagggcaaccttgccgaagtcctttggttggtgtgaccgaaccagtagtctctccatttaagagaaaggtgaaatgattcattgtcaagcaattcataatgagagatgtccaacaatctgcaaaccccattcgttccataacaaccttgataaaattctattcgacccggtcaaacgccttactcatgtctaatttcatagtagccaccccttttcgacctgacgttttgagtttaataccatgtattagcttgaaagctaccaagatattgtcagttataagtctattaggaaggaatgcactttgagttttcgagatcacatgtggtaggacattcttgaaataagaacctagaactttggtaataagtttggagatgacattggatagactgatcgacctgaaatccttcatgcattgtgccttcttgatcattggaattagggtaatgatagttcaattaagaggagtaggttctgcaccatcatttaggacacttaaaacaatagaagtgaccatgctcccgactacatcccaattgttttggtagaacattgcagacattccgtcaattcctgaacttttatcacgtcccatagtttgcagagccatttcaacatcagcttttgtgaatggtttgagaagagtctcattcatgtccatagtaactgaaactgggattgtggccaaagttgcagcaatagcactattatcaattgaagaagcctggaacaagttggagaagtaatcttggataaccttgctcatgtcttgtttggaggtaacttttaaaccatcttctgtcttgagggaagcgattttgttgtttgacattcttgtcgaggctttaaaatgaaagtattttgtattcctatcccctaattgcatctaatcaatttgagagagttgttgtcagtatatctcctcttgttctatcaaatcatctagaattgatttgttatatttcagtatagcagttgtctcattgatgagagtatgagaattatttaatgtgtcaactttcgattgtccatttgctatattcttcttcatgcggccatattttttaatgtgccattgttgcaatgatttagcacatgaatccaacttattaagtacactcctaatagggtctaatgtgttgtctgccaaccaacaattagagatgatgttctttcttttagggtcagataaccacaatttctcaaatcgaaatctgttgtgtcgtttatgctgctgaggggccaaatcgttagagatatctgctgattgttctcggtgatcaaatttaaaatagtctaggtgtgaaactttgggttggttataagaagagctccacacatcattcacaaagcaccaatctagacgctcctttaatgtgtttgaagttgttcaatttttttcctaagtgtagctatttccttgaaaaggtggatcaaaaagatgacaatgatcaagagcacttcgaaaagcactcatatgtgtttcactacgcaaggatccccctgatttattctgatttgataatatctcattaaagtatccaattattaaccatggctgcaaaggagccacatccgcaagtctacatagcagtgtcgaagaaactgatgtattttgtgcagtaggagcaccatagaaggctgtaaaatggtattgttggccaccagtagcagtcataaaacaatcgaagaagtaggatccaaaggtattgaggtttacatcaatgtcatctttccacaacagcatacaacctccacttagtcctatccgaggcacttccagaccatgagtgaattttaaagattgttgaatgcggtttaaagaattgttattgagtctagtctccataagaaagagaacatggggagattgctgctgaataagcaatctgagatgtcttaacgctcttgagttccccaatccctgcgcgttccagcttaagattttcataatcccttgcaggattgtaaagtaatctccgcagagtcgtcagagtcaccatctgaatccttggaaattgagtaaacattttggtttaagcaatccccttttgacgaggaaggaaagacaacattgcaattttggttgcgacatctcttaagcgtttgtctcatagaaggagcatcagtttgcctcttaaaaattatgttgggttgaggttctctttattgatttctggtttgttgtaggttgtggaaatgagtggtggtgaaatggttatcagtgatggcatatgggggaagaaacatgcaacaggttgttgatggtagtgaaattaggcagggaatttggtggataggttgcaaattgaatttgtggattgctagtagagccaatgtcgggggtatcaatttggtttaggttagtgatgggtgaatggttgatgggaagtggattcatgccgcttgtagtggaaggtatggtaggagatgaagagtgtttagtgatcaacatatttgatgcaacagtggttatggaggacaaatggttatggggggatgttgtaattgatgaaagtggcaaggtctgaggttgatgtggattctgttgtaataagacagaggcattgctatcattcatagccatgttagaaacaggagtagacgatgcaccatgaaagagaatctttggctgaggttgtgatctgacacccagagttgggattgtgattactagtgatttatgagccagacgtgtcaagagtggccaagcattactcttggagaaatcagtacggtacttgtcatagccattagttggtaacttggcatctttcatccaaggaccatacaagagatcatcatcattaccattgtccattctttccatgaaatccacacatttttcaaagggatatgatgtccaagcctaccacattcaaagcaaaattctggcaaccgttcacatctgaaatcaatccaaaaatgatatttgatccttggcaaactgatcattcgacctctgagtagtggtttctctataggaagtctaacacgaatcctcaaaaaagtgttggaaattat

SEQ ID NO: 78949 - DNA, 3030 bp, Cannabis sativa
ccgagtcgagagtgcttgagcggctggaagcctcttctccgtttggctgcgccgagctgtgtctccgtttgtttggagtggtggtggtacgagatcatgatcgtgttgtgtggttttttagcggaccccaaatcaacagtcgcttccatgggggtgcttatccaaacgacgtcgttgatctacgttttcccgtcttcgctcgggtttgctgtatcgactcgggtcgggaatgaactcggggcaaaccggccatacagagcgaagctatcggctgtggtggcagttttgttggctttcgtgacgggcctatcagcgatgagcttcgcttacgggatgaaggacacgtggggcaggatgttcacgagtgatgccgagatcctacggctgacgtcggctgctctaccaatcctagggctatgcgagcttggtaactgtccgcagacggtgggatgtggggtcctcagggggagtgcgcgtccctgcaccgctgctaacgtgaacgttagcgcattctatctggtgggcatgcctgttgcgattgggctgagcttttgggtcgggattgggttttgtgggctctggatggggttattggcggcccaaatatgttgtgctgggcttatgctctacgtagttgggaccacagattggaatttcgaagctaagagggcccaaatgctaacatgcgctggctgtgaagataacattctacctagtatcgattgtaaggatgatgaggaacagccattaatttgtattgtggttacttcttctaaataatccaacaactcaatttagtaaatctaatatgtaacatcttctctagtttttccttaacattttttttaaaaaatttcactgttattgtttattaccactgactttttttccccttactcttaaggagggtaacctgagacatttttgtttcatcttattaatcatgtgattgtttaaccagttaaatcttttgggtatattatttatcttaaattaataattagtacatatatataatcaatttgattcttatatctaactattgagattgatatggctaataatgatgttcaaactgtcatcatcaccttttttttattaaaagaaaaaatcaaataaaacgcaactataattacttgacaatatcatatcaattgcacacatatctatacattaaatatctaactactaaaatcactagtagaatagtatccatattaattggttttgacacacagggcaataatatgacattttttatcattgaaattaattggggcagaatagtaaaactgggaaatgtttcgcagattcggacatgtttgatctttttctttcatgttttggttgggtaggcaaaactcgtttgctaaaaagtatcatctcaaaaccaataagagagtgacacgtggaaccactgatatccctatcacgtcagatcatcaggtcaggctcaaacacaggaaagaatagagaaagacttttatattttttttctttttcattttttttttttaaaaaaaaaatatatattgtgagtctaataattgggctaacatggtccagttgggcagacgacgcagacgcaattggtgctcatcaatctttgatcagcttatctttaacttccttcttttgctatatagtcattttagcttgaatgacacggactctgcttctcgatgaaaaaacaaaacaaaacaaaaaaaaaatagtggtactcatcaaaatggtggcggtacaaaggataacattacatcataatatataatataatacttaacataataattaacaataataatttaaatatacatattgacgtcaatagcgacggtgatggcgattacacttaaaattgtttcaattataggctacctcttcaattatatttcaatataatatatacccaattgtgatgatttgcggccaccaaatttatagatttgtatagactatgatatatggtaatttaatttacgacaattttttccatattaacgtgaatctataagattttaaagatcgaatctctcaaccgtcatagagagaggtaaaataaaattaataaaggtgattttcaatttcaacatacattttatataattaggtaagggaattaattaattatgaattagttgaaaatatcttcctgttggaaagggttactttctggggtataaagggggtggtggggaaaaaggagaagaaggaggagggaggaggagggtgcacatgggtgatttgatcgttttatttatatatatatatgatacgaacaacgtcattaattaatgggttaattttaacatgtatttgccttgtagttaggggaccaatttactaataaatcttcttaattttcttctttttggccggtttattagtcagatcacaaccaccattacatttgtaataattcctcctaatattaatatacatgtgatattgaaaagtagacacacacacccaacaaaactttaaaatataatgttgcacacgtttttaaagaaagtaattttgattacacccgttactctctgtaaatgtaatttttttttaccagattacgtttatttattataaatatatgttacaatatatattatatatatatcgatgaatccactgtaaatattcatacgttcggtttctacaagatgatgaaacgggtttatttctatccttattacgttatgtattagatatcctggatacacaaaataatttttgtttttatcatttttttaaaaaaattattaaaaaaattatatttaacactaataattctcctgttaaattacgggaaatcgccataaatttattacggaaacaaaaaagttttgggtgttaaactctcaattatatcatttcatttgcatgcacttaattcttaaagtttaaattcttattgcaaaacctttcaaactaataaaccgttattatatttaaagtgttatcttattaactttcaacatgtttatgtgtacacgtttatatttacacatttaatattatatttttaaaatt

SEQ ID NO: 78950 - DNA, 2566 bp, Cannabis sativa
taaataatggcaaactgcatcgagtggtagaaataattagaactttaaagatcattaatgctttgtatattaatattgaatgcaataacaattagagaagtgctatgcggattttctttttactttttttttttccaaaaaacattttaatataggagatgtacaaataattgtattgaaatatttgtaaatatcacaacatttatgtaaatatttcatctaatttaaaagtattacaaataattattgaaatacttgccaaactttcttagggtaatatttgtggaataatatattgataaaaaatcaattagaatgttaccatgtaattgaatttataataattatacaatttaatatgtttatttgaccatacaataattacattattttagagagtcccacattaataatatatgaaacttaaataccatacataagatgtatgagcaattcgtctcattgcaattgatttttgagatggaatcccatgcatcttaccatacactcacctattcttacttcttcaaccatacacttccgcattttaatatggtatcagagccaaattaaaattctaatgattaaccaatctaaatccaaaagtccgtccgaaaaaaatgagccaaaaagctgcttgtgatttagggatagtgagccaaagagagccacttgtgatcgagtcgtgtaagattggtgagcaaaaaaatagccaccatcttgaggagaccataagaattgagtgtaattatattgtgttattactaaaaattttccattttaaatactaactactaaaaaatatattattttcctatgtaattataaactattttgtcaaaaatgattttaagaatttatatgaaattactacctcatatccaaacgcatattgtattttagaatatagtgtaattactagtaattatacactacctaataatttcagttacttccaaacatactcttagtatttttctaggaaattattataaaagtgtctatatatatttgattttcttttattcttcttactctaattcaattggttaattttaaaaatattttcgacatgaaaaatatgaaaatactattcaacaataatgtgaaaattcctcgggtagagctgtttggaatagaataatcattcccaaacacaatttatattgtggctggccctttgggaaagattaaatactagggaaagacttgcaaaatttgatgccaacatagatacacatgtttattgtgtgggaaacacaagaaaaaataattgagcatctattttttgagtgtgaatatagcaagtagtgcttgaaggatatcaaattgtagctgcaatgggggtcgaaagtggaaaccttgcagaaggtgctgcacaatatcaatcgagccaaggcattttcatcagcttgaaagagtatgctaaaggcagttatggctggattagtttaccatgtatggagggctaaaaatgatgtattatggaatcagaaactatggcaaatcaggattatagtgcaaagaattcaatatgaaagcaagctaataatattggggattctccctagtaaaaccaaagaggaagacatgcaatggttattgagtatgtaggaattgtttgtaactaaaatttgttgtttgtatgttgtttgtatagttagatagagtattgggatggaaagtgtataaagaattgtaaaatgtaattgttgatttgagcaatacaatacccactctgatattttaataaataagtttttttatttatatttattttattttttaatattttttcttacatttatactttgtatttttcttctataatatttttttgtaaattaatttttattatgcatgtcttaatttttacgtttactcttctctctaatttttaattttcacccatattgaaccaaattctcggtctgcccttgctctcaagttatattcacactcgacacacacacatatatatttatatatatcaacacacttatatttacttatatttcatgatttcaatcagcatttttaaaaaattctgaataatttataatattaaaaataaaattaatattttattatattacttgcatgtttatttttttttacacgtgtgtaaataattgtttgaattttattttggcactataaattatatattcagaattttcaataaatttacaaataattttaaatagttaaatatataattatgaaaaaaaggactaaaaaactctagataccaatcagataaaaagtagcaaaacaactatgtttttaaaaggtatagtatagttttttttttttttttttatgtgaattaccataattaatacaaaaataactgtttaccactaaagtaagttaactagctagcaatataatatatatatatatatatattagtcaaaattaggtaaataatttaaatattttattatattgtatgcataattattttttcttctgcttttggcactatatactatttagaacttttaaaaaaattatagattgttttaaatatgatgattataaaaataaatagactaaaata

SEQ ID NO: 78951 - DNA, 4441 bp, Cannabis sativa
aatggttttttttttttttcattattatttttgtttcataactcacggcccttaaaaatatattttggccacagaagctgcttctagtgctaataagttgtagaacctttaattttttaagaaagcttgatgcctgagccagttgatgtggtgttgtattatataataaatggggaacataataaaagaatttctcccctgttaacttactgggagatatgcctccttttataaatttcaagtgctagttgttggacttgtactgtttctttagtgctctgatataacttgaaaattatatggcggttttgtttcaggaaactgattgggcaggtttacttcacttggtgaaattctacaagggtcggcggtttgatgcagatattggacttcccaagtgagatgctttaacagaaacattttgacattttatatgcttacaaaatttatacatgttacaaccccatttttgtaattattttgtgattctttatattgttgcaggccaaatgacttccatgactttgctgaatactttgttcttgaggtaatgcaatgaggtaggatatgtaatacgttatcaatgctgtaatcggtttggttcataatttttcatttataagttcaaagaagtggtttgttagcttgtccataatttgaagaatttgttgtacatcttatagatgtattaatatccctgtcttatttgatgggtctgaagtttctctctatattcttctgcagctttctgggactctgaaattgatttctctaatttcgttttactcatgaaaatttaatatttcttaatatctaattagatttttggagtactttaatatatcatcataaggattgaagttgtctcactctagccaaatatcaaattagcctttctatcttgtaggccattccacatgcagtagctatggttagaacagcagataggaaaagcccaagagaggcagttgaatttgttttacagctgttgaaggtaattattattctaacgttataagcagcaagagcaggaagactgcttctccttcatcatgagagtgtatataaaccttttttttaactctaccattaaaattttttacttgagatctgtgatacataaaaaaaatgggggatagactttattttctccttgtttgtgcattcttagccttataaaaagtctgatttcatgtttcctgttgccttgcctgcataccaaacagtataatgacaataatggaaatccttactctgatgtttattggctcgctgcattgattcagtcagttggcgaacttgaatttggacaacaggtttgatataatttctattttgactcttgcttcatccattcaattttttgagcactaaaccagtttattcttcccgatttgtggtagtggtttcctagaatgttggcctgtgagtttttcaattccagttttcctctgaattttccactcttgttcttccaagtaaagaggaaaagatgcttttctgttgctgctattgttgtaaaaaaataaaaataaaatcgttacctcaccattataccctgagcttgatttgttacaaattttatgtacggcagagtattcttcttctatcgtcccttctcaagcgcattgaccagcttctgcaatttgacaggtgcgtgacttgcttcatatggatgaccagttattattttagataattgtaaatctaacttttatcgtgtatttggaaatgccatatattaccaggctgatgccaagttataacgggatattgacagttagctgcattaggactttaactcagattgcgctgaagctttctggtttcgtccctctcgtgagtttttcttaacctactgtagactgcatttcaattatttggggtattaattatatggtgtttttgggcaggaccgcattgttgatctcttgaaaccgtatagggatttaaaggcaatctggccagttcgcattgaagctagtagggctttacttgatctagagtttcactgtggaggcattgatgcagctttgtctttgttcatcaaatatatagaggaagagccgtctttgagaggttggcatcactaacattagtgaaatagtcacgattctataggatctacctagtcttatacgaatattttcttttttccgtttttgttctttaatttctatgcgacatgcacacttaatatgcattcacaatttcagggcaggagaaattgggcgtgcatgctatgagattgtgtcagataagagttggatctaattctaatgatgacataagaagccatactcttgtgaatatgctccatctacttgagggacggatttcattcaacaatatctttcttcgtcaccacctgttctgtatcttacaaatccttgggggaaggtgctatccttttccttttctacccttattgatatggataatttctcctgcattgtcgcagtgtagcattcttatgttgagaagtaataacctttctctgtgtgtgtgtatttaccaagtatatataatttaaatcttaacctgtgcccatttttacttgataattattaggccaccgacactttatggggttccaagggatcataggccatttcatatgggtgatgtagaagcctggcacgagcagaaaaacatgttcagctcttttcttccagaaatcaaactaccatctgaacctcagaaccttccacacaacacttttgtcttgtcagaagcttctgatgcaatgttttctgtcccagaagcttctaagaatggtttggctgttctacaagatcctggcgatggcttagctgtttcagaagctcacaaggatgtttcatctgtttcagaagctttcaaggaagatttttctggtcgggatgctttcaaggatggtgttctctatgtttcagaagccttcaaagaggatttttctgtacaggagtcttccaaggatggtttgtctgttgtggaagctcccaatgatggtttgtccgttgtggaagctcccaaggatggtttgtccgttgtggaagctcccaaggatggtttgtttgtcgtggaagctcccaaggatgatttttctgtcgtggaagcttcaagggatttggtggctgttcctgaaacctccaatgatggtttggctgctccagaatcttccaaaggtggcttgtctgctccagagcctttgaaagatggattggctgctccagagcctttgaaagatggattggctgctccagagcctttgaaagatggatctgcggctccagaaccttccagggatgtttctgaagcttccaaggatggtttggcaattcccgagctttctaaggaagctgatacaatttctacgagtcatggacggaagaggccagttgttaaaatcagaatgaaaagatctactgctacaagtagagcaacagagtttgataatcttaatcttgaaagatcccagggcggacattacgaaattgatcgcggggccagcagttcaatgtctgttgatgcgccccacagaacttttgcagaagctgtgagtattagtactcaaaatcttgaagaagtcaactcatgctatgatcgtgggtccaggatgactgctagtataggcagtgcgaaacttgtgagtgatgctgatgatgtgggcaaggaactccaatgcacagctgattcaagcaaggtttccgggctaggtcaaccagatgacccatcatcatctagcttcatccaggacaataatgtagatgccggtgcacaaaagtttgcaagtcttcaagctctgtcagattcaaggcatggtcatggaaaagaaaaggagaaaaagaagaagaaagacaaagacaagaaacggaagcgggaagaccataaagggcacaaggatgatcctgagtacttggaaaagaagcggctgaaaaaggagaagaagaagaaggaaaaggagatggccaagacctcttctttgcacgaccaggccaaggtatcctctgtagtagaacagataaataagaaagaggaacttaagatcaaatcatcaactgttgaagcaaaaccaattgtatctagtggatccaaattagttatcccagcagcagtaagggttgagaataagcctgacgcctcaacacaaggcactacttctgttgctcccaaaattcgaataaaaataaaaagcagaacgatcaacaaatcatagcttatgtatgttcccctgtaatatcaaaaagtggctggattctgaatttccctagatgtttttgattcatctccggcaacgtttaagtacatagtactagtaaagcaagtttagtagctgaccctggaatgtatttttgtaaactgtattggttacgacaatctgagtatttgagattcatacggccttgttctatgatctttgacttgtatgaatgtattttcagtttgaaatttaattcac

SEQ ID NO: 78952 - DNA, 4116 bp, Cannabis sativa
tatttatttaactaagaaagttttgttcttaaattatatgatatttgatgctatactataattttttttagttttcaaataattatagaaaatataaagatttatttttttttttaaaaaatgaagttgagtttggtcggtttaaaccgattaaatcgtggattaaaacgatgagttttttttacatttatataatggtcggtcagttttcagattataaccatgaaaatcgaaaatcaaattttggattttttttttgtataaaaaaccgaccaaaccaaccgttgctcaccgtttactaaaattagataaaaatccttaaatttaataatctcaatagttcagagacatttttaacgaccttaaaaattaaaaattcaagaagatgatacatgtgaaaattcggaggataaaaatctaattaactttttttttttaaaacaaatagattactttcaaatgccttatattttttctcataaaagaaatcttacaatcccaaaacacatagacgaagaatataacaagatgtatatatgtattaaatatttatctataaaataaataaataaataaatagatcgctttcaccggccctcgttccagtagcagccgtcggtctatggtaggtgggttgtggtggccaacgtgtcggtcccaccactgcccctgtcgatggccgaatcgcgacaagaaagaggcggcgaagaagcattcgaaatccacggctgtcagcggcttcagcgggcactgagcgagtgctaccgacggattccgttagggcgagcgcgggactcggcctgccgtcacctgaacagggctctggcagagtgcctggtttcgacggcttgtccagaacagtacgaggctgtgaagagcctatgttccagctccggaaccgctttgaaacgatctcagtgtcaagaggctcagctctccctctctgtctgcctttcttaccatcaaaatcaaatctccccctgacatccaacaattttccctactgagtttcttattacttttttaattagcaacattttatgcaattatcgatttcttattaaatattttgtttaggtccttaattacatagtaattatgctttctttatattattctgattttcaccttacatcgtcatgtgtggacaataccgaattcattcttcattatttccctaaatttttaatttctaatcatattctacaaaatacatatattttatatagatttttgtatttctacatcatccaaataaaaaatgaaaaacaattcttagtttttaaaaataaaaacagttttttagttgaagtaacaagcaccctctaaagtacgtctatattgttttgtaagcgtaaattctagtataaggtattgggagagttcggaattcctaaaatgtgatttaactcacagagtttcaataccattgttattattgttgtttaaaaaagaacttcattaatggaagagcaaagattaccaaaggatttggcaaccctgcagaaacagtagcaggatacaaaaagaggggttttcttcttttggggtcttttgcaattctcagtagcaggttttcctcttttggggtcttttgcagcaataaaatcatcaagtattttaaggcacccttaacccctcatttccatttggaactcagttttctttgtaactccattcaggtacatatggaaaaaccaagagcatcctcatcaactttcttgggtaatatcaaaatgcatatataattgtcactttaaatgcaacatattatggttttcttttgtactgcactttgcatcgaaactaatacatttcagttcgatggaggcttgatgtttcatcgagatttataaaggaactatcaatttttattagacttcgatggtacttgataactataagaatattttaatagttccaagtgtattttttttttttctcatagacttgtcaaattttattctatagacttctggtgttttaatacttgattgccgtcaaaatcattggatgatgtttgatcattttcatttgccatagataattatcatatatttatagtttcgttcaaattatcataggcaggaatgcaataaattatttgaagtttcagaaagttccaaataattttcctcttattcatccacttatttaaggttatttactgcaaattttcatttaaatttccctcgtttcagtggcaagccttctatcacattggagaaactattaataaactccatgtgtagcaatagaacttttgaaaagatagcaaagcaaccatacaattttgataatgaacacatacagcaaaacatgaagtttaagagaggtgtacaattaaaacaaacttaacaaaactgggcacaaacacacagcagattaagtagaaaacctctctctgccatgaggagaagaatagtcaatattgggcccagaaggaatgattccaaatgggtttattgtaggatggcttccatagtaatgtctcttgatgtgttccatattgactgtgctactcattccaggaacttggtatatgtctttggtgtagttgaataagtttgggtactcgcggagcagtttcttgttgcatttgaaatgaactgcgtaaacctgtaattgtcgaaaactcataaggctaagctactcaaccattctacactatgatgctaaataagatattctaaacttcaatatctaaggttataaactttcactattcctagtcctagtacacaatggtaagaataatctgaaaaaaattattctgtcatttaataaatatgaaacatttgaaattacgaacacttgaaaaagaaacataggagtaaaataagtttatcttgtataagaaatatatgtctatgcagaagtagatctgtttttctacatcctaatctctaagtccaagtagaaatacaatggctagaaagtcagaactcaaggaatgaataatataaaaagagaaagaaggtgaaaacacagctctcaagaagctaatatttctctcccaaaacaaacatcttttagaattcaatctaaaaatgttgcataaccattttagaggtacctaaaaactgacatttcattttacatacgacatgactaagtaatatatcagaaagagcataatattagtgttaagaattagtcatgcattatcattattctttattctcttgatactaaaatttattttctgattttcaagcaggattgactgatttctgaaaaataagtttgtgatacctcatcaaatcgtattaaagtgacaaacaatcgaatgtcagcttcggtcaaagtgttcccacatatgtaacgttgcttgtcaagtatctcctcacatttgtccagagcttcatacagctttgtcacagcctgcaaaacatagtaaggtactttattattaggaaaacataaaaagcatatgttaaaccataaataatctaattatcaacttcatcattaattttttacacctcatcataaggttcctgcttccttgcaaacccacatttatacacaccattatttattgcatcataaatccattcattggtctcattaatttttgctctcaattgcggaggatataagtccatatcaggattctctgctatagcattgaactcggaattaaacatacgaattatatctgaactctcattattaacaacagtcttgagtttcttatcccatagaacctatcaaaacaaaaagaatgcacatataaggttcattaatattcaggaaagatgagaacaacatatacaacaatatcgttattcagcatagattttactaactggaacggtatattttccattgtagtttgtactagcaagctcataaaggtctctgatgcttttggctccatttaaagggtcaggtccagctcctggtagctctgcatctgtagcagggaaaacccaccccatgtgttcatcactttccttggttctttcccaaatggggttgacagactgagtaaaataagtgcaacatacaaaatcatttccacattgtgaaagaaaacatgaccaaaagaaagattactatgcataacaacatactgtaaagctgatggctttgtcaagtcctttgatattc

SEQ ID NO: 78953 - DNA, 1019 bp, Cannabis sativa
tcatataaaaggtataaatgttgtctttaccttatggaagtatttttataaataaaatatcaatttatattttttatgtaataattccaaaaaacaaatggactaaaaagctttcaaaatagataagagattaaccaaaacactgataatgtataatagaagtaccttataaaaattgattaaaaagcataaaattaaaaaacagcaagtgcgcatgaaaaatagtttcaaattggtatcaaattcaatataattctctttgtttccattggaagcaaattggtcagtcgaattttacatggcttttactttatgcggtatttatataatagtttttgataaagttggtataatctttcacacaaatttattcttattctgatctggttattcaaaaaagaaaatataacttgggtaaagaaaactatattatataccagtattttgttcggtgggatagttttcgttttcgttttatttttgttttttattttttttttttgtgtgtgattgaaattacatatcaaattgccacaaaaataattaaattaattaaaatcttttaaaacttttaattatcttaataaaatcgggtgtggcgtgtgggggcgattgggtgaaggttttaagtagtagcaattatattagttaagtggttttggactttagagtttttttttaatgggagttttggacttgagagttgacacgaagaaatgaagaatggtaacctataagaaacataatgataaaagaagaatatagtaaagtgcgaaaatgtaattttgaaaatgaaaaaaaaaatattaggacaatagaaataaaatttctcttgacttttgtagaattttacctatgataaatttgagggaaactgtgtttgatttctagctatggaagatgtttcaaatatgtcaaatattaaccatgttacattagttttagttatattggatcgttatttgtgattaatttaaaaattaattaaaaatacttaacaaattacttttgaccttata

SEQ ID NO: 78954 - DNA, 1833 bp, Cannabis sativa
actaggattcctctgtcatgttttttgtgaagtatttatttatttttcttctccttgtttcctctcccagaaagacaatatcaggaaccagagagagaatgttgttctttccatagcaaatgcacagtcacgacttggcatacctactgaggctgatccagtgagttattttcatgctctaaccacgcgatttttttgagggtcatttctgttttgttgctgtataaaattaattaaagtaattgaatttgctaagcttaggctagtcaaatttatgtgcaatttattttctttgtagtactttgtacagtgtacacattataatctatttttttgaaaagagtgtacacattataatctagataatttattgtgtatagatattctaaatctaattgtaatgatgttggttgttattggttactgctgtttttctgttctactgtaaaggaaacacatttttatatgcagtaagcttctcagtggcaagaaatttaggatgttcctctttcgttaattactcttagctctcaaaaacactttgtccagtttcttttttgctttagtttgtattttttattttcttgtggataccttattcccccttgccgtttcgtttatatgattaatagaaattttgtttagtattaatagaaaacagaaaaagtggacatattcatctactgtgatgtgatttaaaaatgtttctgtttttcagaaaatagatgagaaagcaatcaacgaagtatttttgaaggtgctggataattatatcaaatggtgcaaatatttgcggatacgcattgcgtggaataggtctctttgacaacctgatattttttttcttcaaaatttctttcttcagattttactcttcttatttcattgttttttcatatacagtttagaagcgatcaatagagacaggaagctttttcttgtttcactgtactttttgttatggggggaagctgcaaatgtccgtttccttcctgaatgcatatgttatatattccacaatgtaagtctccacctttattagtgaaattcattgtagtgtttgtctgataacttagtctcattttcttcaactgtttctattatgtggggtcaaaatatcttctcttttgacttcagtggagaaggaatttaagggcttttgtgtttttctttaaccactgaaatactttgtttagtggttgtttagatttggtttgtttgtttgttttgcggtttagttttttggtctatgggagcatatatactcatctcgcacatgttcttcaacttttgagcattagtgaaagttttaattcttataagaacaatattttgttgtatagatggcgaaagagttggatgctgtattggatcatggagaagcttatcctgctgacagctgtaaaactgaaactggctcagtgtccttccttgacaagatcatttgcccaatatataagataatgtcattggtaaagtggctatatcaattcaagtatttttttgttacttatgtatacgtgctgaacttgattttgcgttttgtctaacttctgtacagtgttgaaatcattctcttttcaaaattactccatttttaattcaacttagctgtgctgtttgatcttaaatgttgttgttgttgttgtttttttgttcttttttaggattttttatcttttgcatattttcatctcttaccaagttgttactatttacgtaatttcttcttcattttcttcggtgaaccacaggaagctgaaagaaacaataatgggaaagctgcacattctgcttggcggaactatgatgacttcaatgaatatttttggt

SEQ ID NO: 78955 - DNA, 9168 bp, Cannabis sativa
accccaacccaaaagcaacaacccgcagtcgaggagttacaggagatacctatccacctgatagatccaaccaagactacctacatcggcatgggacttacggggaactggaaggaccaggttgtaagcttgttaaaagaatattttccggttttcacatgggaactctaggatatgcccagaatagacccaactataatatccacaaactaaacgtgaacccaaattacatcccggtcaagtagaaaaggaggaagatgggagcagaccaaaacaaagctgtaaacgatgaagttacaaaaatgctagaaaatgataccattgaggaagtacaatatcctacatggctcgccaacccggtggtagtaccaaaaaagaataagaagtggagagtatgcatagacttcactgacttaaataaagcctgccaaaggacagtttccctttacctcacattgatatgataatcgacgctactgcagggcatgagttgatgagtttcatggatgccttctcgggctataaccaaataatgatgcaccccccgacagggaaaagacatctttcatcactgagagaggaacgtactgttataaggtaatgcccttcaaactcaagaacgccagagcaaattaccagcgaatggtgaataaaatgttctctcagcaattggggctaaccatggaagcttatatcgacgacatgctagtaaaatctaaagacggatccgaccacgtccatcacctccgagaatgcttccaaatcctccttgtccattcaatgaggctcaatccagctaaaggcgctttcgccattagttcaggaaagttcttaggccacttggtaacacgtcggggagtggaagtgaatccagatcaaatagaagcttttcaggcaatagggcaaccccgaactgtgaaggacatacagaaactaactggaaaaatagctgcactaagccgctttatttcgaaactctatgataaaagcctgccattctatgacctacttaaagggaactgcaagtttaattgggacgaaaagtgccaacttgctctggaagcactaaagatgtatttgacaactccccccatcctgtcaaaacaagagccagggaaaaccttgcttctttacctctccctatctcgatatgcgaccaactcaatgctggtacgagagcaaggaaaggcgtaacgaccaatatactataccagcaagagcttctcgggagagaaaagcaggtatctagtaatcaaaaaattggcctaggccctaattatctcagcgagaaaactccaaccatactttcagtgtcacacgattgcagtaatgacgtcgttcccattgaaacgggtactgcataaacctaagatattcgggaggctgatgaaatgggcggtggaactaagtgaatttgatatgcaatacctccctcggactgtaattaagtgacaggcgttggcagatatccatcaattgggaaggcccataccgcgtgatagggtcgacgggcaaaggagcatataaattggctgctatggatggaaccgagatgacgaggagctggaacgcaagggatcttaagaagttttttgtataataaatataactagaactatatgttactctgtgtaagaagggatatgaataatggaaggaaaggattaatcagaattgagcatattataagacctttcacgaaagccaaaaggtaagaaaccgaacgagccgcattcacaaaaataagacagtatgaagtaaaagacagataatgaaagtgtgaccagaaaactagtcgcctccacggagttagacaatgcaaaaaatgtgtgtacatgaaaaagagtaaattcgcaagcacctaaaaattacacaatattaccaaataaaatggagaaataagaatgaaagcgtaaaagtccattaacaaaataaaggttgagttacataacaccctcccctaacactatattcaaagtttttgaacacagtataaactatttcaaaaactaggggagtagtggcaggataaacactatgcgtatacaaaatttccatgcaatatgtacccataccaaaacgccattacaaatacaaaaaaaaaaaaaacacatacaagtaaaagtaacaaaaaatgaatttctttgaagcagcacctcctcaaaagccattcacataaaaaaaaacgttctcgttgttgaaaggccttacgcatggcgatccatccccgacggttgaaagaagtaggaggttgaatgatctcagaaaccacccgaggcgactcttgagggaaggaagaagcagagatgcaaaataccgatgaagaatcataggctaagtcattaaccttttcaacatcctcagactgagcagcaactccgagttctgggtagtaggctgttatcatctgagtcgaacttccctctgatgcttcaagagcttcttttatctcttctataggggtcaaaaaaggatgaaaaactacgaagggacacaatgctaaaggtggtgcgggttcaatgcgagaagaagcgtaagttcccaggccaaatgaggcatgctcaaaacagggacaactacagacctttgaaaagggcatttggggaatggggattggttcgaaatcgcaaaaactcaaataagggtttaaagataagaatgcagggtccaaaggttgcaaatctgagaatatattggaaaaagaaggatggtcctttgggtgaggtacctggtctttcagtaggaaagccatgttttaggagaaaaggaaccttggaaaacaagtacctaaatgaaaaatctaaaggaagcttttgaagaaattctttagaagaagtgccgaggtttaaaacatatttatagacaaaagtaagaagccaacatgcattaagaaaagatgccacgaggttgaacacgaaaagcccactaaaagaccaaaaccaagacacgtgtcagctaactaagcatacctaaatcacgaaaagcacttctaggagtatatatgtccttccaattttcaaggtgtctcttccgtcttttaataaaagatagtgaaataaattaaaaatgtgtagaaataataacaataataatgctaagaatgaaaggacatttaccaaaagaagaaggccaaaagttccatttataaagaaagcaataacgtttacaaaatacagcagaatacgtagtaccacacaagatttaaaattaaaataggtgcatgcaatatcaaaaagagaactgcgcctaaagacactgaggataaaaagcttttacaaaaaaaacttagaacttagaaatactcgcggttagggtgatgccagcacataatacataaagaaccagggattacaatggaacccctcactacccttttcatacaccggcgacaacctataggaaatccagggtgatagaagggaaccccatccctaacgcattcttccttccacctttcatttgctaggcgttcacgttccaaatccgcatcccaggcatgacgattccttgctcacatccgatgaaggtcgcgacgacgctcaacatgcaatcgaagagcatgaaactcatagatgagacatttcgccctttgttctcaaaaaaattttgaagccactcctcgccagaggacgaagacgcaccattacgactagcgcaataagcccgcatcatccttccaacaatggcctcaccaataggccgatagcgatatgaaaaagtctcagggcaagtaggggatcgatccctgacgtcaaaatggaattcatccccacttgaagattgaggaaggggagaacttggagagttcgacatttttgcaaaggaaagaaaagaaaaaggaaggatttctttctttaaaaaaagacagaggaaaaatagagagaggagaagaagaaaaaggatgaaaaaaacttaagttgtaatgagatcagtgaagggaaatgcgtgtttaaataaacttgtgaaaaggaaggtggaaaggtgaagccaccggtcaccaagacattaaatgtcaataaatagacatccccaggtgtcaagataccttaagaaaagatcatgcacataaaaataacaataataaagacacaagcaaaataaattaaggcatcagcctaaataaagatccttacaaattataaaatgaaatacgattatcttaaatggtttactccttatttcttaaaactaaaaaaatatatataataacaatacataataataaaaaggggtatgagcgttctcctcacaaaagcagctctcaagcaccgtcggcgtcatcatcttcgctagcctcgtccgagtccgaagaagtatccacaagatcctcgtctctcttaaactcggcatacctcttgaaaaacccgtccaaatcccacgaggtagacttaccctctttaaactcgaagtagagtttaaaagcggattgataacttccactaaggaatgctttcttgacctgtttggttagaactttgatctcctttgataatgaacttttctcatccaccaaagccttctttgcctgatccgtcgccttctcagcttcggacaacttatcatttaaagaggaaatctcagacttcgccatttcggttgcataaaggagagtgttgcgctcttgagtcaggacatccttttccaaattcatcccagacagattggcctcgagggaaacgaccttatcactcaaaccctgcttctcggactctaaaagtgagcgagtaagatccaaactctttttctctaattcaaggctgtcgactttactcttcaaaagcctattataaacctctagaccttagaaagagcatccttcattgcaacattgactatctcgtaattcttcttataacgggagtaaccctttaccagactctccttttctctatccgtctgtagggcgaacttcatagcatgggcacacctcaaggccgtctgataaaatacacccagcagttaggactgaacagataaaatactctaaagaaataagtcaaaaagtaaataaacttggataaactaccttaattcccgaaatagcagtatccatcaaaattgaatcccgtcccttggaaatgtaaaagtcatcatcatgctttctgacggcttctaacggagacttgaaatagttttcagccgactcctcgaaagggacatctttctgaattcggaaggtagaaatttcatcccactcgggttggcccttgaagggatggatagctaagggtggggaacatcggctggtagggaaggctgaaggacgaaccataaaaggagaaagagcaagctaagaggatgatggagaccctaagggaagagaagaagtttgagccggagaagacgacaaagaacccaggctttggcccaaatcgattgcagaaaggttctcaagatgggaaactttctatggatttgggatttccatcggcaccaaacccctagaagcccctctagcatcaccaacgtccgacgtgatctctggggggacattaagtagtgtcccgatggcgtcgttagtgggcgagtcatgctgagatgacattctaaggtccgactgattggctacctcaagctccgttgttttgctcttcttccctttgcctttatgtttaggagacttcgccatgagtctcttccgccgggcagcggtttgagcctcgatttcttcgatagtcatctcacacaacctcattttaggcagacgagggtaggtctctgcaaggtgggaatgatcctcagaaaagtctatcaaaactggttcgggtgtttgttttaagtgcttcaaagcgcattttatgaaatcaggccaaatgaaataagaatgataaggagtgtggatacctagggagatcccgagttcgataggcccgatggaggactcgattaaagcatcgttggagagaaggaacttaatcgaccgaaactttgggtccaaggatgtgaccttacaaactttctcagtaaagatatctctgataacggtccacgttgtcggcggaagctgcacataaacatcatcgtcaaaacaagctacaaattacttaatataaataaagacaaagcaaccgaaacaaagaaaaaacaaacaaacaaaagacaacaacaaaaaaaggaggggggaggacatcctaacaaagggagcgacgaaaataccaggagcttcccagctccgattgatgaaaggggcattggggtcgtcggaaacaaactcaatagggcctttagcaaaaaagaacttatcattccaacccgtatgagaggtccctaagttggtaataagggcccaattctttcaaggccgaagatggtaacgcccttgctcactctccatcaatgagtaaaaatgaacgacgtccgatacctcccaccgaactcccgccttatctcccaaaactatcaaacctaaaaggatagcccacacgttaggaagtaattgagcaggagcaatggagtaatgaaaaaggaattccttagttaacttaggaatgaacagcctcagcttaatttttgactcaaaccaataggaatgtaaacatagccactcgatttgggggaatcggccctctcgtccaacttagggagtctaacttctcctcccgacagaaagccacgggaagatactaaggaatcaagttccgattgagttaaaactgacagaagactcgatttgaggtccagataagaactctccaaagtaggttgttttcgcttagtcttcttcagaggaggaattgccaaagtaaccccttcggaggggacagcttgaccactgatacctacaccatccccggagcgagaccggggaacgattgaaacactaccaagacactcaacttccgggtccgcaggaacatcgacattctcgtcctccatggaaggggtgtcagagactaacaaagactcaacgaacccaggagtgatactcgaggaaagagaatcggaaactggagaggaaacgtttggatgatccacatttgccattataaaataaacaaaataaaagcttaggatttgaaatttatctaaatgattgaaaaagaacccagataaagggaagtagccaccctttcactcagaaatgatgagaaaaagatggagccacatccctggaacaaccacgattagggtaatgccggaacaagaacaacggcgaaaaaggcaataaaacccagaagggagggggttgaatcaagaatcaagtgctaagccccattaccaataaaccctaaatgttataatgacctctcctagaaattaagagtcttccttgttcaaaaaaaaaatgaagaagaagaaggaaaaagaagggggaaagaagagagatacagaaagataaaataaaggagggtaattatcaaaaataggaaaaataattaaattaagaaacagaaagaaatatatatatatatacctgggagcaatgagattcaccacaagaaagttgaaacgagcagcagagagggatcacatattagattttcaaaattggagatcttatatccaagagtgcgcggccaaaacatagaaggaagttagaggattagagggacatttataagaaggaacggttcctaatacaccacgatcacatcacaaaaaccaccatttcttataaaattgtgaatttgaaattaaaagaagacaaaagaaaactgacataaaaacttacaaaattgtcatagatatgatagataataataaataaatacacatatatatatataaatacacgtacaaagaataataatccttaacagttccaaattatgcataagcataaatggaactggggagaatagtatttggggggaaaattatgaacagaaacccaaaacccaaaacccaatgaaataaaataaaagtacaaaggcccaaataaattcgatacccgaaaacctaaaacccaaataaattaacaaaaataggaaagacccaactttgtacggcccagtcgggaccatctcccgatttgtgatgatcaggaaaaaagaccaatgccaacagaaattaggatgaagaaagatgagggattagagcttactgtctcagaccgacaaaggaagacctagacgacggatagattaaagaaagagagacccaaagagagtcttccgtctaactcgccgacggaagactcacttcctaaaaagtatagggcaatatagagcgcgagcagttcagagtgttaaacaaatgctttcgtcggaaagaggcaccaaaataaagatcggcattgcgatctttcatttacctcaggtaggaaaaagagttccgtcggaaaaaggctgctgactaaaaaggtaagataaacactccaagaacaagacgcaacaccaccggactcggagaagatgaagaatagcagcgattatctaataactagacgtgtggcaaagtagagagagtagagagaaaagacacacgtcaggaagagaatagattaaaaaaataggccatccatgcaatcatagaacgtactatataaacaagaaaaagactacgtaaaatggatacgattaggaactgaaaaagagaggactcatataaaaaaaattgcgactgttcttggctaaaacaacatctctagatcagattattattaagttttattttgacaaaaaaattagttcagggtcctatttttacaattttagaaattacaaggtctattttatcatttaacaaaacagagggtccaatttataacttttacagaacacagggtccataatggtatttactctttaagaaataatattatggtcttagaatagtaatttatacaattttttaagtgttcatttagtacaatatattagattattttctatataataatttatagaatttatattgtgatcttagaataataatttataattttttaagtgttcatttggtacaccacattaaaatatatgataaatatatcttatattttatcaaattgtagtgtatattatatttttataaaatactatattaaattttgatttatattattaattgtatataaaatacatatataattttcaagtctacattaaaaaatgtaaacatatagtactatttaaaatatgacatataatataatagaaaaatgggtgcactcttaatgggtattaactatgaacgagtaatattagaaaattttgactttttaag

SEQ ID NO: 78956 - DNA, 2873 bp, Cannabis sativa
tatctgcagaatatcaacaaaatccggaaggtgaaatgccccgtgttggtgatacatgtgagtacttcttgatatatttatgaatcatcagtcatacatccaaatttttctgcgcaatattttggtgttcattgtgtttgttaattattattttgtttagtaggactgttttgcatgatagtttcttgtagttaattatctgcatacaattaaggatacttttatcctttccttcggtttgctgctgttttgtttgtaacaacctacatatattcctgtagctgtccttaccctatgacgtatccctcctaaactttctttctctctttattccccctattttgagttattcaggatttgggagttgttctgaatagactagtttttattttgctactagtgatgttgctttttgggaattctttatgccattttactatcattaatattttgaaattaataatatcaccatttcttagaagaaaataacaccccatttttcttgttttgcatttttcgctgcatatatctttacttctaaaactacaaactgaattggttttctaaattgcagcttcttgtccatatgatcgatcatacgtagtagaacttgttttaagcatctcttaagatcacccccctcctctctctctctcattccatttttctcatagcttatcatcttttgttttttttgcgataaaagtataaccacatgagagcagagcaggactacaaagttagttgctaaccttttcctggcctcacagtcatactgctgctcattgattttgcattatagtaacctcgaaacgtacacagtataacaacattatcgatagtccatggtaggtgatgtcagatgtgatagcagtaggcttgctttgcaagattgggtgttgtgtttgttttctctttgttctggtagagtgctttccactgtttttcctgtagtattttcacgatcaatggctgaagttgtgaggatttgtttttttatcaaaaagtaaataaagttttaggatgtaaaccaccatgattcccaaggttttactacagtctatttctttgatgattttctatcatatcatgcagctaatattaggtttagattccctgtatggtttagctaaaattgcatgtagtcccccagattttacaagccttagcttttatggtgaatactgaatataggcctgtcgaaaacacttcatatttgagagatagtggcctctgccaagcttgtatgggactaccctacttaccaagaatgtagaatacttttgtatttactacattgctgagagaatatatcaatttgaacttacctattatctacaattcaaaaaattagaaggaacttgagacatgatgattgtgattgttttagggaaatttggctttagctttattatttgtttctttttttgtaaggactttagctttaatattgtttttcttttctcttttatttctttgtttatactatcagaaactcttttgattgtgagtgcatattcttaccaactttatacttctagcagtcaatttgattcctcaagtgtaaggatgtctaacaattttttttgtctaattatctcgcattaggctaaccaattctaagtcttcttgctcattagaaatttgattgaggtcttctgttatgtggatgttggatgccaatgaaacttggatttagtgtaaagggctcattccaatgtttggtgtgtatttttattttgggagaatagatctcaattttaattcccatgttatgattgtgattggaatttgatcattttcatcatgtgatgtagtaattagaaagtatatggaagaatttaattgaataacttgtccctctaagacgtggtaatgctaactaaatctcattagaaacctgcaataattatatcttatcaaatcgctcattttcataaatatcatttggtaaggcattattttacagcttagagtcaaacttgttttctcatgatttgttgttggaaattgatcaattaactcattctcttttgggttctcttatttttcttaattcaatcccaatattaccatatcctactcgccacacgagactttaatctttccagtttccactccctttccttgggagttaggattccaattcaaatgtaatgctaaaaagtaaagtccctttttcgcccacactaataccatcctataccaacattcgtgtttgcataaattaaatatgtatatgatcattcatgtcctcatgtttcttttaacattcagcttcttatatgggtgccactatgtaatctattattaaaatatagctcatcttgtaaacagtttggtgtgccaaaagttgaatttgtcacgtaacaaaattgttctgaatttggatcacaatgtggcatgattcaaaatttgcatcaaaataaatgcactactttcatgtcatttttaatattttattatcaaagttcattattacattaaattgtaaactttttacatttattttttattattttatataataaaatttatgataaagttattattattttatattttaaataaaaatattaattaaacgttaacttttgcaattgtgtattggagcacaatactaaaaatcgatgcaaatatatcacaaaattatttttttttgctaaatattagtataatttttacattttctattagtgatggtctcactacagataaattgcaactctatttatatttatataatttaaaaataagttgaaaagtcacaaagttatttgtactagaactaatattattaaggtggcatttggtaacacttttttaatcagttttctgtttttaaaattaaaaagtgaaaatatttttcaaaa

SEQ ID NO: 78957 - DNA, 3156 bp, Cannabis sativa
ctacattttcttttgctgatttcactttagttgttaactatggaagttccatctcagatccgcattaacagcagctggcgattgtctatatcggattctagtctttctgggcataggtatttgttttctgggtacagtttctctgtctccagaaggaaatggaggaacccttttgttcagattaggtgttcctcggcgatggaacaggggttgaagccacgccccaaattgaatcatgtgaaattcgatgtgaaagaaactgttttggaggaaacccagatcagaaaatcgagtgttgggatctgtaatcagattgagacgtttgttttgtataaaagatatagggaagcacttgaattgtttgaaattttggagcttgatggtggatgttgtgatgtgggtagtagtacgtatgatgctttggtgagtgcttgtattggattaagatccattagaggagtgaagagggtgtgtaatttgatgaataagaatgggtttgaattggatttgtatatgaggaacagggtattgttgatgcacttgagatgtggtatgatgattgacgctcataaactgttcgatgaaatgcctgagaagaactcggtttcttggaacacaatgatatccgggcttgttgattctggagagtttatgaaggcgtgtaagttgtttctaatgatgtgggaggagttttctgaaggggggtctcgcctgttcgccatgatgattcgggcgtcggcggggttgggactcatctttgctggaagacagtttcattcgtgtgctttgaagatgggtgtagaccaagatatttttgtgtcttgtgcattgatcgacatgtatagtaagtgtggaaacctagaagatgctcaatttgtttttgatgagttgcctaaaaagacaacagtgggatggaatactataatagcaggttatgcacttcatggttatactgaagaagctttgagcttgtattatgagatgagtggatctaatgtcaccatggaccatttcacattttctatactcgtaagaatatgtacaagattagcttcattagaacatgctaagcaagctcatgcaggtttagttcgtcatggtttcgggtcagatatagtggccaacacggcacttgtggacttctatagcaaatggggaagaatagaagacgctcgccatgttttcgacaagatgccctgcaaaaaccttatttcttggaatgccttgattgctggatatggtaatcacggtaggggtgaagaagccatcgaattattcgagaagatgctcgaagaagggctgatgcccaaccatgtaacgtttcttgctgtattatcagcttgcagctattcgggattatcagaacgtggatgggagttttttgagtcaatgagtaaagatcacaagattaaacctcgtgcaatgcattatgcatgtatgattgaattgctaggacgagaggggcttttggatgaagcctatgcactattaagcaaggcaccatttaagccaacggctaacatgtgggctgctttgctgacagcttgtagaatccgtgaggatttagagcttggtaaacttgcagctgaaaaactctatggaatggagcctgagaagctaagtaactatattgtactcttgaatatatacaacagttctggcaagttaagggaagctgctggtgttgttcagactttaaaaagaaaaggattgagaatgcttccggcttgtagttggatcgaagtgaaaaaacagtctcatgttttctattccggagataaaactcattccgaaattgagaaaatataccaaaaggtgaaagaattgatggcagaaatttcaaaacatggttacattggtaaggagaagactctgcttcctgatgtggatgaacatgaagaacgaatactgctataccacagtgagaaattggctatagcatatggtatgctcagtactctagatggaacatcactacagattgtgcagagccaccgagtctgcagcgattgccattccgccataaagttaatggctttgatcaccggacgggaaattgttctaagagatggcagcagatttcaccattttaaagatggtaactgttcttgtggggattattggtgatggagcttttactttaggactagaatataatagctttgctaattgatttatttgtattatgctctctttataggtccttgagagattaataataatggaagatgcattagttttgatcaatcaatcttacatagcaatatccaaaaacataatctactattaacaataatacttacgatagcctatttatttaccttacaaaactaattgttgtagtctaagtttattttttcatatctaggtaggggactctattgtgagtgaggatataatgtgattaaagtggtggactatgatgtcaatttgattaaaatgtataaaatgggtaaatactattttagatcatgtgttgtgcaaaagttaccaattggaccatctgttttgttaaatgacaaaatagactctatattttctaaaatagtaaaaataggactctgagcttaatttttaacaattttatttttttaatataaccaactatgtaattagttttggtataacatctttatattaaattattattaagttttcttttgacaaaaaaatcaattcatagttttatttgtacaattttgaaaaatacatgatccattttgcttaaataaaataaaaaaataaatataaaattgaattttacaaaacacacttatattttttatttttaaattaaaagtttatagtcaagatacaatatatttttgtttttgaaaaacaaatgaggcgtttggtaacacttttacttttaaaaaacaaaaatatgttttataactaattttgtttttcaattttataaacaaaaaataggtgtattctgtaaattttatttttattttgatttgttgattttatttaagtcgggtccgaggtcgagtccgagatcgggactgggtgttggtccaagtttggggccgggtccggattcggtttccaaggtctaagttggggtcagagtctaaaatattgattaaaataccctgagtgcttggaaagtaaaatttcaaggacgaaagtgatttttttttttttttt

SEQ ID NO: 78958 - DNA, 5511 bp, Cannabis sativa
  modified_base (2958)..(2965): a, c, t, g, unknown or other
ttttattttatttttttatttggttacatattaaagtattgaaatacattccaataaaataatttttctactattttagtagaatgagtactaaattttgaaatagaagaaaatattattccaaaaaaaaattaataattcttttactaattttatatatattttttaaattttatttcattatattcttatttttagtgctcccaactaaaacacaaacaaattgtccgtaacaattctgattatgtaattattttgggtgaataactgaattgtgagtcgccataactgttacagtaatcagggcttttattagaatttcaccaaactttacccttgccttacgtggcgaaagcttcgcctaaaaccccagaaaaacctcgagagtccagaccagagaacagagaggcagcggacattttcttctctccactgcagcacagcctccaatccattaaacggccattgataaataaccaatgaaaaaacttatggtttcgtcttcattctctcttctacttctctaaacctctcatttattcgataacactccgaacccatgtctttattcaaacccctcctttcccggagctcctactctctcctcagaccccgaaacatcgcccacaaatcctactccccgcgctcattcaaaaagacgccatcacattctgttggagctgaaaagcagagtgattccaccaaacccagaaagcctctggatattttgttcaaggaggcagtagatatatacccaaagcaggaatccggcgaaagcgaaggtgaggaagaaaacaataaggtgaaaagaggtttgagggagctggagaaagagataaagaacctgagagcgaattctgatcatcagagtgatgggaaagaaaaggtaggcgaagaatcgacggggaagaaaagcttatttgctgtgtttacgaataaagtctggtccagggaaatccctaacgacatggataagaagaatccaagggttgtgaaagagctttcaccggatatgaagttgtttttaagccatctgtacaagaaaggttacttaaaggaagctaattttttgccttcgaagaatagtgatgataatgatttggatttttgttactttgacaatagctatggcattgattttataaagttcgcagctcagaagtatgccaaagacaaccaagaaattgcaaagtaagaacctatcttttttattgtttctgttgttggatttcttcaagtgaattggttttgcttcgatatatgttttgtctgttttatcctgtgttttgagttgtgacaattccgaggaggaaaatattatgaaaaatagattcaatttatttgatgttgtttgttgagtttgtcctttctaacaaatgtactggtttcagtgtgagaaagtgattgagttcacgcaaaacttgttaggtgtgtcagttgaatgaaggtctatgctttgtataggtccaaataaatccgtttctgctaaagtttgatgagattttcatgctttatataacagatcatttccttagtaccaatgtttcagctatcttcatatgtaagttttgagcacctattagtagttatttactatgtagtatatgactctctgcaaaacaccagtgtgaaaatgtcactggtaaatcagtggattgcttaaattgtgtggagtttatgaggatcttaatttgattgcttgttactctaataaattgctgctcaatcctgttttgcgacattaccttttcaactagctttttaacagctcggggatttaaagtagaagataatggatttttagtgtgtctctatcaatatatatttcaattaggagatcaattgaagatccaatggagcatagttccttagattgagtaatctttataatattagttgtttcaagactctagatgactacattatgcttttcattactatttgttcttttttcagctgacaaactaaattttaattacaataggagttttaagtgttgggatagaaaatagactttgtcaagaagtagtttccaatgtgctagtgcattaataaatttatatttatttactttggtttttaggattacttttcatttaaaattctggaagttagtttcctggtggagttagatttctttttgctcgtctccggtcctaccaaaacgtcgaacaatctactgactatcctacaaaattgtgagaactcactccccctcaggccctcactctgcagtctccctttatctctataatatttgttttatattctcttcttcttctgaaagtcaggatgctatttgggctattataaattctaaattctcaatatgtaaacccgatagcacttaaatatataattgttcttgatggaaacaactcaactagacaactatataaaactccatattcctaacagtttatacatgatctgatatgattcaatcaacactataaagctagtatcattagcaattaaagagtaaaaggtatacagaaacgagttcttgtctggtagaattatgagctgggattatgtgctacactatgtgctgctggaggtactcagctataatctctgcacaacatctggaacttgaaggaaactgtgagacttttgtggattacataacttgatcttgatagttttttttttacctgttttccctgtttgaaaaacaattgagctgagacaaagacattatatggaggctgaaaagattcgttcagaattggaattcaagatgtatgtctaggaggatgatcctaggtcggatgacaataaacttcttttatgccaggcaaaattaagttctggtgtccgggcaatgattaaaagtcagtaatcactattgggtcaataatgtattcagcttaatatgctcactcaatcatttgatgttttgtaaatgagttgttttaattattatggtgtagttctttctctctctctctctcnnnnnnnntctctctctctctctcttcaaaatatttgttgttagtacttttatgttaggtatttctgagctactctccttttgttgctctttctgatattttcaagttttgatcattgttttatcagatggctgtcggggagtgacttgaaaaatgtggtactctttggctgcccttcccttgcaaagaagagtatttttgcagccaaaaggctgcgaaatttttttgaagttcaagaagacactgtaagtcaattagtaattattctcttcctatccaaataaactttaataacaaaattaaaaacttttcagcaaaaaaagaaaaacaaaattaaaaactgtttagtgtgtttcttattcaattaccttttccttgccatcaggtttgtaaaagatgtgttttgaagcaatcgtgcaagtttgtgaatcagaatgtgtggaatgccgacaccaaaaaattgattcttactgatgttctgtatgtaatcactctgtacactttggaaactgtgccacctgagctgtttgtgcctgatgatgtaaaagcttcagctagcaaattgctaaatgaagttgtgaagttgagtcaaactacttcatgaagatacacaaatggtgtctcagtttttttccaggtaactgaggcttccatcccaatacgagtgctatgacaatttttttcggtggctatacattccttttttccttttttgttttgcttaagatttccaattttatctttactgaaccagtaatcaaaagaatatagctgagtgtatttcttctagatactgcctactaggatggatggccatgtacaagctcaaaaaattgattattaataattaatgttgctctctcaacgaccttttcatattattaattgatgcacatggtatcatgacaaagttgtatggcaactacatctaagagacactgcatatggctgattcctgacctaagtccacagatgaacttgcttgcgtataatggttggctctattttcctacccttctcactctttttcatttaacttgcaatttattcattcaaattactgcagtaaaccaaataccatattagacaatgaatgagttgatttgctttgctttgtttattcgtaaattgcttgcagcgatagttctcatctgaagtggagctctgcaccatagactctgattctgaagtttaaatgtgattttgtgcaaaaatattgctctattgtttattgtaaacaactttggtttttggagactgttgactgatcagtattcagcatgtgttgtttaatttcatttaattatataaatggtcatctagatctaaatgacaaatgaatggtcatggttgagatagggagataatcatattataagaccacttgttcgacgatagttttctgcaagtcaaaaattctggggttattatataaaagtttaatttggctagctaggctttaggtttctttatcattctctctttaattcttttttatgcttttcacttggtgcaaacatcacgcagttgacttcattttttggttggtctttgactctttgctccctctatgcagatgctaatctccacaataataacaattcttatcgtcatttctcaaaactttatttgtttaacggtccttgtgtatgtatgtatgtatgtatgcatggatctttgattatgtttacatgtataatttagatctaaactcttacaatttaacatttactcgagggctcaagtttggatgcaatggctggggagtggggactgattatttatttataattttctattacattgtttttttttttccacaaattctttttgttggtatacaagactccctacgataagattctttgtttctaaatttatgaaatttattccgttaagtgtcaataaggccatcaactaagaaaaatcttttgggttattcaactctggccttttcatatgtgtatgtatttaattataaatgtttgtatgtttgtgttatgtgtactcatttttttatggttcaaaaatagatattcaatcatttataaaagttaaagaagatacgatttcattattttttttttcctattttatttcagaatgaaaaaaagaactaaattttcaaaacacctaagtttatttcttaacattatcattataaaaattgaaaccaatcattaatggtttaacattgttaattcaatatacggatatggattcatcagtatatgtgaacgaaaagcaagaacaaattttccaaaaggatatgagcctgaaaaaagaattcattcttcacaactttattgtctttcccacttcttttatcaaatctcaaaattggaatcttaacggattcatattgaattgggccactcagctaaaataaaaaatcattgcccacaaacttttcaattaatgtttttctttctaaaatatagaccagggtgatgttttatctttgagggagaaaagaaaatacgagtgatgataatgctcacatgagtgcacgtgatataaatatagaaaggttaactaacttgacttaaaatcc

SEQ ID NO: 78959 - DNA, 4052 bp, Cannabis sativa
aattttcttttttaaatttacggtgtagtgctagttctaataaaaatttttgttacaatttaaagttaataaaaatttctacttagaattctgtaaaaataaaaaaaacctgtaaataaatgtgtaattagtattgtaattaatacacataatacatcatgtttatatttggaaaagtgtgtaggggagaagagagaagggttgttacaatcaggctactctccatcgtgtacggactcccaagacataattcatcctctttcttcttcaccactttcctttctaataaatcaccaaaaaagaaaaaatctgacaatagacgatggtgacgtggcaacatcacaacgactcccgaatattcatcagcggtgcaattaattaaagatatcttcttattttttttttattaattattatttaataattctaaaaagagaagaaaagaacaaaggagacggagaagactggttggtaattggtatattgttcttgctgttctgccacgcactgtcgtttcgtcttcttcttcttcctcttctttgtcgttttaggtttagatacgcatttcttgtctcaattcactgaatttctttcccccaaatctgaatttccaatctcaatttcggtctccttggggtgttattgcacaagaaattcaccgatttggtgatcgtagtttgaattacagattgcttgatgaatcggttatagcaattttaacgaaaaacgttgtttggtgtttacaaaaatggctggttcgggtgacgatgacggtgacgcggtcttgagtgacgtggaaggagacgatccggcgccgattctgataaagagtccttccgcggatgaagtctcgccggagcggttcagggagctgagagcggagcttgatcgcgagcgtcaaggtcgtatggcggcggagaaagcgagaagtgatttagaagtgccgtttaatcgtttgaaggctttggctcatgaggcgattaagaagcgagatgagtttgggaggcagagagatgaagctttgcgcgagaaggaagaaatttccgggagttatgagaaggtcgcggctgagttagccgaagtcagtagagctagagatgagatttcgaagcaggcgagtgagatcactaggcaattggatgaggcagtgaaggagagagatagtttgagatcggaaattgggaattcgacgcatatgtttatgactgggattgagaagatttcagcgaaagtcagtagcttcaagaattttgggaatggcggattgcctcgttcagcaaagtattcgggcatggcgtccgtagcctatggcgtcattaagaggacgaatgagattgttgaagaactccttaaacaaattgatgccacagccaagtccaggaatgaaaccagggagcagatggagcagaggagttacgagattgctattgaggtttctcaacttgaagccaccattagtaatttgagagatgaggtttcggagaaagcttctgcggctgagaatttagaaaagatggtcgctgaaaaggaaggaaggatttctgaaattgaaagagagatggaagagaaggtaaacaaggtggaaagtgaagccacggagttgaggcaattggtggaagagtacgaagagaagttgaccgaattggaatcgaaaatggaagcacagagacctttattgtttgatcagttgagtttggtatcaaaaatccatgaccggatttatggtgttatcaagatagttgatgccagtaatttggatcagtcagagctctcggaatcattatttctccctcaagaaactgacttggagggaaatgtacgagcatctttagctgggatggaatccatttatgaattaactagaattgtcactgagaagacaaaggatctaattgaggaaaagaatcatacaattaagagcttggatgaaacgatttctcgcttgacaaaggagaaagaacatattggatcattgcttaagagcgctttgtcgaagagaattacatcagataaatcttcgaaatccaatgatttgttccatgttgcagaaaatggtttaagagaagctggcatagatttcaaatttggtaaggttataggtgataggggtgttctaaattctgaccacaaagtggactcactggacgcagagggtgacgaagtatacactttggtaagtttagcatttgttcgggtttgaattactataatttcaactctgcatttggttgcaatgacaagtttgattttatttaatgttaatatgtatataacaggctgaagctttggagaatattgtaaagacttctcagcttgagatcattgaactgcaacattctgtggacgaattaaggtactctatctatcatatgctaatgtgaatctatgttttcatctgtgccgtttttcgtagtttaaattgatatattttgagtattatattgtctatttgagttttctataatactgatgaggtactttgtttttgtattggttgtgtgtatgaagggcagagtcaagtttacttaaagagcacgtagaggctcaagccaaggagcttgaaaacaggatgcgtcagattgaagaacttgaagagaaagagagagtagcaaatgaaaatgtatgctgcttatactttgttgacagcttaattatatttcctacctcatctcatttagtttcatttctgattagaagttggcttcaatgtatttgtcaggttgaagaactcatgatggatattgcttctgccgaagaagagattacaagatggaaagtggcagcagagcaagaagctgctgctggaagaggtgttgaacaagaatttgcagcacaggtatgctttttaatctggtatatcattctgggttgttggacacagttatgggttttctgaactttctgcatacttggctttagtatctattaaagcctttggtgcttctgtaactgaagtgtgatatattttcttagaaagatgcaactttgagtagaatctggaccttatatcaggtagggaaaagatgagacagcaaatagggttgggtagatattaaacaatatcttctaaaaattgatatttagggaattgatgattttgtgttagtgcttggtcatgacacattgatcattctccctctttagcaagttccgaaaacggagcagttgagcaatcatttggacagtaataaatactagcggctctctcctgcataatcagaggcagctgtgtcactttagtatgattctgtcgtccataatagaaaattggtatcctgtttaacatcaaaacaacagttttcatctatagggttcatcttcttggtcatttagtatgtgaagttgttttggtgaaggttcagtttttgactgtgatcaaatatgcagttgtcagcactcaagcaagaacttgaagaagcaaagggagccatgttagagtcagagaagaaactcagattcaaagaagagacggctgcagccgccatggcagctagagatgcagctgagaaatcattgaggttggctgattcaagggcgtcaaggctcagggatcgactggaggaacttacccgtcagcttgaagagtttgaaaaccgggaagacacaaggggccgaagtaggcctagatatgtatgctggccttggcagtggcttgggatggatttcgttgggggcggtcgacctgatacagaacaacagactacaaatgaaatggaactcgccgaacctctcctctgattatacttcatttttttttacccttattacacttttttaccggtgtatttatcggatttttttttaacatcagtacagccaaaatgaacaaaagaaaagaagaagatagatttagatcatcatctctgcgtggaggtgatctagtttgcagtcgtaaaaagctgtttaataagtttgttagtttctcaatcatcatcgcaagttgataaatttgttttgaatcatgaaaaatatataacgaattaccatataaatctctcactaaaatgaaatatagataataatataataaggattcactattaagagaacta

SEQ ID NO: 78960 - DNA, 1048 bp, Cannabis sativa
atcagtaatgatccgtcggatcggatcagtgtcggatcactgatccgattcgaatgaatggatctttttgccatgcctgcttttgactagggtttttgttggtttctttcgtcttctcagccaaggaggccattcctaaccttttaactggtaaatgggcattgtgtctcgcttgggtgtgtgtataggtatagatttggaggtttggtggttgtctattccattggtgctagtgtcagcgggaggtgatttggtcgtttgggtgtgctccgaggtcttaggtgtcatggttgggatcttgtaccaagtttctttggtcctatgattctagttttggttgctagaggtctcgacagggggctatgctggagaaggaggtgggtgtcgatgttgtgatctttggtctgttttaagtttgtggtggtggtcctcgcctttcctaccttcttttggtggtttggtgttggagccactacaagaaaggcaaaatttgtcggttcttctggctaaatgcatcaacgaaagttgtcggaaaaaggaggagcatggaagaacttaactatttagttagaccttttatagatgcaaatttgtgtcggtaaaagtgacttgtgctggctcaattcatgaattgcaccggtgaaactgtaaaatttaactgtcttttggtgcaaaaacattttaagaggtttatttatctcgacaaaaatttgccccgattagaggttctctattttggtgggagaactctcgcgtgctaatagttttaagcagggcagatcaaattttaccggtgcatatgaaaaaagtaggtgagaaaattctcgcctattttttttgtagaagaaaaaacttttactggtgcaaaggttcactggtaaaagtataaataaaatggtacatttcatttttcaggaattttattactatttttcagagtattaatacacttatactagagaaacgaattgcaccagtaaaactttcttaataagagccgaaaggattgtcttcttttccattttgcctcctctctctctctctctct

SEQ ID NO: 78961 - DNA, 7975 bp, Cannabis sativa
  modified_base (767)..(767): a, c, t, g, unknown or other
attttacacttaattcctttattttttgtttgtagtggcaaacccctttatgtttacttttatttataaatttgaggtccaaactggatatcattgctaaataccaattgaattattactttattgaagttttattttcacgcatacacatttatacacaatgatcatctagtttgtatttaacaatgatatttaactgacgtctcaaatttataaaaaaaaaataaatttataggaattttgccacaaaaagagaaaaaaattaaagaattaaatatataaaaattaaaacacaagaaaattttgttgtgttgattacttaaaagaaaaaatcgtactggaagctacaacaaagagtaagattggtcgtgtcgatccttaaatgatagaagctattgggctcaagaaagccctcagctgaatcaaaggaaaggttgaagatgaaatatctcagtctctttataagagtgcctactgtctttgttgaattggactttttagtccttcggcaagctttgtcctattcagtcactttatttttctcttttggtttaatcatttcagattgtaaacatttgtttcaaactcttctttaatgttgttatttcttttgttgtctgaagacaaagcgactctcactggttggcttgctattcatgttcttcacctgatcgtctttccattgtcgggatcgtctccgatgggtgccattttaatagctgattgctaatgaaattgattaagttttgtttcaaaaaaaaaaaaanaaaaagaaaaagaaaaaaaaatcccactattaaaaatagaaaatacaataaatattcaaattaaatattaatatttttatttgactttgcttagagaaagagcagtaaataaatgtgacaaaatctcatttaacacaattctaaaaaacaccaaaaatggacaactcatcattcaagcaccaatcaattcataccaaccaaccaacaaaccaaccaactcatctcatctcatctcatctctcatatctcactttcaaattaatttatcgccacgtgtcattcaaccgcgtacgcctaacattctaaattatcccctacaacccaccacagaacgccacctaatcagcgtaccaatactcattgtaccacctcactctgaaattactaaaaacccctttctttcacatccagaatattctactgtctcgctcacatccaacgtggcaggtttttactggtgggccagctgtgtacactgtacacgtttcactgaatcataaattcttaaattatgctttgaaagacgttcgatatttaaacggtgtgagaattgagaaatatcactttcgaggagagagaattttctcgagcgagaaaaagaaaaagaaaaagagggaaaaatatcactttaattttcctcttttgatggtttttcgtttcgttcatgatccggttctgaattttctcgcgatccaaacaagtcacaatgctttcgttacaagccgatcatcggctccaccatggacagtacctgaatcagcctcctcctccgccgtcgccgaagcagattaatttagtcccttacggcgatgaagttctggctcttcgttccgatgtggctgcttctgcttctgcttcagctcctttatctgttaatgtcatcaagcagtctcagaccttggattctcgcgaaggttactgtcttttcctgtttttatcagttgtaattgagttaggttttcggcctgatcgatgtttctgtattaggattttgatgcaatgttgtttttgtagtggtttagtgtttgctttgtacagaattttgtttttatggattttttcttataaaagaaataaattattgctccttgcagtgtttcgattatcaattgttatgtatttactttataaatgtatggaagaaaaaattaagatcacactgttattgtggttccgaggcataaaataataataattataattaaaaaaaaactaatttggaatcttactgtgtatgcttgttttgtaaataatatattttagtgatgcttgaaacttaaacaactttataaaaagttagtaatagtaatctggaggctgtagaataattgaacattctctttgtgactggtaataatagcattgatttcacttgtgagatgattgaatgaggagaagatttatgtttgaatttatactcttaactggtaaataaaatagaatctgggttcctacaaggtatgaggttagtagggttaggcggggatcctagtttcgaaacaaaaacaaaaacaaaaaatctggtttctgttggacgtaagtattagtgttaggaagaaattagtcagttctgaaggtttagagataaatatgtgaagggtttagtaggtacaagctttcttgtgaaatgtcttgtttctccacaactaaatattgttcacatattcatgtttgtacatataaactcttgcataaacaatatgtgataaatattaagcaattgattcacgttgtttataccatagaagttaaccttggtaaatgacacttctacaagggctccaaaatgcagatggtcttgttttgtaggcattctcatttttcttaacacatatagattaattttcttgtacaataaaaaactagttgagagtgccatcttttttcctgaacgttctgaggaaaaccaaatctattttgtaacacataatgcatatatcactttgtggtaagatatactgtaagttgtatgtgatttctttttcacagaaataagttatttaacaattttctttgttttagcttcattttttagcttttccttattagcagtgaggcgcgaacttaaaggtgccaattattttaccttatttatttggtcctttttctagttctttttaaactctcttttgcctaattttgtgtccttgtcgtggaacatcatggttgccatgaatttgattacttttgtttcaagttgttacaagcgtgtatgaattgaggagccaaatttgtttagataactttgatcctttgttattgaattctgctacatttgatttataaaaactttttcaattgttaatatatgtgaagatgctgttttaattcttttgcagttaatgaagacatgctcatgtctctggctcaccagaagtacaaagctggaaactataagcaagctttagagcatagtaatgttatttatgaaagaaatcctcggcgcacagataatctccttctcttgggtgcaatccattatcaggttctcaatgaagcttattagcagtcatttacttttcccaatatgtgtacgctcatcggtgtttttggcttccaagtgaatttacttgcatctgacacttaaatttcatttcattctgtttagttacatgattttgactcatgcattgccaaaaatgaagaagctattcaaattgatccccgctttgctgaatgttatggaaacatggcaaatgcttggaaggtaatctttagtactgtttatggttctgcacagtcaagtattagcctgcaagcatctaatagactgttattatgtttctgcttcaggagaagggcaatattgatattgcaatccgctactatttaattgctattgaggtttgttgcagccataaatgtagtccataagtgttttttttccctgacctgttgtgtttggaatatgaactaatttattatatatacttccaagatcaaatgatcttttctgtttttgccttacagtaatggttttattttgcagctccgaccaaattttgctgatgcgtggtcaaatttagctagtgcatatatgcgtaacgggcagtttaatgaggcagctcaatgttgtcgccaggctcttgccctgaatccacgtttggtaaaattttatttttaactcttgacgcttggatattcaatgatctgccagaacctttgaattgaacatgacattttttttattcttaatgttacaggttgatgcacacagtaatctcggaaatttgatgaaagctcaaggattagttcaagaggtgaggaatctacgatcttgtaggtgtacagttacaactacaagatcaccaaaattagtattcacaatatgtgtagttggttaaatttactgattcacttacaaaagtttgaaaatactttaagctgctttgttctcacacacattattgttcagtttcctatgaaacccttaaggtgctctcctcaaatggacaaggttgtaacatatatttttctgaattctttaatgtttttgttgtaggcttacagttgctatgttgaggctcttcatatacaaccaaattttgcaattgcatggtccaatcttgctggcctttttatggaggctggtgatcttaacagagctcttcagtattataaggtagacctggatcacttttcttgtgcacgtctgtatgagtggagtggtgtgggtctttacaattgtatattcatgttacaaaatttcatggacctgcatataaagagggagccctttataatatatgtatatatatttaatataaatgaaactttgtagtagtcaaaatagcaatgagaataaacctgaaaaaagtcaaaagacatacaataaaaagaaaacagcaacattatatgtatgtagactcatgttgctactcagtactttatttctgtgtatgttgtaattttttttttctgtatattctaatggaatacaaaatctttatatgatgttttctataatcttttttgattatgtctttttcaggaagctgtaaagcttaaaccaacattttctgatgcctatctaaaccttggaaatgtctacaaggtgaggtgttgtagattatacagatatgatacttaaaactgcctagcattatatctggggaaggaatttaatacttgtttctttttcaggctctgggaatgcgtcaagaggcaatagtatgcttccagcgcgctcttcaagtgcgaccagattttgccatggcctatggtgaggctatatatttgtatgcagtatacctagtgaatagtgattacctttgtcttgtgctggccttcctttttacttgatgtggctgtagggtcttaaaatgtaaaaattctcatgcacggcgtacaatttgttctaggataaagatgcaaatatattttacttattactgatttattttcctcttgtttggacaagtaatcttcactgagacaaacagatcaatttgtttttgaagagcttatataaatttatttcagcatgtcttacaaaaattaaaaactaaatatccctccaccatatttaaccattcatttccaacttgactgatctatggatcctaatttcttcattgacatagatatgttacaatggaaatctcctttgtcagataccttcaactttagtctctgattataagttcaaataaattttattttgcaggcaatttggcaagtatttattatgagcaaggcaacctagaaatggcgattttcaactataagcgtgcaattacatttgattctggattcttggaggcatttaataatttggttggttatcttacatatcttagttgtgctagattgtctgttaatcaattgacaatatgaataactttttcattattttcctcactcactaaatatcttggtgttctttcaagggcaatgcattgaaggatgctggaaaagctgatgaagctgtgcaatgctatcgtgtaagttcacaatattcgtgatttgtctccaatttatttctttatttttgttgggtaaattcagttttacttaccaaagttttcattatatacctgaagcaatgccttaccttgcaacctagccatccacaagctcttactaaccttgggaacatttacatggaatggtatgtatcaagtgttaatcatgtcaagccatttaggtcaatagagtgtatgatgccagattgatatcacatttacctagcataaatattttttctctggctgtacctgtacaggaacatgatgggtgctgctgcttcatgttacaaggcaacattgtctgtgacaactggactttctgcccctttcaacaatttagcaattatttataagcagcaggtaatgttatcttagcatcatgcaatccttgcttttatttgttttgggaaaatatttaatataaatatattttcttttctgaatgatggataaaggtcatcatttgtagagtagtcaccttgatttattatttttcttgctctgctgtgccttttccaactaacaacaagatggcatttgccgttttaaatttcataattacaagtatctttttggttatatggttggtcttggtgcttagtctgttttaccttccagtttcattttgtgattctttttgcataaaaataataccttctgctcttcacatttcagttttctcaattgattaaagtttgtttcttattaaaaaacaactacagggcaattacacagatgctgtatcttgctataatgaagttctccgaattgatcctatggcagctgatgcacttgtcaatagagggaacacatataaggagattgggagagttaatgaagccattcaagattacattcgagccatcaatatccgaccttcaatggctgaagctcatgcaaatctagcatctgcttataaggacaggtgttttttgataaagctttttatctgagtttttactgtttgttctttcatgttttaacataggatttttctttgtacagtggacatgttgaagctgctataaaaaactataagcaagcactatttctacgtcctgattttccagaagcaacttgtaaccttttacacacattacaggtattgtgagaagtaaatttactttgtttatcaaactatatttgaattcggttttatttttttttttctcactactgattgttattcaagtctttatttttattttgcattataaattggtgcgctaaaagtcgggttgcatcgccattttctgtgttatatataatatgtatatagtacatgctcccggactacccatcttcggtaggagggcctcgttgattattgttttccaggtcttctagtctattcatgatgttccccgccaataagtgtggtgaaacaatcatcctttattctgcatgcactttcagcctatcatttgtttcttatatatttttacacgctaatgacttagtctgtagtttctctgctgcaatgtatctcttatgttgctatgtgaaacttggtctggattttataactattcgtcattggtttatatctaatttaatatttgaatttgtgccattctccagtgtgtttgtgactgggatgatcgtgaaaataagtttattgaagttgaaggaattctgagaagacagataaaggtaaaggtttagtgttgtttaatttgatgctaattaccatttaggttccacactttgacaccgctcattctttgcatttagatgtcacttattcctagtgtgcaacctttccatgcaatagcctatccaattgatccgatgcttgcactagagatcaggtaagaatctatggcctatatattgtataagtctgttctctttatttactttccttttggtcttgcagtattctctgttcagtttatttactgtctttctgtttatgtagtcgtaaatatgctgcacactgctctgtcgttgcatctcgttattctctccccgccttcaattatccagcagccttgcccataaagagcgaaggtggcagtaaaaggctaagggtcgggtaagtttgagatatatatactctctctctttgaatgtatttactgcccgtggcctgttttcattcactgtttctggtttgaaattcagatatgttagcagcgattttggtaaccatcccctgtctcatctgatgggttctgtctttggtatgcacgatagagagaatgttgaggttggttgactgttccaaagattattgaa

SEQ ID NO: 78962 - DNA, 2068 bp, Cannabis sativa
ttacgttttgctaattctgctactgaattcatttcctcctgataattacgttttgctaattctgctactaaattcatttcctcctgataattacgatttgtccataacaacagtccatcaccatacacactgagctcactgaaataattcgtttatgtagtagtgtacacaattgaccttatattacaatcttcatctacactacattgctttaaactttaaaggacacatcacatggcttgctttcctttacgaagaagaataatctcttggttagcaaattcaataaggatatcattaattattatgggtagagtgagctttttcttggctcctactagtactagaaacgacaaaaactactatagcgaaattaatgtacccgaccagacccttgttatatatttttcctattttggaagagactatatcgccacttgggttgggcggctccatcatgatccagatccgaaatgtagcggttatatcaagccaattattcgtcctagttacttatgggttggttatgttgttcacatttcaacacaaattttagagaattgtttatgaaaactcatcaatatttaccttaaaattaaaatctaagtctttaaactttccaaccaatccttgtcactaatttatagtattaggttgaacaaatagatgactatcatgaaaatgcttagttaagggagtactagtatacattttgagtacaaaaatgtaataacactaaatatatatgatccaccctatatcgatctctatttgtacaaaaatgtgcctcaattattggtggccagcttaggaatctttatgatgagacaagaaattcaaaagttgcctatctttttcatttcttcatggctacacttgacctatttaaccaagaagcctatgaatgaagagcattttcctcatcgtggttgattaagggcatactgccccacataaagctggcgtgattattttgaaagcgactgaagtggaatccaatggggttgcattattattacaatacttatatatatatatatatatttatttatttttgtaaagtagggttacatgaataaaagaggaagagaaaaagggaaagcatatatccagatcttttgcttacactaaggacctgaactgaaactctctcaaaacattgtgaaaaagagagaccatgaagttcttgtttcagtgcccatgttgttcatgtttctgcttcatgaagcctaagcaagggaaaccaaaggcaaaggaggtcaaggaggagaagaaagaggctaagaaagaagagaagaaggaagaaaaaaaggaagaaaaaaaggaggagaagaaagagtaagctccatttacttatagtaaaagttataaccactttgctttcttaatttcttgctgtttttgtatgacctttctttggtatggactggcaaaattgtaatgtagtatattggtccaacttcctattcatgaattctcataaattgaacttttaattgtgaaattccaaattttatctacttttgaacggtacccattaaatggaattaagtcaattgtgtaatgaagctatatatgatattattatatttttctgttaatacagagtcttgtagatataaagatgtgtacctactttttatacaataatgtaatttacagttttatacctacaattgtcatgagtttagtatgtgttgagtaagatgaacatgatgaaagcggccttaaatttaaatgcaccattagattattagattctgatgaaaagcagagttggaaaacgtcaaaatcttggcacttttattatttgaccggcacagaaatttctgctcgttattcttattagtttctaaatatgcttaatttttttttaattaacctttgaatctcaaaagctgaatccactatttttttttttaaaaaagtgatttttaaattccttgccaatttagtgttgttgtgtgaacactttaaaaaattaaatgaaaaaaaatacttatagtaaatttctcaatttataattcatttaagaaagaacaaattatatgtatttactatttagtaa

SEQ ID NO: 78963 - DNA, 2058 bp, Cannabis sativa
tattacacaacttattattatatatatttgtaaaacatggggaaaactcaaatcaaatatgacaatgctttgtaattccgatagatttcagcatataaataaagtgcattattattattattgaataatgttattattttttttaataatcttgaatattataattaatacatattaattattataattaaataacttgctcgactacagaacatttttaaaaactaatattacaataatcggagcataacataccttctactttttatgggtcttcgagatggtggaagaaattttgtagttttcatatcccctcaaaatcaaaatatttgcttgacaaatttctcacaattggatctcatccaagtttaatttgaatacgcgtgatatgcttattgatgtatttgcctcttgtgcaatgcccaagaaactactcatcatactttgtggagatgctattctctatctcattgtcgaaacctttgtgagtttagctttagaaatccttggatcatttgttctaatttcatttctttcatctatatgctggattctttgcctatatctcaagtggaagtagctcttgttattatgtggagagtttggtccaagagaaataaaatgatccacaataactgtttgatgtccccaaagttggtggtaaattgggcccgtaatttcttatgcgattatcagaggcctcttttaggttccaaagagactagtcaacggagagcggttgagcaagccaagcctactccaccttctcctatcgagtttgtttgggttcctccttatggtggttgtttcaaggtcaatattaatgcgacattagactttgaaagtagtttttgtggcttgtgtatggttattcgggatgctcatgaggttgtctttgcctcgacaatctggcacatgttggttttttttttaagttgaagttgttgaagcttttgctctatctttgtcgtgttggcatccaatgtcgtctcttgggtttagataatgttcaaattgaatctgattgccagagtgtggttaacaagatcaacaagaaagtagaattggactcgtcgctaggattaatttttcggacattcattgtagtatggctctcttctataatgtgattgttctaagacaattaattataatgttgttgctcataaccttgttaagtatgatttgtttgtggctactagcaaagtttgatggccacattatctaaattgttttcatcactaccttaatatggttgatgtcataaatctttaatgatattccttctttctcctttttgagagcttttactctttaaagtagagtttggggtttttcttttaaaaaaatatttaacaataatctacctatatatggatattaatatactagaaatttttaatttttaattttgttattattattttttttttttgaaaagtataattttgttattttaatttaaagttaaagaatattttttttaagtaatagtatatttagtaaaagttaacataaaaatacaaaaaataccattaaaccaaaaattatgttacataatcatattttatatagaatatctatatacattagttgtaagaaaagagtataaatattctggccattagatgaaacttaataaatattgatccaattttttttttcttatatagatatttataaactagtcgtggtaagtaaatatattaggtggactaatacacaattataaagtcacaaactgagtcagtaacctaacacatgacaaattaaggcttaattatcaatttattatataaatatatatataagtataacactaagacttgaaaaacaagttcatacagggaacctaccactaccacttccaaaatttaattactttaatcacattaaatttattaattatttagaattaattatatatatttgcatgtaaatattgttacttctattaaaaaatcagggtcgatcggttttgggttaataatgaggacagcttgtacttaggctacgtaaactacaattaaatacgtttttgattttaataataaaact

SEQ ID NO: 78964 - DNA, 2101 bp, Cannabis sativa
ttagccattaaaccaaaattaatattttgctaataaatattatcagtttatctaactaaaattgtatatttttttttttccaattttcttttgaggcccgcctgttcatgaccaagatacaatgcatcaataatagccgcaaagctgagtttacgcagataataatatgcatgcaacacaacaaagcgactttcatcaacatttgaaacaaacataataattgcactgccatacatatgagacaaggcatatcctataattgttgcttttcaaatcaaaaccaataaaggtttgtgtagtctttgtggctggctagtaagtctgaactaagtattacgccaacaataataaaccagctgagttttatcatttcaaatgttgccgtttacaaaataaaaacaagaggccagcgctgagtattcagcatgccaataattaatacataaataaaacgagagaattgaaaagaaaacgacaaacattactcatacaacatcaacgataaaacgacataacagaggagaaacgacattggaaagaagaaatgtccatgcagaactatttgcaacgttgtagcggagcaccacacaagcaaaggttatggacataagacgtggcttcgagcttctgcaacttcccacccactggaatcctcccacacaacctattataactcacattcaaatactgaagatcacccattgcagccagtcccaaaggaagactccccgttatcttattatgattaagatccaaccaggtcaagctcttgggaacgacaaccttagacatgtcaaactccagcaaattcctcgaaaggtctacatggctaaccatcttatccgaacccaaaatcgagttcacgtcaccttggagtttgttccaagacaagtctatatgagcaaagtccttctttcttcccaacgcggcaggtattttaccggagagttggttatgagacagctccaagtaaaacctcttcactttgaactctccgaacgaatctgggataggtccagttagtctgttccggtccagcctaaggtggccaaggtttggtagcttggaaagcgaagccgggatcggtccagttagtttgttgaaagagaggtcgaggtagttgaggttggtgagctgactcaagaaacctggaaccgaaccactgatgctggtcccgtctaacctgaggctctggaggtttctgagtttagtaatggaaggtggaatgggacctgtgaggttaatctgtttgtgaaggtcgaggttatctaggtaaggaaggtctccgatttgaggtgggatagttccggagagaccaccagggacaaataaggaggtgatacggtgcgttttagggtgacacttgacgcagtaccagtcacagcaatcggtgtcttcatgccatgaggtgaggacataggggttattgaaagccttcttgatttggagaagggcttttttgtcattttggttacatagctctgagagggcagggtcgaagagagttgtggagaagagaagagtaaggatgagggtggtgaataatttcatctccataactttagtttggttagtgggatggatattaggactagggtttgtgattgatttatatagaggtattttattgttgttgtgaattgatgttaagatatatttggtaggtaggtctgtgttttgttttctttagatgcatgaaacacgtgatgaaattttgctcttttgagtttttttcctttttctatcgtctgaaaaaacagaaagagagagataggaattgctctttcgagtcttgacagctcaaatcttactgtataccaatacttaaacagttacgaacataaatattttttttttcatgaatatgtgaagttgtaattgtaaacccaactttattgttttaaccaaatgcctaattatgttaaagctaaaagtatacgatctcatacataataagttattccatatggtggaagaatcgaccatacagttatattatctgtaaaaactcatttagccatattataaattgcaaaattataaaatttcaaaataaacaaaaaattacaactagtcaaaaggttcgagagaattttatatt

SEQ ID NO: 78965 - DNA, 3451 bp, Cannabis sativa
atatatatatataaaaatttccctatttaatacttgtagtcctctcaagtcctctagatataatttatacatagtgctttattacaaaataaactacacattgaaacaacgtgttctgtttagtcaaaagatcggggaagattattggctttttaagcctcactataaaagctctgaaattgtcttacatacatgaattcttctcgggaaaaataatccatagatttgtattttaaacaaataaaaagaaacacgaatttataatgaactggattattttcatcgtctgctacattgtttacactcaatatttaaggcagaaaatgaggtctatagtctgctaaggttgaaagtctataatcaaatatcatcgtgatgtttacgttgttctgtgtcctctttgttatcattaacttctgcgtcgtgttgctcagaggctgagccaacgacacccgtttcatcatcaacggggccctccccttccgggtttgtttggctcttatctgcaaaactactatcaggctcagtgttgttaaccatacttggctgcttatccatcatcccagatagagccaacgttggagaccactcaagaacatcatcaattatgtttgacactcttttttgatatctgcaaaatgaatcaaaacttagaaaagtaagaaaaaaaaataacaataaatgatcatcgtcctatttttacttttccataattgtctactctagtatgacatgaaacaatggtgagaacttccttgagtagaatcagaaatgaaaattagtttaacatgtaaggagtaaaactgacctggccctagcagcctcatcaggtgcatggtgcctcagcagtaatatgacaagaacccctactagagcgtagaaaagccttgttgtccactttggtcgttcctcctcatctttcttaggacagaaacggaataattctcgcaatgtcgcttcctcggcaagaatgttggggaagaaccaaacacgttttccaataacaatatacaaaagaccaaatgctgtagccctcactacaatttagtaacagactttctgtcagcctcttaagaaaaataatacatatagaagggtaaaagaaaacacaaccatgtatgccaataaacctcatcgtttgtatatgcaactaaaaattgctgagttaaaactattagtagtaaagaaaacatagattgctatgaacagccatgacttaagattatgaccattctccaaaagacataaatcaatagagaatgaaattcgattttgaacctacttgctagcaaaggaaggtctaaggaagtagggtcacacataaatggaggatataaacaaagtcactagcagtcagtcatagaaaacttacaaaagagcagtgacatgaaaagcagaagaagccctgcacatgagtatagtattattaacttgcaccgatggggatatataggaaacaagcaaattgccagagtcaacacaggccagaaaaacgagagcagtgtctgccaaagaggccgccttttaacgaatgtccaagcgaagaaagcatcattttcagaaaaaacttgatcctgcaaaggatgattgcaacattaataactttgctgtgggtgtttaggatttgcatacttctaattacagctgccaataacatagacaaacccatgggaactatttacccaataagtttgtgcatgcaaccgaatactctacacaagaatcaaatgacatgcgttaaaaaagaaaacaatcactttccaccctaacgaaggcaagcgtgatcatttcaacagaagcaagggaacacaatatcttatcctcaaaataatttctttcaaaaaaagagaaactttaaacttacagggaagatctccaagtgggcaggccaggtagacaattttttcttgccaggtcgaagagttttgacgactcgatcacaacgcacaagaagattctttctcaataaagcattgccaatatcttcaggctcggcattcttatctgattccagaatatctttcagctcaggatgattcctcaaaaacccaccaaaatcttttcctctaaaatattccactcgggtctcctgtaaaacagcccatctagataccaaatccttatggtccctcactttctccgcgaacaattgatacacatccttctttgcagcttgtttctgttcgaattgaataaatccaataaattgagcaatcagtcaaacaccggaagaacataacagcattgggtaaaaacccgaatttctttttatgcttagaattttgatcgaataaccgaacgaaaatcaaaagtaatgagtaattgggtacgaaattcaatacaaaaaccaaattgaaatggcttatcaatgtaggtgaaaccctagatcagaagatatgaaatgaagaacaaaccctaggaggggtgtcagagtttggatctctgccaccattttggacagccgccgaagacctccgcaccctcttcttctctgcacctcccgatttcttcatctccttcttcttcgattctctttcgtaaatcaaacaaagaaaaagggaaaataaaaagtctgacactttttcacagttccattcgcgctcctctacaattttttctccattttgcttcttcttattgcaaaatattttcttttattacaaaaataaaaaaaaaataaaaataaaaaaaaatgaatcaattgatgacatggctcgtcctagttgatgactgagcagtaagctttgtcattaaaagcaatcaaaatctgccacgttttatgggccactaactcgtggctggggactcgtgtccgtgtattatttaagaatttgagatcgctgtgttgaaattgactattattacatgacattaatttaaaaaataaaaaagaaattttgtttaccatgtcttctaacaaatacaacatacaaatctataatatctaatgattttaagcaactatatacatatatattagtataattttattaaaggtaatttgcggctaaatttcctctacatttgttacagtttaatttttttactcaaaaaattatagctatactctttagactcaataatcgtttggtcagcaatccatctgttggactggctccgttatgtgctagatggctcctacatggtgccaagtcaactttgccatgtcacatgaaatctgccacgtcaaatctggatagatgattaacaaactaaaatgattgatgaaaactaattaaaaaatataaaaaacaaataaacaaaaatccacgtcagttaattaaaaattaaaaatgtagaaattaaaagcaaaaaaaattagaatgaaagaaattaaaagaaataaattaccgaaaaaggtaacctgtttattcaaattttaacgacgatgacgtgtcaagagtagcaacacatggcacaaaaataccgagactaaattaatgaaaaatat

SEQ ID NO: 78966 - DNA, 967 bp, Cannabis sativa
tctttgaagtcaaaattcaattgggtatttctcaaatttggaaaattaacaaaacattaaagaaaaaaggaaagatgattgaattcaatcttcttcacattcaattttcaagactaaaacaaacaagggtgactttgcaaaaccccataatattaacaaaatcaatcaatcttactcattacttgtaaaaatttaatcattgagatcaaaattcaattggatatttttcaattatggaaaattaacaaaaaactaaaaaaaaaaaaagaaaagaaaaggaaagattttttactcttcctttttgttcttaccttttcatcattgtagatctgaaatctgatcttgtgattgtgctgttggtttctgtggtggcttccaatgaagatgatacaaattgtagcagcagcaataccaaaagagcaaatagctccaatcccagataaactccatttccaaatgttaagcccatcatcatcagcatcttcatcttcatcaccatcactattttcatccatatttttgttatgatcttccttcatgtccaagttaccactcatctttttcatgttcataaatcttggagaagtgatcacaccaccaccactactcaaattttcagcttcaattttgtcatgatgatcaaaattaaacacaccagcatcaatctgagtcatattaaaacctcctctggttggggactttggtgattccaccattttcatgtcgacaaattcattttctttcttcattttcttgaaggaaacgttggagactgaatcttgattagcctcaatcaaaccaccacctgcaattaccacatcttcatcatctggggtttcgccacgtgtctttgttgctgctgttgtagaattgagctgaattggaattggaatcggtacaggaacgagttgactcggtaccctttgaggcaatcttcctggattgaagtaatcattgagaacccctt

SEQ ID NO: 78967 - DNA, 7496 bp, Cannabis sativa
aatataaacaaagatcacaaaggaatgtaattaattaaaatctgaacaaaagtcccttccatatatactgtcatataaataaatataagggaaggagacgatggggtggggcttcagctcagttagaagataataactaaacctaataaaggaaataaacaaaattgcagcccacaactcatacatatatgtccataataatataaattagaattaaaattatgaacaagggtgtatacaacaacaatacatacacatacatattagtagtgtgtgtagtactactactactccttgtttcgggaggctctgtctttcttttgaccaccaagaatacgagaaatctgtagacctctactgaatgcttggttgaaaagcatacgagtttgaaattccgacacgaaaggaaaccacgccaagaacgcaactggtgtgaacagaagcaaacccatcactatctcgaacccccgagctagagtccgaatcgatccccagaacccagctctgtggactacgggtttcagggcttgtgcaatctggaattttttttagcaaagccaagatttttacacgttaataaagcttaattttagaaagccaaaaccgaaaaatctaaaagaagagtcgatactaaccaaaagcattccccagccagtgggcatgaaagcaagaatacacacaagaatgtcttgaactgtcatgtggggaagggcaataagagtgatgataatgcccacaaatgtcatgaatattaacccctttattagcctaaacatgagttggaaattcgcgctgaactttcgcctcccgacagacaccgtcttcaaattcaaatttaacaaaacaaagtatcagtatcgactggtaaattttatattattaatatgttgagaaacgaaattttagtaacacaagaaatgaagaaattactcaccttcattacaaacaaaattacaaatatcaccagccacgaaatgccatatacctgtcaataatcgagttgtaaataatgtcagtgtaattttttgtttctcaataatataatttcgttcaagggatggactaaaagaagttaacaaatgcagtgaaagatatcagaaattaattaatatggctaaccaaaaacgacactaacattagattgggaagataacttaatagggcttctcagattactcaacattagctattataaacatataattgagcttaaaaagatgcgagggagagcaagaattaccaggaaacttttgttggatgaaatggtcaagtgatatacaagcccatactgataaataaagaatcgaatagctaacagtatctcgactactataccccggataccagaatgacggagatgctcttgctcctcctcccaccatgattcccaactcttttcaggcggaacaccgatacctcctctgttgcttatccacttattccaatcagtccaatcatcgacaatcttttgccactcaaaaccagaaggattgaataggaaaggtgcaaaaagccaggtgccaaccataaaccacatagatatagtgattaaaacatacgcaacatcacttctgtaaggctggccaaatatttggtacacaatcaacaaaatcatgagctctagacccttcacgaaatggctacgggagtagagcctatagttgtcggcaaacttggcatggaacacgacgaatcctcgacctgtagacctatatttagcacctccgtgtagtagagtccttccgtaatagtgggtttttgttccgagtgagaatgtgaagaacacaggggctaattgcagttgcatcaatacaaattcacttagtgcggtccggaaacctctttcgagaccaatttccattaacataggtaaggccatcaagaaaccaatttgaacaaaagattgagaagcaagagcaacttgaaggggcttgttatctcgtacacctggttgagtacttaaaccctcttcaagaccactaagaacaagatagagccgaccgtagagaaacacatacacagtaagcacagttacctggtaaagcaagacacatcatagggtcagttaaataataaatttcaatgtcaactagaaagtgttaagttttgaaataaataccaaagtactgaagtagaaaccaattgttgtgaaataacatgaacacatccggaaaaaatcaaaacggtgtccaagacgataaatatctcgactgactgtctgctctccatttccattagccacttttgcttcaaacatggaaatctggttgaggcccacatctctccctttccctacttgtatgtactcatgatgagtgacatttccctcacgtaacgtagagttgaatcctgtataataatatttacagtagtatgaggaagatcaagacatttttctttatctaaaataagataagacagatcaaatcgaaaaaagaaaacataggaacttttgattcactgaatatgttttgtaccagcaaatatgtcttcactcagattgataacctttgacgctttactgacacctcctctagtaaggtgaaagagcctatcaaacacatccggatgaccatagtggaaacgaaccctgtatgagcagaatcaaaggacgcatgtttactaaaagcaggaagagaaaatacccacgaaaactcactagaacttttaagccaagtatagattaaattttcatacaataagataacacactgttttagcaaaattaacagaacacgccaaaacatcaaagaattacatgatacacatctgatctgtactgcaattcttagtccacatcacatcggaaattaatggtaaaataccaacaattacgatttcaaattagagaagattaacttacttcagtgggttagccaacaatctctgaccaattgtaacaaaactggtctcctgatttgacatgaaccaagctagagaagaaacactacaccacacagcagaacaattagaatgactatcctcgtaaactattatatcaaaaacaaactgtgtcacacaacctacctgccagtaaatatatgttccctaagtccaagaattgaaggaaacctcacaccatcatgcttcttaagaaattcttccagcaaattcctcatttttaaggcttcttccatgtagttatcctgcaatttagacccatttcaggaccagcactgaaaatatgctacaaatgacctttcagagaagtagaaataaatttacctggttcatgtctatcgtttgcaaaccttccccacgagtgaaaataatggcatgattctggttttctggctttccctcacccaagattgcaggtcctggaagtcttattttatatataatctgtatgaagacaataattttaagtgagtgaaaaacataaaaatataaacttcgtagaacctattattaatagcaagcattgcaccgcacttatgtcttttctacactagtgacccttacctgatctagattttgaatcggttcctgtgaatcaatagactttgttgggaaagcagcttttacaagagttgaataataaagttttgggtttgttcttgaacttgatctgtctaagctaggttgctcaacctcatcaatgtatgccacacggagtgatggatatctgcagcatggaaacacataccaataaacttttgtgcaagatgaagaatcaagaatcaagaattttaagcttgaaaacatacgctgtcatcagcctcaaaatgtcctgtgcacgagcatcaccggatcgcttgtgaataccatacagttggcaagatacaacatatgtgaatttcatatcagctactgcctgacattgcgcccacagagatctttcccctttctgttgatcctctgaattcaactccacagccttatatccctccattaaatctgaagagaaggaaagtaacatcattagcaaacaatctattaggaatctttattttatagtgattaagtattgcaaagaaagatgcattaaagagagaattgataccccgatcttcagccatatcaagaaaagcctgaagctccaatgctttccggtagtacatcatacccctcactggcattaatacataaacattagtaaatgctatcaagaaagtgtgaatatggaatatactatcagtgtcataagtaacatttagagaatacatatacatacagaaaagaagacatgtctgtagaatgtacctgttctagtcaaggtctggcctctgtatgaagcccaaagacggagtttttcttcgtgttcatcagataattttagctgctcctcgttgtggcaatcgactcgctcaaggaagttttcccattcatctggacaatttattccactgattcagtcaaacaaatacaaaatgaagggcagtttaatatgaataaaaaaaggaaaaagaaataaaacctgggaagatcttttgcaagtagaagagaattgagacaccatcttcatttggctcttccaaatcacgcaaggagaaaagaacctcctctgtatagtaaggagtcaacaccctacaaacaaagtcatttcatcagaaaagattttgtaatttgaaaaggaaaagatgccagcatagagcatacaactagataatagccagtaatataattgccatccatagtgcatttgtatcatatgcctccagaaaataggctacaagaactttgaaatttattccagattgaaagtttgactataatgcagctgttagaagataataaatggctatagaagagtaagattactacaataacaattattgttcagataagggcaactgggcaagtacactatgtttcatttaaaggggaatgcaacgagaaatggctaataaattagattagaaagcttacgagaaagaaagcatattgcgaactttaggggcatcaggcatatccataaacaatgaatttgagaaaaacgacattcttcttcttgcttccaaattggatggcacatccatggcagattcctttgtcgtaagcaatagatacagccgctttatctgtgtatagttttacatagaacagaaatcttaggaattattcaacaacaatttttgtaacgttgtatctaactttgcacaccttttccttccactgctctgtcagatcgataggaaaattaatagctccagcagatgcaaataactgatattgttgatccagtgggatcgatccctcaaagcctgatccaccgtggattgaatccaccaaactgctcaacaaaagattagaaaatcattaccaaataaaaaagagatatcatacaagtgcgtgcgctatagagagaagaaaaatacagcaccttgatagttgatcctccatcattatatctctggtcacagtctctaacatgtcctggaaaacaagcacgactttgttgctatcgtctgccttattttccaactgcaaaatgagaacttgcattatgaccctttaaaaagttattgtggaattgactgagaatatgaatatatctacatatacaggacattcaaaacttaccataaattcaataagcttaacaaagtgcccataaagtgtagggagggaactcatcttgaattcagtaagtagatcaccatctgctacatgcttgtcaaccacattgaatatatgctcaacaacactggaaagttaatcaaggagattagtaaataatgcgaatgatctcaatataggatggccctcgcacactctcaggctgacactaaaagaaataccagggaggttacagttcttaaacaataggttaacttactctgtttcacgtttcccttgaaccaatttcttaataatgtttctgaatgaagcatagcattcacaaacagcacaagacatgtaactgtcagccccaattctcttttttagatctttatcttttccattgctgtccttggccatgtccaatgctattggaatctagtgagcagattaacaatgagaaacggacatgatgaattgagtattcaaaattttattgggaagtatgttgaaacaaaccttgctggcaagtaaaaagggaggccactgtataagatccaaatcacggtcagcccagtacggaaccagcaaaaggtccatttccctgttgtatacaaaaaagttaggcatgtgtaataaggaaaacaccaccaacattaagcaaccacagtatgtcatgcaggataaactcattctgactacctacctgttacttataaggtcttcctctctaaagctacttatgattttgttccatagctgagcaaactttgctgcccccttctcttggtttgatgggatcttcattgtaaataaacaaacaaaaaatgacatcatttcaaaggggaaggaaaaaaaaagcctaaatatactcgacagaaaaggtcctgtatgtaaacctcagcaaatttgcgagagagagttgctctcagccctttcttctttggctcattcttttccaccggaaccaagcgggcgttaaaagcaccaggaagggactcaaaacgagatctaagcattcccagtgttcgaatctggaaccaaatttgaagcaacaataagccacattatgccttgaagataacttactacataaagatcccacatattccatattgagaaagcttgaagattccataacacagaacattaaatctatattctgtcaagtatatctaaaacgaagaggcaaaatgaagaaatcttcacaccaagcatttttttttttggtgtgtgtgtgggaataggactgcatcgctattcagatggaaacacaagagaaattggaactaacaaaggtaaactcaaatggtatgagaggaggggtatgcgcgagttaggggaaggtgttcattcaattcccatatgcatcaaaaaaagaaaacaaatacatgagaaattggaaggatctcttcacttaatcaagaaaactagagcaaaagagcatgcttagccaagttacggtcgcaatgttaaaattgcaaccaagatgagagattattgctaagcaacatttacgtagtagcatcaaagaaaacccaccaagtagcgattacagctatcacgaaaaagagcaaaaaaaataagagactacatcaaaattcataagaatgtcttacctctccaagtcggcggaatgcaccataaataccaccgaataacgttgagaagattgcataccaaatctgggtatccataaaatagacctgcaaaattttgctatgtcagaaatctaagcatgaaggctgacgtgataagaaaaatatatatagggagagcagaaaacatacaagaataattggagcccatagtgcaacaacaacaccaatattatttttggctgcacaaaaggtgagatcaaataagtatcactttttttttttgctaagacaaatcaacatatcacttgatcataggaactgcattgttttatatatagataagaactaaagcataagaacttcatatattcatatataaacccattacca

SEQ ID NO: 78968 - DNA, 4543 bp, Cannabis sativa
tgggtccaaatccattggatgtgatctaataaacacccctaataattattttggattatactttagtcccccttacgttagatcttgggtccaccatgcatacattatacatattatacttatttttataattaaaaattaaagaaaaatattgattgatctactttaactttaatgtatatttcaaaaatataatattaattattgtactgtcaaattcagtgatgctaatttacataatattaaatatatttattacattaaaatacaataagattatcataaaagtttactacgtacggaatgctctaaaatttatttaaaaagaatgatggaaagttcgagagggactcagacaaatatttatttgttgtccaatttataatgaatgatttttgcacatatctttatttatttatttatttattttagataatttttcttatttttattaagtaatatattttcttctttttctcagttgtatttattagttttttctcttttttattgtttatttgaaaagagagaataacaaaaaaataaaagtcttcaacggtttcaacttaatttagcgcccatagttttttttggtagttttcaaaggtagcaataagatttgacacgtggaaggaaacaccaaggaataattgattaatattaaagaatattaatatagccgattatatattaatatttagttatatatagttgatgtctggaatagattataagtttctcataagaaaatagcattagtttatatgctatctgttgtgttttgtattcttcaataaattgacaaataaatcttttttttttataagtaccatatatatacgtcaaaaaaaaaagtaccatatatataaatacatatatatatatcagatttattttaatttacatgggcatctatcaaattttgaattggtcttttctgcatggtaggactgaaattgtcaagcaaggcatcttttcaactaatgaagcaatgaaattattattctaaatatcttccatgtctacatttttctgatcttatcttgttgttagctagccacaataaaccaaaaacttaatcgaaagataatcttgtttaagttggcaaaaccatattaaaatttaaaaaatacaaattaagcatattccttttggttttagcagcagtttgatattaatgtatatatacatatgtcattgcataattaatttaaatcctatttaaaaaaatatatatgcctacagtccatatgtataatcacgcacatgatgaagagagaaaagggctggagtttactaatatacaatatcaccaccacaccacagaatcagatctataattccagtgaaaaataatagtaattataagctgatcatatatttatatgactattatatataatcatctatgtggtctccccaaaaattcaaggaccctgatgagtatttgtttatttgtggcaccctttatctacacttgagttaaactaaacatgattacatagcaataataagcgcctcctctaacttattgggtttgggaagcttaaccaaagagaaaaaaaccataactaatcaagcttcaatccactgccttcttggagaagaattattactgaccctaaaaacatgttcttctccagtacacttgtctacttttactacccaatgacttttttttggactagtgattcttgaaacaagcaacccctctccaatgggcaaaaaatgagtatgtgctcttaaatcattcccccatgatccctttctaagggcattaaaccccacaatgagtgctccaacatgttctgagatacccttttgagcagctaggaagatccctttgtggtctttaatatcacagtcaataagaacaaaatcagctcctttgaagttatctggcaaaagggtcttcggatttcctatgaaaaattcaatgcatttggagtaaggccctagagaatccttggattccttgatgtagttttggcttggtagaatgcacactactctcccacctgtttgatgtcttgccgcaaccaatgccagagcatttgctcctgcagcaccagcacatgccatcaccatgagttgtgcattgttgcctgccgccaaagctgatatgaactctgctacatctggctctttcccatttttaccctagaaaaacagatcagacaaactctatttattagaaacttcacataataagataattaagtagaacataaggaagagacaatgtttattagcaataataatgttattagctagtttaccatttttagagctttgagaaaagcttttgtggcattctcaggagaccaacaagccattgtttgttactttgtttggttttgttttgtttttgtttaagttgcgattcttgtttgagagtagtgtggttaatggtgtatatactgtctttgcttcagaataggagaaggcattggtctttatatatataatgtttcggaggctcatgagtcatatgcacaattaaatatttcataatgcaaccatctgaggaaggttttaattgaagaataatatttatcattcttttttgccaactggcattgctgaatttagatcaaaatagcaattaatcggctaactttactataaaaattatattattcatttctttgttgctgaaaaaaaggtgttaagaaagtggtttccccacgctaaactcttaatttgagattactatactcaacattaggacatatgtatgataacttgtaagttgatatataactttcaatgcttataactgaggagtactcaactagtccttgagcaacatattagaaaattacttgaaaatgagctaataattcagataatatgattgtcaggtatttaattgcttcaaaaattcagataaataaaatgcagtattgtttttgctgatcagaaccgaagtatatgcaaaacacacatttacttcattttgtaaatttaatttgtacatgtaacatcgaggacaacacctgcaattactctctctgtgctctttgctctttgcttgagacaatgagagggagcacatttaaagctttgtctcctgactctgcagtcgaataaaacttccatcaaataattttcacaaaaccaagtaaatcaacacaagaatcactaggtcaacatgtcacctacttgtcccccaagaagccaattaatcactaggaacactcatgcaacaaccccacaagccttgtttcataacgtatagtcatacataatgataacttcgtaatatatttcaaagcatcgaccaatatcgtagatatatctttcttgaattgtcgtttagtggtaatttatgctttatattcatttgcaaaaacttagcttttcctttgcataaactaactactgatatcatatcttataagctctatacgccactgccaaatttattacattgtagctgtgatgtcctccacgttctaaacactgacttttaaaatggccaaaaatccaactctgtccatggtcctgagcaatacgattctattgggtcctttaaaatatattattatattggtgaagatttctatgcaaataaaatagatataacagaatgatgcacgaaccaaaaacaggcactagttgggagagagtattgatgttagagaacagaccctaaacattgtatagtaaataacaatatctaagaaaaaacttagaattgaaatttagaattagtactggaggaaggtacaacgacgatgcttggtgaccccaacacaggacacggataactaagcctgatcacgttgctttgcatgtaatttcattgagaatcacagcctaccctttataaatctaatgttttctaatacttgccactcttttcttcttggaactctcaaatatacaactcagctttttactcaaatatgattatttttcaatctttcaattatgtcagagctaatttttgtaagaggaaggaccagagaagcacatccttgattttagttgatataggccattgcaagttgcaccatatgcataataaatggaactaaaatattacattctaaaagctcaccctactgttgtccttttgtctggctttgggttttattttcggtggcaaaacaagctgacttgaaaatgcttagatgatctctacttatatctgatgattatgcacaccagcacgtactctgcagtagtactaactactaataataagtagtgctaatgattccaaagtctatgatgacgattgatcctttttgttgtttatgatctgtcacatacaaaccaaattcacacgtgcaaactagaagttagttagttggttgttcggttttgacagttaattctgttaactgttaatccttacagttttgcattttttgtcatattatttttcagcttgtataaatagctagtcaactcattcttttcggttaagccttgtacatactctctcattgtaattctctccaagattaataaaacattcaaatttgttcatcattttgttcattagtttttgactggttttataccagtattg

SEQ ID NO: 78969 - DNA, 4562 bp, Cannabis sativa
agaaaaaaaacccattcatactacattagaatagcataacaatactcctgattcctgaatgcccaagtgtttgcagatcaagagcctgccttgccattcttgtcaactgcggaaatgtatgtagcaactttccttcttcattgactacgaggtgtcgagtgaacatgcgtcaagtttgggaaggagacttcgccaagcatcagcaaatgcattcgccagacgtgcctgtcctttggcgaattcatggaaagcgatccctatgtcgtttgttttctcatcctgaaaccgcaccatctcttcattcattcttcgaacgattgtctcgtatcttgttgttgcttcctcactggcagcctttaactgcatcacaaagccaaattcagtcacataaaaattcatataatttgtaaacaaatcactgataagataggctgacttgcctccttgtactcatgttcagcttctccaaccctctcagatcgtgtaagcattagtttgtctctgaaaaccaataagaaaatcagtaataatgagttgtccccacttaacagcataaaattaccgaagaggtaaatagagatgagaaaaggggtggaggtaaccggacacttacaaagctatctccttcaacctaattgtttcagcaagttcgcagtgttgcttgaaggcatttgctctctctgcaattgtggcctgtttaacagaacaaagtaaaatagaagtgcagagttgagtgattggaaatcatccacagtaacatatgctttacttcttccacttgcatcaatgttatgcatccaaaattaacccaaactgtgcatgtatctatgattacgtgataacaaggaaaagaagtttccaataattttggtagattcagagttaattacattagaacacaatttctgctagatcaagagttagctacgtagaccataaatgtcaaacaagatagaaaccaaattcaccttaatagattgtacagcacgaacataatctttcaagggttcttcgaaattcattaacagatgttgagcctgcaagagaaagaatgcaaatggcagtgccaacaaagcaaactcattaatccaaataagcccagcccttagggaaaatacacgaacaaagacacaatacatactacacatgaacagattgttaacttcactttaaaagcctacctccttttgcagcttgattgatattgcttctgattttgcaccaagatcacaaaatgccttaccaacatcattactttcgcaagcacccaaaagcttgaatgactttcctaattctgacagagattgcccatactctacatagacaaagaaagttaagagtttgaactgatggcagctgcttaaatcaatgctttcacatttccagtacctcgatgtctttttacaagacggtatgcatgcttctgtgcttcggcaacatgattttcaagctcaaagatataatgtttcaacttttcatactcagcatttgactcttccactggcttctcctttccaagaactacatcactcattttagtttgtacatcctgccagatgaaaataaatttctctcatcaaattgaaagtccaaaagaatgatttcatattagtctaccacagtgagctactaagttttgtagttgaggtgtatcagtaaacagacattatgtacagtacagtccaatactccaatgtctataagagaaatttctaaaattacttctaggacaaaagttaacactatccccatgaatatttaatgcatttttgcagtttacgaaatttgctaaagaccatcataatgagttcaaagtaccttaatgatttgcaagaaatcagctggcctcttcttaaagatcccagtgtcttgagatctcaacctttccattgtctaaataagaatcacataaatgtatcagaaaaattattggtcagtgtcttttacaaaatcagaaatattatctcttgttaataaggttagatgcacatacaccctatggatgatattaatctttaagaaagaaatcatgaggcattttcaaagtttttaactacctcttcatctgcctgtaagaaggttctaagatcatcactttgctgaagttcattgtgtgaagctattcgattgatgaatatatccaacccttggcgcctcaattcaataaactcagcactgaaacgaaacttctctgcatagagtgagcgaaattagtcttagtcccctagtcactttgaagtagtttgaacttcaaaccacgattctatatcatcaaaatcgatggattttcaattttcaaaggataatgaatgcattgtattgtttgttacaaaaacgagacaagaaaaggaatatgttgctacctacagcacttttctcaggaagaggaggaataaatactcccttgtacttctcaaagagacgatcacgcaaccaaacgaaatcactataacgcctgataacgatcttctcaggcccttgatattcaggtaaatttgtctgtcaaacaaaatcccaccttttaaaccatcatcattcatatttcattctaattcaactctgagcttaaaaaacctaacaatgctaggcagacagatcattatacaaaacccattaaccctattcataatagtcttcataccaaagcaagaaaaacgaatgatcaaaagtgcacaccgcattttctagccccaaaaaaacaaaaagcaaaaccctaatccaattacagaaaccagaaacagaactgaatcaataataataccttggtgatgactcggtaggatatgtaagcctggactccattgcccaatttgactggatcagtgaccgagactgaaaggaacggctgcgaagacggagatctagggctctgagatgagcccgatacacttctctgctgctccattagtcacaccaaaattacagaaattaaaaatcaaaaaaccaaaaacaattcacataaaaattactgacaccgaaatataaatgaaacccaactatgaattcaacaaagaagagacccaaaaaaaaaaagacagacagagaaggcagtggcaaaactgtaattaccaaggaattcatggcgggttcgggagatgagaagaagaagaagattaaaaattgagaagatttttgatttaaatcggaaaataatcaaaatcatagttgcagagcttttgagtttccttagaatgacatatagtgaacgaataacaggctgacacgtggtatcttgaccaatgagatctctctcctctctcagtacatagttttgcttaacactcactcccatgtactaaatcatagttttttatttattttcttaagaacataaatgcaattatgtaactagttctaattattaatcatcaattgtgaagggaatacatttgtgagaatattatttttagtgagcaaggaattgatttaattattcattcattcaataaatatgagaatgaaattagttcccttaatagttttgttaccatgattgtcattcttgtatggaaatttttactcaccaaaatgtaagttaaattaataaaagaattaaaagtatgttttcataatattattgaatcttgtagacttttacctttttttattttttattaaaaaatctattcaaaatatatcacaagtttggttgcatactattaatttagcatgaatgttatacccaatttaccaagtagtaaatgatcatcttggatagcatgacacattgacacatctcatagttaacttatttagcatggttctttataaataattccgaaacattaataaagtataatccaacaatgatagtaatgtttataaattaaggtattttaatattattgagaaaattacatctgaccagctcgattatatatttattattgagggaatgaattagaacaattatctcgactaacaataatttaattagttaaacaactcaattacatggagaatatggagatgcatattggctaagtaatttatattatctcaaatatgtacaatgtggccattatacacattaactcataatctcactcacatatgagagctggtaaccaaaagtgatgtctataaaagatctcttgttaaaaaattgtatctcatattgtgttgcactaattaaaatttgacacgtcaattaattttttatttatgaaaaaattaaatctttaattgagtcaacaaaatttattaacatatttaatagttgatatatcaaatttttaattaatttaacacaataacactagtttttaataagggatcttgattcataaataggaataaaaagactggaagatatgggtaacagattttgcatttattaaaattctgcccaaattcatattcatgtgtatagtcaatatgtgcagtttaagagttcatacaaaaatttgacacaaattagattctaaatatatgcattaatatttttagagttaatctcacttcaagacaaaaggacgctgactttaactttattctagataatctcacttcaaaacttcagggatggaaggctaagactttgtcaaaggcgggccgtgcaa

SEQ ID NO: 78970 - DNA, 5186 bp, Cannabis sativa
ttataggaaaagaaagtgagattagtctaaatcgccaagctcagactaatggtgtgtggcttacgagattatatagcactctacaattgttggcatttggtctaatcatattatttgattcatcatatcaatatatattccgcgaagagttctaaaaaagattgagcttagatgccttatatttacatgcaaagcatacaaaaccagcacatatctactgatcattaaattgaacaagactcgatcatgaaaagaaagccaatggttatggtcatttcaatgtgttctgttatgttcagtggtttcaaactgagaaaacacaaaacaatacatgggtaactttcacgagtaaaactactaatgtttcatcccaactggaaaaagctttgggttacccaaaaatacaaccaatggctaacagtaacacaagagaacaaaaatatacagctatttagaggacaaaaaaagctatttttccttttcaatctaaggaaattaaactacgaggaagagataatggatcgagctcccaacatcctgcaaggcggctatctttctctccagtatgttgcaccgcaggaatttgatgcgaaaatttacccattttgtcgcgcggtatgtcaagcaaaccagtttttgatctctggatccttggagccttgaacattgatttaaagccagcgacttgaataagaatagcaacttgaacgctctggtcatgttcttccatcacttccacaatgtcataatcaatatccagcaacagcttagaagtctgctcattgtgctggttcttcaacattgcccaaatttctcccttacgagggtaaatttcatatttattactactagctttgacattcaaacaatgggagaatgctgaaagtggaaagggcttattaactccacttttaacttggaaggtcccacaagaaactgactggattgcacctttcagtgtagagcaaagctcaagtaacgccacatggacctggaattcaggagtagtctcgatccttgtaactttagcataggtcttgggaaacacattctcatcagttcgcacagcccatatctgaccatacttaaagttttcctgggacctttgctgagtaaagtcgcagcattcctggaaaaagaattgtttttttcactctgttaccattgttaaactgagcacgggatgagctgtcagagttctcaaccttttcagagtttgaatgatggtttgataccgattcacttttcttggttaaatccctcggagaccttctgagtttaaagtcaatgtcatgattgattccctgcttcattggtgtcttaatcttctcatcagcctgaggtacagtggcacttccattggatgcagtaacactaccttggtttatttcattcttaactgtgtctacgaaagtgctttggctcccacttgctttatcattgccattacacttccctggagactttctagatatcaaagtttcacttttggaattgttttcggacatgccagatacagggagctgatcagcaggagtgacattattatccattttcacatcttcctcgtcacaaaccttgaagaaactggggggtaaagaagctggatcaaattcataagatcctttaggaacatcttctctttcatcacccgtcattctaaaagagggaattcgatgagaaaatctgtatagctcattaggtggaatttgaaatggcgcagtttcattaattagctgaaatagacaggtaaacccttttactctccctaaaaatgctacagaaacaccagcaccttctgtaaaatctgactgtatctctacatattcatattgaaaaggtaattgctttttggggtcagaactccaattaatatcccaattctggaagagagcccaagtttctccctttctaggatatacaaaacgaatcaattgggtaccattcatggagtacatctggtgtgaaaacatagtgagatcaacctcgtcataacccttcagtttgtacctgccacacgcaaccggcaatttacttttaacccatttttttcccattttgtcatctggagcagactccagccagcggatctcaaatttagaggaaagaacattcctaatttgagcatagtatcttggcatggcatctactggatcataacaagcccatatctgattaacagcaaagcaatttttctttttatcttcttcaaaatcactgaattcaggatcaggacatgtaaagtgctctgaatcagatgtttcatttgccgtcaattcagaactatcatcactcttttcgcttggaaacctgtccttgtctgcaaaactatcaaactgcatggactcttccttatgagattcatcaactttatttgttccaccattaacaaaactgttttcattgtcctcttcaccagaactagatgatgtggtcaccttagacctttttgggggacttacaaaatcatcatcatcacttaaattgtctttgtaagaaatattctgcttctgtcttgaagatctcctacgattttggacttcacttaatttagaggaatcaaaaacattgttattataaacatcttcagtttcagcttcagtgtcatgactttcacttgattcctcaacaaacctcctccctctctttctatttgtatgttcagaagatcctgatttcttggacttccgttgcttagtcactggtgccttggtatctttctcgtccactttggactgtctgctaggcttagcagcaggtcctgccttcggcatttgtggtgggcgaggaaacgagtttggggatctctcgtccgagaagtttccaatatggcattgtgagggcactattggagggccatgatttggaaatggagcccgaacagatcttggcggtgcaccttgaacacccatatcatgggcaacgtagtttttctggcagctttgacagactaacagtttattcacaaaagctttataatactggtacctcacactacagaatgggcagcatgtccaaaaagtcggttgcgcctgctgatatggatattggtgagcatactgtgcgcgaggaaaattctggagattgactgaagcaccatactgttgctgagcatatgtgcccacatttgactggtggattgatgccgatggcttagttctatttacaactcgatacttcatgtcataaccggaacgtttagcttgatctgagagcaccatattagcctcgccaatcagcttaaaagcagcttcagcaccagcaaacttgttcttgtcaggatgaagcaggagagcaagctttctgtactgtttcttaatagttgccccatcaactgtctgttcaatctgtagaattttataccagtccttttcagtgcctactttcacctgggctgagcagtgaacttcacagacagccagcaattgagaaatgttctcaagatcaggaaagagccgctgagccttctgtgcaatcttatgtgctcctggaaaatcattactgtgcatctttttctcagcaagccccattgccctaacagcctcctctttgttgcactccatagctgacatatattcccaaatgcctagcttcaccacactatggtatagaactcaaatacagggtgaatagccttgctccatagtccaccaagtatccacaattatcaacctgcttcaactagaccccaagtaaaaataaattaattccccaccaatacatataaatctaatatccatttatacactttcagcaaaagcaacaaaattagcaatcatttacaaaaccacaaaactgtcaggaatattacaagaaaaagaaaaacgtaaaaaggttatcattacgtcgttactcaccagataattgagttatcagtaggacggaaccgaaaccacaactaccaaaaatcagaaagccaatgccaaagatttcacaaacctgcaattcaaaatgctcacatttgaaaaagaaaaaaaaaccagattttaattgtaaaaatattttagcaatacgcaaataaaattaatcacccaataaaatgtgagtacatgcaaccaaatataaatccgaaaccaatgagaagaagaaaaaatatgaacagaacaacattcaaaagttcaaacctcagaaatattaagcacgccagtcatacacataaacactatcaaaaacaacatccgtcgtcattattcaaatgtatatagatatacgcacatattgaagagaacgccacaaaacgttaaaccaaagatccacggcaaataaaaaccacatttagaacaagaaataaacaagacgttcaaatgaagtaccggaaacatgaaagtgttattccgagatttcgcaaaccctagaaatgaaatcaagagaggcgatgaaaatgaaaagaagagagggagttagacttacatgttggagatggggtttgagagtggagaggagagaaagagagggaaaattgaagcgggaagagaaagtgagaaaatgaaaaaaagagaaatggaggggtttagtttagatctgaaactttagccccctcactttctctgaaattgctccttttacaactgtgggggctatttcttttaacaaaatcactccaagggtttattctttaattacattatatataaactagggaggccatgtctcattatttatttatttatccaatgtatttttttttttttctctctttcttcattcttgaaaattgtgatattttatttattgataattaaattataaaattatattaaatattaaattttattatttttttatacaatttttttaataatatatgtaattattctactaaatttttttattttttactcttaataggacaaattaaataaattaataggttaaatctaataattttttacttatttttaacttaataaataataacttttagttaaacttatttattatagatatgtaccactaatattattaaatagttagtttttaaaattgtatgaataaattaaattagaattacaaaaatatatgtatatatataataattgataaatttatagaaaaatcatgattttaaaattgataccatcaccgtattctatgaatattttagatattttaatcaacttatttaatgtttttttttattttttataatcatttaataaaagagatatcaaaagtgagagaagaag

SEQ ID NO: 78971 - DNA, 1427 bp, Cannabis sativa
atcccacttgaccttccccaggcggtgtgggattgcacagcttacccggtctttccccttacggatcacgggactactgactgtcacaagggtagactgcaaggtaaacaattttaaaagggacacctcatttattagatagagaagatcactaaaatttcgtaattactactgaatttattcaaatttaataagcgttctcagcattaatattatgccttgaaaagaattcgaaccttcacgctctttagcacaagattttgagtcttgcttgtctactgtctacacaggctacttcatttgcaacttgcaaaataaaataactagaatgaccacctacattacatagcaagatgcaatgcttgcttttaattccatggttttaaataaatacgttttttcaatcgaatcaaagtcatatactaaaggcagtgagaggggtgagtgaaaagtcggcatagacagagaaggtgtgtctagaatctaaataaaaaaaaataaaaaataaatttttttttattgattttaaaaatacaaaatttatttttaaatatgagtccaaaattctctttttacctatggctcaccaaacttaaggatcggccctggagaagggtataagttcaagacccctaaggtggtatttggtttggtagaatgtaatgatagtagtaatgtaatagaataaaaatagtaatagaaattgattacgatatttagtttgttgttggaatgaatattgtaataagtgataaattgacaaaattatcctcactttatttttaaatttatataaagaaattgtattagaatcattttagcttactttatttagtattaataaggtaatccttgttacatagctttttcaatgtaatgcagattcctttatataatgtaatcgtcattacaattgtaattcaattacattatttttaaaagcaaactaaatattatttagtgattacaattccattactattattatttcaatagactaaacatgacataaattattaagtgatacaattatatatgtttcgctaaaaaaaatcatatattatgagcgtttggtaatacttttttaatcaattttttgttttttaattaaaatagtgaaaatatttttaattaaaaatatattttataaaattatttttacttttcaattttttaaatgagaatcaaaattttaaaattttgaaaacaaaaaaaatcgatttcacaattttttaaacaatttttttttcttaatcaatattttggactcttaccccaacttggactttgtaacccagactccggcgccagtcgcagtcctagtcccagactcagaccacggctccagccccaaacctggacttggacccgacttaaattaaataaaaaaataaaaataaaagttatagagcacacttctatttttt

SEQ ID NO: 78972 - DNA, 3093 bp, Cannabis sativa
aagacaatataaataataaataatttaaaaaagagatcattttgctataaattttgaaatgagaatatttactaacatagtatataatttgtagtcatttactataatttccttttagtttattttgttaaaaaatattatatttagtagcattaagtttaatgccatatacatgtaaattttttattttttttcccgtaattttgtatatagcctaaattttattgtgtgaataagttaaaggatttaaattgtggttgttttaaaattttagttaaaattcaatttttataatataaaaagtttcaattaaagtcaaatttttaaaaataaaagaccctattttttagtttcatcctaagccccttaaaaacttgagatgaccctggatgcccacactgggcgtgtgtatgattaatccccaactctagatattgtttttgaataaggctatgtgtagtgtagttcgtctactcttcagtttgttctcaaagtaattgatgaaagagtcacatttttggattaatcatactttaaatacatgaaaaatactctaccttcatgatacttgctagttctcaaattgggcaacatttgaatgatttatatggtttaatcccaacttgttgtaagtaatttgttagtagggaaaagaagcacaaaaaatacaaaagaattgactcttgtatattctttaaaaacttgtaataaatatgtagtattagcttacattctccaaaaaattggagggtaagaatttggtgcaattcacaaatgtcatcctttttaaaaagaaaccaaaactatctgagcttccttataggcagtgcttgtccgaaaagattttctacttcatttgcttccattttcagctgttctaataattcagtctcttctttgcttagattttttaagaaatactcttcatcttgttgaagcaatttaagaccctcagctaacctttgaaataatgtcatttcggttcgtcccaccttctttacttccccttctatttgctcaacttcctctacaattgtcctttcgccttcttctatcttcttctctagcctctctactagaggaggttcaggtccacaagtattatctgttttgataaatgtgctgaagtcccggccaacactctttgctgctttttcaagttcaggaacaatactttctggtaatgttgaactccttgtatatataaaagcaccaccatagccatcccaagcatcattcctgccgcggtagtatacaaatatgtaatcatctggtgtattttctatcttggatgatagaatgtacctgaaaatatcacattgccaaaactcatgacgaagaaaggaagaacaaaattgtttttgcagctaatcaagaaccatgtggatatgaatgaattaccaatcatcttgatagtgaaggtactcattgtcatggttgtatagtattccaggctgctgaggatcttgaacaaatctctgtgtagccgttcgagtgaagaagccgccatctggagtttttattctccaagttaaattcccaacaagtttgttggattctttgtggaattcatgcaattggcaatcaaaagcatcaaaggtaggatttaagccacttgaaatgaaccactttccatcaaactttgcaatatcaaagcttttaacgagaacagcaggatcaggaacaggaaattctccaacatcagatttcctaggcacacacttctttcgtgacacagcacattcgttaaattcatctacaacactgttttcgaacaagtcaccacatttaatctgcaagatgaagaagcatatatgaacaattaagcattgccctaaactagtaaaaataaaagacttgatcaaaaggttgcagaactagcctggcattcagtctcatcaggtctattattgcaagtttgaagacaagcaacattggcagcgcaagatgggtttgcaatgcactttgcaagttctaccctgacacaaaaactctagtgtttgaatgaaggatagatacaaaatcacataggaacaattaaggtctactgagacatatcaccaaaacaatcaatctcattatgtaagtggaagataatgctataactagctcgaataaggctgcctttgctggaaaaatagaagaaaaaacacagaaaagcataggatacgagatagtataatcctagctactaccggctaatctagatgagaaacaacaatgtacatttaatatgattagaaaaatacaaacacaagaaattgcactgagttacctgcattccttcaataagcaagtacatgttttgagagcatcaacagcattggctgaaggaatgagcatgaaagtgcatgccaacaaaccaattactttcatcaaatgtaagtggctccatcctttaagaccatgtgatacattttcaatcagagaattcatcacttgtctcatcttggaaaaaaaaacagaataagaaattaaattaattagttatgggaatcaataacccaacattacccaagtacatgtaccaagaactacctcatctttattagcattactcatagaaaatgatgaagaaatctcctctcttctgcgaaataaaacccttgaccattttgaactcagaccacaaaagtctctaccagaagttctcaaaagcaagtatcggggcttttcactagtcggccagagcttcacaacaacacgaaagtgaagtgcctttttctggtgaacttggaaactatttcctaaaccagacctcacacaagcactaccaaaactgtcatctttgatagataaacatatagaacgagcagccatggctatggtaaagtgcttttacctcaaaaatgacctgagaaaatagctgattatactccaaataatcaagaaaggaccaaattaaatagtgtggcattgaaaagactagactgagaaatgaaatttcaagacagaaagcttacccataaaaaaagagaagaagagatagacggatggcgccaaaggatgattatgtagaagttgaaatgaaaatctctggtagtggcggagtgagtgtgagtcaatatggattgaaagataagagcaacgcat

SEQ ID NO: 78973 - DNA, 7503 bp, Cannabis sativa
  modified_base (7464)..(7477): a, c, t, g, unknown or other
ccaagaaaataaaatagtccaaaattctagcaaagagaccaagaagtccaatccataagaccataacaacacagtaaaaaaaaacagcttaggtcaatactgacaagtaaagatattaaccacaccccgtttgccagtgaggtcaaaaaaatattgacttagctctatttaacaagagaatagagctaatcaagacaaaaaaatattctgacattctctagccaggatatctggtaaagaaattgaatctataagacgataaaaaccagaaaaaaaacacaaatggataggttttcccacaatataaagaaactcacttctaccaatccatatgtttgtagagcaatcaattactacatggacactcatctactttatatactatacctcaagtcattaaaaggaacaaaatttcagcaacagaggaatacctgcatgaccatttgcaaaagatgcatgcaagtaattgagcttgaaagccatccgctattagcacatatatctatcatggcctgaattatgcgtatactttgatccaagactgactttaggtcagtgacatagtcactaattggcaattctaactgtgaaaaatgtgcctggacagcaaaatttatttatgataaggaataagcacaaaaaagaagatattcaaaacaatagaaaagtgatttcatcataaatattattcagacctgaaatagcagattggccttgacatgtggatcatcaaaccgatccttgtccaccatataccgaactttcttggacaaagcttcattgtagttttcctaaattttaagaagttgaatttggataaacatgtctacatattccatttaacaacacaaaactttgataagccagcacgaataacataactgaaaatatgtacttatatatagtgttctgttcttctctaataaaagaatccgagcaccaaattaatatcatcatttcagtgtacaaaacatgaaccaaacttcacttccatatttcttcagactaactgttggcagataatcataattgtgaaattaattttagtcgaacctagttattgtatatagctgtagaatttactttttcaaaaaaatatagctgtagaatttattctgtattgagttatataagtttccctaatcctagcatatatatataaatatatatatcttattggacttgtcttgcatctataaatttctactcgtttgagagatatacaagaaaatcattcagcacgtgttttatattaacattagtttcttaaataagtatagtttgcatgtttttagtaacaggtttcattccttcagtcatatagagtatgagtatataactagtttccctatatccgtaatttgacaacacacaaacttctaattatcaaataaatgaaaatgagacatagcaatgacaaattatatcttgtcacctcattatgccgcacaggaagctcattgtattcagacgcaccagaaagaataagtaaaaacacctgcagcaaagaaaatgtctaaggttgaagtttgtcataatttgtcattacaaagatctttaggaacggcatattacttcaagtgacgtgtctggacctatgttcgatccaaacattgatacagtcatgtaactcaggtaatattgagatgctatagagcccagcatcgttggctccacactgtcttcattgatcttgatgcatccactgtcttccaggtcctcaaaggttgtttgcactaacctgccaaaagagaatagttgaccaattaaataacagatggaacaaactagattccatgagtgtgaataatagttaatcaatataccttgacaggtaagaacttaaaatttcaggttccctggtttccaaaccatagtaagcaggattcatcatctgtagcaaagcattttaagaaatgggattatatactgctcgtaaaatcagaagagaagaagtagatacatgagattatacagttctgtcatcaacaaattattgttttccatacattcctctcaaagaagcttagacttctgaagttccatagcatggaagtatttctaattaaagtttagcattttgaacgtccaaatggcaaaaatttaaaatgcagaccattctttccataatcttttggaagcatgtttctagaaaatggttttgcaactgtccctatgtttctttcattgcaactatacatcccaaactcataccagtcttcggaataagtaagtccaagtaagatagtgaaccgcatcctccttatggcaaattgttccagaaactatttctgcggtcatgtgatcatgcaactgctccctcagactactctcaacaggaaatggttcatataaaaactgcaaatcacaaaattaggaattatttctgcatcaggtggaaacttgaaaatatacaagattttgtaatataatatacttcaatactttaatttcaccttcttatagaagctcttcttcggttcatgaacaagaataactgctttcccgtgctgatcatattgtggacgacctgcacgacccatcatttgcaagatatctgtgattgggaaatcaacatatctctttgttttgccatcataatactcagttccctacagctcataaagaataaatagttaaataagatttttcaaaatgaattttattcatagggagaaacattttatttcatgtagaattgacttcatgaaaagtgctaaataatagcattataaacaaatttgatgtggtcatcatcaagagaaatactcctgcgagttgcaatggtattcaacatatcagctagtcataagtatttgtcatgctcccacaatacaccaacagttagaccaaatgaagcgatcaatcttctaatgtgactgaatcgatcaacaagtcccttctacacaatttgaagttccttaccggtggttgtcgtcgtaggtgaggtgggtaattgtgtagatagttggaacttcaaattcagaaggaacttgttggaaagggaaatacctagtctcctagagctgttacaacaattggaatatgttagagtgcctaatgtgttggatgatagtagagtacgaaaaccagatgtgagtgtaagtcttctcatgcaaatctgctttcaagtattttacggcaagtccgaatcatggtgaggtgttttcatggtgaggtgttttggtctaagatcttatggaaaagtataggccctgttaaagtcaaagtttttgggtggttagtggctttcggaaaaataaatgtgcatgacgtgatgcaaataagaacaccttttttgtgtttatccccgggttggtgtgtttgttgtaaaagaaacagagaagagatcacgcatttgtttttggtctgtagcttgttcagaatttggttgttcctgttgaacgagtttgagattcagtgggtaatacctgattcggtacccctaatgttagtcagcaaggtgggtggtagcaagcgtaggaatctgctatggagaactgcggttatggccactatatgggcagtgtagttggaaagaagcaacagagtttttgaagggattgaatgttcaatagaagagatatgggagaagcttaaattttggactgccacttgggtcttcaaaaccaagcattttgaacatttgacttttttagatatgaacaaggagtagaaaccttggacgtattaggtttaaaaagttaggcttgtttgctcagtgtatttctgtgtctaattttcatgttattttcattctatttgtttaccaagattttcctccgccaaaagtgaggatatctatatatatatcggggggaggctaatctaagacaatggcctctttctctttttcaaaaaagaaataaaagattgtttgaaggagcagaagatagtgcagaagctttataagataaaatggtgttcaatatgaaagagtttagagatgttcctttctctgatttatgaagagattggcaggtttcttgtagtgttgtcgtgctttctgaactttcattttgttttttttttatgttcactgtatgatgggtggtacaatctttgtgcacctttctacctttgtatcattactttctttaataatactagtagtgttttgacaagataaggtcagacaagcgacgaaatataaagtatgatagtgatgtgagcatattctacatgcatcaggacagaaagaggcaaaatcttttcacaaactagagactattctggatcaataactttggaactctatctagagcattcatccaaacattcaaaatgtgcatgattttttttctcttttgtaaagtaactactttgcattaagaagtaacgatataaaaactttaggaaatcagacaagatctccaagcatgtacaattaaacaaattaacaaaggaaacatttacacgaattcaaacattcttacacaagaaaatttcccaccctataacacgtgaaaataagtttgtgattgtaggaaaattgtctaaccttgataataaccagatgtgccggaagatttacaccccaagccaaagtactggtacaaactaaaacctacaatacaatactaatgccagattagtgtaaagtggtacagcacaaaatgatagtaaaagtctaaaagatgacatcagtggataattaacaaaactgcaggtgggagagaaatgcctgaatcttattgtttgaaaacaattcctcaactagagatctatctttgtcattcagaccagcatggtgtaatccaattccaaattgtaaggtgtgtcgcaggttctgatcagtaacctgtgatagtaccatctgaagtgcttcttcggccatactaagaaactgcctgggttgctcatccgatgctgcaaacttaaatcacaaacaaaagtaattggtaatggtggtggaattcttacaacgcccttgttgaaatgagtctcacctgaatgaggtccaaggcagtaagtcttgtctgtcgacgagatgaaacaaatattagaactggctttgtagaagaatgtgtgcatattgcagcatacgctggtttattcatactgttcatccttgggcaatagaactttccaggatatcccttcagaaaacaatcaagaagtaccatgagaactttccaaacaaatgtataatagaagaaataaaaataagtacaatcttggaggaccaaaagcccaccaagaaaaacaaaaggcatgtagacaaagccaaattgggcattattctacctggatatttcaaatgaattaatcagttgatcatatttttccaaacctgaggctgttacttgggatagataagtataatacatgaaattagagtctatttgatccggctgtaaatccaaatttgcatttaaagatgttagacaaaagggcaattttataattatgttattatctaaggattattttataattaggaattattctttctttcaatcctattaaaataaggtctatcctatcaatcttatttacaaaaggattctagagggctgtccttcattattggattatttgtttaattaaatatcatatcttttttactcaaagcccttcttgacttgctctaaaaaatgtcctactaacatagcttttaattcccttcctaaagtttagtcctaggaataagagttaaaattgctaatggatttctatccccagattttggcacattaaacacagaacttggtcccaaaatatctctttgttatgttcttcatgttccacaatttgttagcagtttgctttctattaataaatttaggaaaaaatacggctataaaatacctaaactttgtattgatgaatattttaacttcttcttttgcagtaaaataacaaaacgttacttattcttccatttggtacgtagcaatccttaagtgttaccttcaaccaaaaaatctgtggctaaaatgcccaaacactatgtttcttttttcttttgttttgttttgttttttttttcttttttttgaaagaccaaagactatgtttacttacaactaaataccagtttacgtagaaagggcgaagaaatggatctagtagcagagaagcacaaaagggggaaaatagttttaagatataatttttatttaatctttatcaaaattacttttaggatttaattttaaattattttcttcttaacttaattaacacaaattatttttgaatcaatcaaaatatatagtcttaataatattttataatagaaaaatttatggcataaatactatatgttttcaattttatacacttatataccatatttcttttcgacaaattaaatatcaaacgttgtgttttaatcccttttgtcactaccattatgttaaatgtgaaaaagtgtacacgtgcaagaccttgattaaatcttgtttgttttttttagaatgtttagtataattaaaaacttaatctctaataaattaaaattaatattcctaaaatatctttaatgaattaaaataaaaaaaatattacgtcaaacccataactcaaaactcgaatccccatccctctttacttgaattcccaaatctcatcttccaccatcgaactagacccaccaatgacaaggtcgacgacgaaccagacgaagcaactaatatgaaccattcgtcgattaagtatatatatgtgtgtagagagagaaaatatgaggatatatagagagagaggtgggaagctgatcaaagattctgtgggtacagttaatttttatttttattatttgacagttactcacaaaccgtatatcgaactcctaagtgaaatcaactgagttgaacacactcggttattaaacctgtgaaccaaaaatatcaccatatctacacaactcgttcttatttttatatccattccatcccaagggtgattaacataccacttcttcctcatcatcattaccgccccatcgtaatcgtcatctttgttatcatctaccaccaaatattcatctccgtctggttcatcgtcaacctcatctttctcgtcatcagtggatctggttcgccggtaggaaatgagatttgagagattcgagcttgatttctgggtttagtttaagactaagtaataaaagatataaataactaaattcaataaaaaataataatcaaatcgcaccatctcgataataggcgaatgtctttttctcgcccgaaattgtctgaaattattcgtaataagatattggctacaattgaaaatgtctcatcaataaaatttccatttattcgagatctaaacataggcagaaattcattctctactttcttttaattatctttcgtgagaaaataaaaaataaacccttcacttcaattggtatcttttcacaaaaagcaaacatgagattacaaatctagcctttcactaagatttcgaatagctatgctgaattcaagttgattatgttttgcctcttcnnnnnnnnnnnnnnatcaaacaattcccaatcatggtcct

SEQ ID NO: 78974 - DNA, 4555 bp, Cannabis sativa
atgtttcaaacaccagctctcaaaatttaaacttataaaaatgatacacagaagtaagaatcagttctaatattattagagaaacaataatgtaataaattttaaaattaagttcgagcttgcaaacttgggagtaaaagtaaatcagcactagcagaaattttacataccgcattcagtatatcagggaccctggactctcttgtggcatcagttgagttttgcaaaagagcctgaaaaccgaaaagttaatatctttcataagaatggcttttacaaggcatattttaacagtatcaataggagcagaaaataaccatttcgaaatttcgaagagagatatgtccttcgtcagaatccaatagcctatattgtgctctaagatatactagttcatcctctgtcaaagctttggaaagagcctgaaagcatgagaaaaaaaaaaggattagagaacagctactataactattttgggaagaaaagaaattaaaaatggtcattatttactaacaagaaaatgatagtaccttaagtgctgcacgtttgaagggtgacgcatgaagatatgatttaactaatttgtagatcaatatatccaaagggacagggcgggtatcactccttaaccacagatgagctgcatgtgaagaagttgattaagcttaaaaattagaatgagtcaaaatttgtaacataaaaacaactataaactacaactaaaatctagtttaccaaatactaaataatgtaacataaatgaattacacattgctggaccagttttagtttcttttttgcagtataataaagctcagttataaacagccaaatagctcaaagaaatagcccagcaacggcatcaactttctcttggatgtggggaaataatacattataccacagtcaccataaagagaaagccgaaacttaactagtgaacatcttgtgactgcagaaagcaatagagaagttaaattacatagagcttggacggctgacatcctttttctgtaatccttgttcaaaagtctctttacgaagtctttggcctcttgggacacagaaggccagggtaaatcgtcaaaactaggatctgctcttagtactgcacgaaaaattcctgactcggtccgagcccagaatggacggcttccacacagaaggatgtaagtgataacaccgatactccatatgtctgcttcaagactatatgatctatgaaggacttcaggagcaacatagtatgcacttccaacaatatcattaagtctctcttctgcaacattcaaacatagaaaattacttttgacttttccttcgtgctagtgtaaaaaaaattatgaaacatttgctcaagaaaaaaaataaaagaaaaattggacagtatgccactcttatctgcaactggtagcaaagtaatcacctggtctgataaagtcggaaaggccaaaatcaataagcttcatatcagcatcttcacgtttagtagcaaaaagaaaattctgtaagcaagagtcggtaacaacatcataaagaattagatacattagagtgctaactatctcaaattcaaggggcaacataacaacctctattaagtttgcaaacacagatcaaataagtcataacaataaggcaagtgtgaagagcaagaacctctggcttcaagtctcggtgcaccacgccttgaagatgacaaaatgcaactgcacttaaaatttgaacaacaataacttttgcatcttcctctgcatactttccacctctgtcaagaaagatgaatcgttgaatctacatagtaattatttgacataaaaccaaaacaaacaaaaatactctcagaaaggcagagaataaataataccttgacaaaattctgtcaagaagttctccaccttcacacaatctgaggaaaaagaatttatgctcaactcactgaaatattggcaatgcaggaaagcagaaaaaattgtaatataaactatattaaaaagaaataaccaaatatttgtaaaacagtgccacagataccattccataaatagtagaaatgtagtgttaacaaagctgagcttaaatgtatgtgaatgaagagcaaaatatacatactccataactatatacacgttgttgctgtcttcatacgcatcatagaattttacaagattcttatgcccagataaagctttcaatatcttcacctctctacgaacatcttcaatggctattgctgttgtcatctagaaaatgaaattttaagaccagattactagaccatacgatatagtacaatagaaaaccaatataaagtttctcagaagcaagaattgatctatcctgaaaattaatagctaacagctaaaactatgtgcaataaatagtcactttccattactaataattcaagaaacacaattccaattgtcctaaaacaagagaaacaaagaataaggataaaaacattcctaatttatgtaaacaaaattgagaaccaataatataatgaaaaagcatttatagcatttcctacctttgctttggaaattattttgactgccacaggctgatctttgagctcgcctttcttgcccctggccgagcatgtatgaccaaaatgccctctacccacttccactccgagctcatacttagccccaagattcttgctatacccaaaagtcttgttcagagactgttccggctcaactccttcgtcctcaggaattgtccccggtttgggttttccacgacccaatcttttagccaacgatgccttaatatgcttagccggagacggtggcgcaaacctcatcttaaagaaccttcccggcgtcgaagacctcgccggcgacggagaaacccccggcggcaaaggactagccgaaaccccatgcgggtatggactaggccagggactcgggttggaagaccgagctggagtactgctcttgaaaagcccgttccatccaccgccactggaacgagccggcgtctgggcccgattcggggaagagaccactgtagtagtgatggtcgtggttgatgggtgttcgccattggggtcattctcagccgttggattagtcttaccgtagcactgtcccatcttagagaaccacccacccttctcctctctccgcactgtatcggatcacgagccgagtcccagtcaaagtccacgcatcggacgacttaaaaattgaccgatctgaactccccaccggaaaagggtatacaaaagacaaaaacaacacagagatctacggcgagaaaacgataaacaaagagaatgaaagaaattctgactcagaagctaagaaaagaagcgagcgagtgagacagagacagagacaggcgaaactcaacagttttaggctattataccctatcaccatccccacttctcaacttacttcaacaaataatcaccaccgttgattttatataatcttaaaataataaagtcaaaaccacactaatatgacttagattcctgatcacagccgttacattgtcataccaatagctggaatttattttaagagtaataagtttcccactctctctgactgagtctctgacctctgtgtttgtacttctactacaaaaacaaagctttcttcatttttgtcttttgttttttctttttttttttcttgtaattttcaaatgaagaaaagggcttttccgaaacagggatgagaatttatcctctgctggttgatgtatggcttgacgtatgtagctgctcaactacccttccgttgaagtttgaccgtgtataggaaccggtagtggattaccaaactgcccacacctggacgcgtggcagcataagaggatgtacaattaggattgtaattgttcagggtcgtatgggagacaaaagtgttatgcctgaagtggaccgaaccgaaccttctattaagcctataatctagtacatgcaagtgtagtggatcataacagtgacgctactaattaattttataataatgtatagctgataaattcagtgttttgtaatctatggtaggtttgataattaccctatatctatttaagtaagatttttgttgcctaaagtaataaaaatgtgtaatcatttttagttaatgagcaatgaagctgtcatgttcacagttcacctactatatataggaaccctactcaacccaactcattatatttggtcacaaactcatgatattgacaatctggagatattaattatttttattctgacaaataccagtatatgatgtgtcattttgataatgtttaactactggggaaatgacgccactgttttatatatataaatgtttgtatatttatacgatcacattcaccttgtaaataagaggaaaaccgattaatgaaagtaaaagtaatagataatggattatggtatggagcttaattatttattcttttttttttaaaacaaaaaaaaataaaaaaataaaaaaagagtaaacgataatggagtagttcaagaatggccaatagaaaaaaatgagatatatataatttatatgattttacatca

SEQ ID NO: 78975 - DNA, 4595 bp, Cannabis sativa
gtctcttttaaacatttgtcccgatatcgattcaagctctctcccttctaataggaaaattggtgaggctttgttttagagactcaagcaagggattgaatagagttcatattccatttttggttgcttgataatgtgtatgtgttcttcttcttttatgtgctttgtaattgtgctatttattcactgtgtagtatattattaatttctatgttgatttgacaattagattacagggtcaggttgttggagaatcaattgattgtacttgtagttttgtatgttgatttatattaattatgctacttaaattgcttgatggcctcttgaggctattatgactaaactctttgagtactttgttctcttaatctattgttttatagtataaaagaaaaaggaaaaatagtatctaaatttattgtattagagctaatatttttgtaattgagcttctttcaaaatataataaaagaagatgaagaagaaagtaataactagatggaatcattgttgtgctgtgtttatgatttttaagccacttatttattttgaattgggatttaaagttattgtttttttttttccgattgtagaaagttttctatatctccttacaaccaaaaaaaaaaaaaaatgttataaaactttttaaaattatctttaaaaaagtgaaaaaaaaaagatggttcaggcatacttttacatgttaactaataacaactaaaaaaaccatgctttaaaaaattccctattaatcattaatgttttcaaaagataattaatgatttttaatgatactctccaaagataattattttcttaacattattattgggcagtggttagcatctgtagacatgttactttgtaattggctagtgatatttttaaaaaagttattacattaaattatatgagatacgatatttagttggactaatagtgatattgacacgtaagagagatactattgatgccttgtagcatttctcttattttcttgatcttcaaatactacgatgctttttaatcggtatgtttgtgtgattcctaactcatgtctttttcaatcatttttataaccaaaaccaaaagtactatttctcaaaaaaaaagaaaaaaaaaagaagaatttattgcgaaatctttttatattttaatttttacacttaatcttcttatttttttagtggtaaaacctccttaagtttatttttctttataaatttaaggtgtcaattaaatattatcgttaaataccaattgaattactactgtatcaactttgagattttactgttacatccaattgatatttaacgataatatttaattgtcgtgttaaatttataaagaaaaataaacttaaggagattttgctaccaaaaacaaaaaaataaataaaaaagactaagtgtataaaaattaaaacataaaaaaatttcgattgataaataagtttgataagttacaccattaccaagtacttccttccatttgtttataatctcaataaagaatgctgtgaaatcaaacaaataaatcctgccccaaactcttaaaaagagggaatttggttaaaagtataaactatgatctgtactttaatatattcttctcaaacttcatgaactgttttatcaaattttaccaataatctttgcaagaacacaaaccatctttaaacctatgaaatcgtgctcgatcgcgcacaataatttcccggttaaaaatcttcgaaatgagtttgattaccatatgacaatccccacatattctaaggttcttgatcacttgaattggtgttccttcacttgtactaatcaaaccaaatgccactgccaatttctcactatgatgactcaaagcattctccttctcttcctccccaatatcatgcaacacattattagtactagccacatacccaaagcctctcattttcaattgtatctcatctatcttaccataaatttcgcgccatttcttgtggctttgatcgccattaacaaacttatgaataacgccttcaacttccgtgtagctaaaacccggtatcttcctcacatcccttttcttcatagcttccctaactctccctacgtcgtcccatcgcttatgagcagcataaacattcgacaacaaaacaaaatcgccacaactactagaccccatttccataagcttctgcgatgcaatttccgccatttctacattcccatacgtcttggaagcaccgagcaaagtctgccatagcacaacatcaggcgaagtaggcatcgagtttattatttcatacgcttcttcaagcctcccggctcttcccatcaaatcaacaacactaccataatgcttaacattaggctccaaaccgaactctaccatcgaataaaacagcctaacaccttcatccaccaatccaccatgattacaaccacacaaagcaccgagatacgaaactgcatccggttgcacaccaccggattccctcatttccccgaaaagctcaagagcttttcgggcattaccatccatagcaaaagccataatcattgtgttccaagtaacaatatttctcttacatttcatagaactaaaaacctcataagctttctcaacaaaaccacatttcccatacatatcaataacagcattacaaactatcacattcccatcaagcttctccatcaatatatactcatgaatctcttctccttctctaaaagcccccaattgagaacaagccgaaagagcacccaagacagtaacttcattgggtttaaaaccacccaattcatctctcattctgttaaacatagctatagcttcattgggtctattcccttgagccaaaccaataatcaaagcattccaagaagcaatatctctcttacacatttcatcaaacaccttcctcgcacaatcaatatccccaactttcgcataaacatcgagcagagtagtcttcaacaacatatctgaaccgaacccgaacctaaccagaaaaatttgcaagataatcacattgaatttacactgttcatcaaatttatggtggcaaaacaactataatggtctctttatagatgcatagtcaatttttctataaaaatattacccttctacaatttttattcacaaaattaaaattttcaaaataagaaaaatttgtcaaattgacatcatcaaaatattaaattagcaaaataaacacattaaatttacaatcataatgcataaatttactgtcgcaaaacaaccataatagtcttttcatggaaacatactcaatttctctataaaaaattactcaaactaacatcatcaaaatattaaattagcaaaataacaacattaataattatataatacattattttttttttctatattttttacatatttacgttcaaaaattttcttttatatttttacgatattttataaaaacaatttcaaaataataacaaaactacataaaaataaaaaaaaaaacataataataaaaaaaatacaaataataaaaaataaaataaattaataaaagcataacataaaaatatataaaataccatattttctatgtataaaattatataaatcgtaaaaatatttaaattttcatataatcataattttataattttttttattatttgtatgtatttgtaaaataatctccaaccttattaactataatattacaaaatgaccataatcatctttttacagtcaaatattataatttattatattttttcgattaaacatcattattttactaataaaatattattagaaaattattttgctaatgaaatttttgataataactatttttactaaacactaacctaaccacctgagaatggagctgaacagcctcgttgcgagccaaagcacgtgcgcaggccttcagagcgaaggagcacgtgagcgcgtcgggtctggcaccggcggcgcgtgacatggtcctgaaccatgatatggcttcggtaggttttgggctctgagctaagccacgaagaacggcgttccagtcgttggtggaaggaaattgaatgtaggggaagatttgtaaagcgtaggagaggtcagcggcggagggtgaaatagcgatgagttcgatgagtttggtggcggaagttggccggagatggaatattccggtggttaataggtgggaatggagttgcttgaagtgagagtgagaaagagagagagagcttcgtctctgtaacaaggtatctaagtaagccattcctccatgggagactgtttctaaaacctcaaaacccttcttttttttccctaaagcccttaactattttaatttataagcttagtccctaaaactctttaaaattatataaaagccccttgcttttatagtatattacttaactctcctctttgcattcttcattaattcatttcatttcttttttttttggttatttagaatttttgtcatcgaattataacttgcctgatttttgtttttcatgtattattgacagtgttataagttgattcttttaacagtgtaattaattttaaaagataattaaagttttttttctttttaaaaa

SEQ ID NO: 78976 - DNA, 4847 bp, Cannabis sativa
ggttctaactgtaggtattttttttgtcttttctctataaaataataataatattttatgagactatttagctccacttacggataaacagatatttccattggagttggcctggtaagttgattttgtaatggtagcgtagccattattagcctatgaaatgtgaaacccttgaacagctgagagccaaaatacattccaaactttacacctcattatttgcataatgataatgagagccaaatggtttgtctcctttcctcattcagcgaccaattacattaaagtagaggcaagcctgctccaatggaatgattgtcgccattgaattatgatagacagctgatgactcttttgagaagtttactccctcatctcattggatttttttagttgtcattttatcactttacccttgaaagggtctctcataagcaccaacaaatgggatttggtataaagatggttggggaaaatcgaaatgaccttttgatgtcttgtcttcaatatcttttttttttctttttaaagatggttaaactactttcttttcttctggtttgaaatttaaatttctaataaaaagcccaataaacagctttcacaagcaaattatgcaaatttagtactttaataagaggaacaaacacacatgaggtcaaatattgagtacttctagcaatattcatctcaataatactagaagtttttgtacataaggggaatttgctaaattagcaaagctttctacaataaatctacaagcacggcatgtgtaattgaaatagagcagtaaacgggcagctgagtgcgctgcgaccaagatgctcttaagatatcaaaaaacaaaagcatctaccaatgaaagaaaagatctcaacattgactgcctttgtgtctctgtgtatagatcttacattaaagtcaaagacagccacctaatccttttgcagatagaatggaatggcatgcctaagaagagcatttctcatcttttagattttctagtgattaggccttcgcctctggcttccattagtcgtgttcttgatccatttccctgaaccacggcagtcctctccagaactgaattggtagaatctctagatgtgcgtggttgtccccattgccgtgttggactagcatgaactcctgcaggtcccaatcgagatccggacaaaatttggtctcgaagaccctttgaagatttgtatccatacatttcatccccataaccttttccttgcaagtgcctctctatttcagaaaatctgtcccaatcaatcccatctcctgatgtttgaagcttttcacttgggatacgaagctccactccatctgatgtgctcctttgtagtgaagtagtactttttcttggtgctttcccagatgtggacttcctctctttaatttcttcttgatcaattagagcctttcttgaatcacgagcagccccaagtatatgaggccagttgtagttcttgttattgttatccatgttcaattctattgaatgaagatcactttcagccaaatcctcttcacattccgctccatcaactacttcactcccatcatcatcttttagttctttctgttgcaaaccaaaacgagttgcagcaatataagcttcgagctcttcatcatttggataagtgatgccacgccctttgtccttgcttcttttagttcctaaaaatacttcaagttgattcctcaaattatcaacagctgcattcttctcctcaagctgatgttttgcttcagagagtttcatatgaactctttcctcccgcaacatatcagctagttgcatcatctccctttccttctcaacctcttcacaaacttttgcagactctctctttagttcctctgcttcagctttatcttcatcaatatctctggctaattcatcacaaacttgttccattatctctctagctctcttttccgtttcaagttctttcactaccttaagaagggaagactttgtctctgacaattcttttccaagttttttgtttaagctctcggatcttcttctcagcttcctctccacctctagctctcccactacagattcaatagcagcctcaaccagttcctgctccttgtttttccatgctgccttttcttcagcaaaacacttcataatgtagttaatctcattctgatcagatcggtgttcttgtataaattgattgacctgcatacgagccctctccagctcagcatgtaaagctgaaatcagtgacatgcttgaagaaggtctatcttcatgaccccaaatgcggttgataatttttagcaactccttagatgtcatcaaagcattactaacatctttaagtcgagtcttgacaccaccagtggatgcagtaggagtctgagctctggatctagtctcaacctgtattaataagacaatcaggcaacaagttcggcaattaacatcttctacaatttactcataaaagaaaggaaatacttcatactacattactcaatcgaaatacgaataaaaaataagtgcgaataaagatagaagggtaaccaattcacagaatcaaacagattattaacttgaagtacctccattaagctggcattgctgagtgaatccaaccctccggcatgacgttctgtaactctaagcctatgagaaacagatggagttcttctatggcgactaccagttccagatcgatcaatcctctacaagtcaaatacatcataagtaagtaaataaaatgttaatattcaacatcaacacaccatcataatcatataacgacaaagataagaaacacaaacaggatagtattgatcatgacttgcaataacatggccccaaatgattcttatttaagttttgcatctcagcaatagtagtgaacaaaccaatcattgtgatcatatcaactttactatttattgatagttcaaaacgaatcactatatggattccacgttactatacaacctataacccgatgatcaaggtcaaatatttgatttttaaaagtggggtgtggcagataaattttaaagagacatttgccaagtcatacttcatgccagattccaggacatatggcagaagatttgaattttctcactaatcaaagacgagttaaatggctttaaatttaaaagaaaatttaaaccataataaataagcctacctcggaaactggactatgggatggatcagagagatgtggaggcaaagaacccgaatgcatagacctcgacatcctctctctagctctgagctccttcctaagtctcctctcgtccgagccttctttaaccttcggcgaaggtatctcattcatctcccagagcgtggccgcaagcttcctggccgagaccggaggaagttgcttggttttaccggtgccgccttgcgaaggaggatacttaggcgagtccatgtttcgcaatgccgacgcgggagatctcgaacagcccatgagcctccatgtaggcacgggcgtagtggatccacctcttttcccaacaagaatcgctctcttaaacctgtagttttggatcacagaggaagaagaagatgccgaagaagaacaccctctttttctgattttaccagggatcattaaatccatactcagattctgccttggcattatctcaacccccaaaacctaaataaacctcgatctacaacacaattagcaaaacagtcttcggaaaatctagatatcttaacgtttgatgcatggtaattattgggttgtgattttgagaagataagaatttattttcccggaaaccaaacaggaaaggagagaaaatcgagaaagagataaacaaatttaaaaataataaaaaaaaaaccctaatttccaaacaaaaaaaaagtagagagctttgatggcttccactactactagttgtagattttgatcagtacagactgtaaacttgagcgtactgtttcagaataaggcgtgtaaaggtctaaagcgaaagtgaaaacatatgaaataattctctgcggtcgagaccatatgaactcgacagcgtggccataatcaatgacttctgattcgttagaatctcccgccttttttactaatatccgttttttttatttttggacctatctggtggcgccattaacgactaggcatatgtgtgtgaaaatcaggcgtaattaaggcttaagacaatcacattaaagacatttttgagggaatattttagcggaaattgggtggaatttgggtcccattaaatcaattttttgttttaaaaaaaatcaaattgggtcaaatattgaataagataaaatttagtcaaattcattgtaaaaatacatcatgttataataatgggaattttaaattatgtataaaatgtgaccaatcaaatgaggtataggaacttataacttattattattgcaaagatataatttttttttatgaagaatgaaattcattaatcaaatacatgacaattaccaacaattgcaaggcaaacgactctactatcttatctcttcttcagaactttaattcactgtaaatgttatattttattataataaattaagatatgtataatttaattataaaataatacaaggataatagaagaaattgattaaataaatcttataatatatactataaaagagataaaaaatttagtttagtatgcttaaatataaagtatgttattttaatatatcaccaaattaaaaataatatatatatatatatacttttaatatggaaaattagactctcttttttgttaaatgacaaaatagatcctgtatttttaaaataataaaaataagaccctgagcttaa

SEQ ID NO: 78977 - DNA, 1389 bp, Cannabis sativa
ctttctttctatcctaatagaatagaaggggaaaaaggactaacataattatctcttttttttaagaaaaaaaattatcttcttaattagctgttgatattttttcgttcttaacattcgaaccaatgtacagcaataagacaaaatcaactcttttctcaatgtgttacccaatcatgagaagagcaacatacacgtttagtcaagaattttgattgagattctcatgttcggacccactctttacgccatctttgttaacattaacgtcactctccactgctgactcaaaagaaaaacaccatacggaagcacagttttcttccgctacatataacataacaacaaaaacatcattagaaaacgaagaccaggcaaacaaatgagcttgctctgctccaagagaaagaagaatcagacatatcatatcatgaacaaaacatatcatttggattaccacccaaatgcagatcatcatcctcgctgccatcgccgggaacaacaaatctacggtgccctgatgaagaggcagccattggcaaaaatggatgaaacgagaagccactgacagtatctgaagtgtggcacatacaaaagttagaataggaagtgtaagtcatctctagttcaatgtttccacatcctagaagaccagagtatacctaatgcagcttggaagctcgatacccattgcccggttttaagatcatatatatgaacagtaccatcctgaaatcgaaacattaacttaatacaagaaacaatggagtattgatttgcttagggaaacttgcaatcatctcatttggtttcaattatcatctaaaattatgctcagcatatgccttgcagcagtcaagggaacaaatcaacatattagaaacaccaacgtcttaatgtgacatggctttgcactgtttcaaatttggatgggtgcaccatgcattgcataatatttatagtttgcttctgatattctgggaaatagccatgctaaaaaatgtgtcaagggtatagcccaaagaaacttgagagtaagatggtatggtggaataaaattacagctaaaaagtgtaattcatcaattaatcatagcccaaatccaaaaatacttagcaatataaaagttatgatgcttgcctgaccacctgtaccaagatgctggccttgtggttcgatatcaaatgatatccgctggttggtgtattctgatgatctatatagcctataagtaggtccaaacaaaatgagagccgtacattgatttttatgatgtgtagtaagttagtaatgtagagggtcatactattactaataaatggcataacccctaagtaaaataaaaaagttggagaaaaatcagtcagcatgtcagttaggagagaatgc

SEQ ID NO: 78978 - DNA, 1121 bp, Cannabis sativa
agtgttttattttactcaagttttgaatattatcacactttttaataattaattattctatttgtattaaactagtttctaaaatcactcacgtggcgtccctatagattagggcggtacacttttccttgttgagcgtctagaaaatggcttcatggtccttaaatagctgagttggagccgtcctcaagaaaggaattaaataggagtttggctccaggctccaaagtcattgtatttatggttaggagtctcgtattccctagctgggtagtggtaaaggccttcctcgtgagggataatcccactagtctccatgatcttggccaaatcatgcaagaattttagggtagaatgcagcccatctgcctcttattcgattgccttataaacatagtctcaaggcctccgagaacgtcagtaacgggaacgagagggggctctgcgacctcctcaaatttcttcatggactttcttactaccaagacgacccatctcgtgctactcgtgatgaaatctctaagttaaaggcataaaaaccttgtgcatggagctcttaaagctcttcacacatctgagaaaaggaaaattccaagcagtagtccccacaccaaggaatgaaagaaaaataataatgggagtgtcctaactgctcgaggagaaggcccctctagacgccccaattgatgggttctcgtgtctatggcatcgggtgctaatcatttcaataattattgaaggaatctaggaatatccaatacgtcagaatcacctccgactacggtgaaagaaagcattaaaaataaaggaggagattccgtcaaaaaaatccaataactacaatatggcatcaccaccacaaaattagaaatatctaggagtcacaattgtcctatcatcgcctatatgctactacaaaccctaaaatatttgaaaatgatattattctactaattttctttaaatcaacaagcaatacaattctatgaaagtagagaaaatacttacatggtcgtaagggtcgctattaaacgatggcaacacagatttttaataccaagctctaaaaagaaccctaaatttttttggtaaattacggctcagtgaaggtagagaggcga

SEQ ID NO: 78979 - DNA, 3700 bp, Cannabis sativa
  modified_base (178)..(178): a, c, t, g, unknown or other
  modified_base (3377)..(3395): a, c, t, g, unknown or other
ataaatttttgataaaaaaaaattataaataaatgaataataattctttcatttaaattcttattaaatttaaaatatattaataaaattaaaattatgataaaaaaaatctcacttatttatcccaccctgctggataagataaatattctcagattagctggattagttatccagncttctaacatgcccaaacactgaagtggacaaattagtctctctaatacaatcctacgtaccaaacgagcttatttgtggattgtggtatccacgaaaggaaatggaaatttttaagaataaaagttttaacatcatttttaattatttaaaaaaaacatcatttttaatttttattatataactctttaataaaattttactatcatagcatttaacagagacttcatttttactgaaaatattataattcactttctgtaataacggtttacattttagttataacaaatgttttagttataacaaatgttatttcactcattttttttatttcactcattttttttaaaaaaaaaaaaaaaaattaaataatctacagtattaaaaaaatagttcaaatatttaacaaattttggacaacatctgtcaacctaagtgcacaggaggcttgggtttcaggagattcgaagatatgaaccgagctttattagcaaaacttgcttggagcgtagctaatggggaagagaagccttgggttatttctctgcttcaaaagtactgtaggaattagaacttctgggcagtacaacagaaaaatggcgactctattctttggaaaagtattttggaaaccaggaatattgtggcaaaggggtcctgcagtttgatgtcttctgggagatctgtggacttgtggaaccaaccctggattccatggatgcaattcggcgaattcagggaactcatgtccaacttacattcccaatttcctagtttttcaaaggtttcaaacatctctttgggtaatgagtggaatgaagacatagttattaatgtgtttggggaggacttgggaaggaaaatattggcgattcctagacttctaacttcttcctaggactgcattatttggaagagtaatggcaatggtgttttctctgtaaagagcgcatatgtgctggatcaacaacaccgtttcaatgagacccgagaaatttggagttggatttggaaaccgggaatacatcctcggttggcgatgatgctctggcgtgtactatgtcagtgtatcccaacgaaaaataagctgccatttctgaatgataaagaatgccttctttgtgatgtagaagtggagtcttgtgtccacctctttaaggagtgtcccttggtccgagcaatttggttctctttttctataccctgccattcgatccaggttccaggaaatgatatgcttagttttttggagaaccttattgaaggtttgtcgggtaaagatggttgcatccattttttctgagatctggtatgtgagaaatcaaaacaggttgaaaggcaagatagaagacagcaaagacattctttttcgagtacagaaaaaacactgtgaattttccctcactcaccaggagactcacagcttagtgcagattaattggaaggatcttctgccttctaatttggatttccctagggtgtatatgatcactgatgcatcatgggatagcaatatctctggtctagcagttctgttgattaacagaatcaatgcaaagtgggaagtaaagtcgtgtaagaaagatgcgttctctgccatggaagcagaaaccaaggcgattttaatggctttgctctgggcaaaagaagaaggaattgaagatatcaccatcttttctgatgcacagttagtagttaatgcttttaatagctcattgtgtcctccggattggaggttcaaggatgtatcccttcggattttagaattgtttaagtctttttccagttgtaggttaatttacatggattcttaataaatgagcaaagtgatcaatctttctttttaaacaatcataaagataatcttgtaacttctgtagaaaagatgcagagttacggatgccacaatttcactatatattatagcttttgtaatcttggcttaaaaagattagtttgacttagaacagcaattgatgaatccattttacaacaactgtgattgagagagagagaatgagcaattacaccatgttgtaaaatttcattccattgagagagaatgagcaattatgtgataacaaagaacaaacggcataatttacataacaggtccaaggcttttgtgatagagctcaactgcttcaagtaaaacattttgtgcagaaatagaacggaagatcgaagatgactcagtaaggaattggcacacgaacagatggaggcccggatttcatgtcctcgatgataagattcaagagagcctgagcaattgaaccttctgcacctgtaacaaaagcaaaagctagctttatgttgttttgtatcaactttgatactatatttacaagcaaataaatcaatgtcattgaatttgagtatatatacataaggaagatgttatgggaatgttttgaatgtagaggaattcttaccattaccaatgatctgatcatcccattgtatcacaggcagaacaagtattccactgccaataagcatcatttcagttgaattcttcttcccctcttctacacttacattgcctactcttactccccgaagctttccctcactaactagccgttcagcaagagtcaaaattctattagcagtgcaaccacttagaattttatcgaaattaggcattaaaagttcattctgtttagtgacaaaagcaacattcatattgggaccttcagcaacgaacccttcgttgtccaaccaaatccccgcgaatgcaccttgttcttcagcctccatcttcgaaagaacattcgggaggtagtttacgctctttgttgttgcgaattgtggaggctttattggaattgaagatgttattaccttaattccctttgaataagaagaaggggattcatcttgaaacacaacagcataaaatgttggttggttgcaaccagatggagacaactgaaaatcgccaggtccaactgagagccaatattttaaagatccatttctgcactttgaggcactagctgtctgtatgagtattcttcttaatgtttgttttatcaaatgcaggggtgattttggccattcctgctgatcttattatacggttaacatgttgatccaacccatacagatatctgcatgtataaaaaaaaaagctaattaggatttttgcccctgaactttgacacgtatcaaatcatgccccctgaactttnnnnnnnnnnnnnnnnnnnccctgaactattgagattgttggacttaagtattttttttcaatttaagtaaaaaagtctaacatggatgaaagttcaagggccataatttagtacatgtcaaagttcgaaggacatgatttgctaaatatcaaagtctagggagcatgatttagtacatgtcaaaattcagcatcaaaaatcctaattagctaaaaaaaaaaaaagacacacataatgaaatcattgaacaacagcttggaatttgtgtgtctttgactaaactaacccttccaccatgacagcagtgtcaaaaacaccatgcc

SEQ ID NO: 78980 - DNA, 5863 bp, Cannabis sativa
  modified_base (5804)..(5810): a, c, t, g, unknown or other
ttgcctgacattgtcagcagatttaagcgccctagcgttgacaaaattttcgtagcaccaagactgatcctcatctgtaacattataacaaacaaatactactgttagcatgattcccttaaaaagtatacgattattatatgacactggaaaaggaaataaaaacagcacagtttttcatatgagtacttactattttgcttgtaggcatgatacacgttcagaagtgtgaggtgatctccatcaatgtggccaaacctagcttttgcctcatccgcagctttttgagcctccctaggccggacaaagcaattgggtactaagaaagaaattggttatcacagaggaggcccacagtaggtcagcagaagcatagaggcgagacggcaccatgtgattcatgagataatactgagaaactgcaactatctgcatcagcacttactttgaatttctatggtgcatgccgaccgggggcatgaaacctatacatgacagttgctgatgacaacctaacttgacacaatactactcttaactgtagggatgcatagcacttctctacgcatttaccagttagaggacacaatatgcacagatacccatctatgcacatgccaactcaataggctagcattagacaataatgcaacccgacaatttctgcatttctgcagaaatgactctaatgtaatgacaaacataactaaaatgaaaggatacaagaaagatacctgaaagcatggcagaaatggatagaatctcatttgaacagttgaattcagggctaacaaccagcatcttggacatctgaggatctagtggaaactcactcataatttgccccagctttgtcaagtttccttcatcgtccaacgctcccaaataattcaacacctctagtgctcgcattaatgtctctggagcaggggggtccataaagtcaaagtgaaccagatcatctattcccaatttcttcaaagtcagtactatatttgctagatttgacctcaatatttcaggataggtctgtggctgaagatcatcattaaaactcctctctgtgtaaagtctataacattttcctggttgggttctaccagcacgccctgatctttgatgtgcactggcctttgatatgggagaaaccaacaaggattcaactcttactcttggattataaacgttttgtttggcaaacccagggtcgataacataaactatcccgtctatggtcaaagaagtttcagcaatgttagttgatactacaatcttccttccaggtgggcctctctcattcagtggaggaggagcagggtcaaatatcttctgctgcatagctggaggaagacttgaatacagaggaactgctttcacaggacccacctgatccccaagaattgcaacctccttgtttattttacggcaggcatcttctatctcctcctccccagtaagaaatacaagaatatcaccaggaggctcacacatatgtatctggacaactgtccgaattgcagcctcaacgtagtccctttctggttcttgggtgtaaaatatttccacagggtgaagcctaccaggaaccttcataagaggtgcaccattaaaatagccctgaaacttttcagcctcaagagttgcactcatcacaaccaacttcaggtcaggtctatttctcaatacttcctttagcagtccaaaaagaacatctgttgccaaagttctctcatgagcctcatcaagaattatcaccttgtagcgctccaatagtggatctgtcattgcttctcttaaaagcataccatcagttaaatacttcaagactgtttttgcactgctgcagtcctcaaaacgaatgctgtaaccaacctcttctccaatggttacgtccatctcttcagcaacacgtcgagaaacagacatggcagccactctacgaggctgggtgcatgcaatcatcatctttcttcttttatctggagtttcaatatcaacagcttccaaaacaaattgtgggatctgagttgttttaccactaccggtctcaccaaccaaaatcaaaatctgattagccttcaatacctgcaagaactcttctttctgctgccagacaggcaaggtcttcctcttctcaagtatatgaaagtacctcggcgtgtaggccttgccgttccacctatttatcagactattcccggtgttattactcatcaaaccaccgttcgatttcgtgatctttgctgagacagaggtctcatccatcacgtcaaacaaactcctcttcctcttcctctccgtacccatcattcaacacaacactgcgaatgaaatccttgcagcttgagaaaagattaaagaagaaggtccagtattaggagaaaacctattgaaaaacagagaaaagattttattacttggtaaaaatgaacaaaggcaattacaatgtatatatagagtagagagtcggttaggactaactactaactataataactaacttcctataattcagtaactaacacaacagatcctaattactaatctaatacccaggccttgaggtttgatgtgtgaacgagtgagggagagctttttttgttatgaacattctacattaacgaagcgaaataaattgggaactcttcaattgatgtagtagctgaaagtgaaaccttaatatatatacacgacttctattgtttttctttttgttttagatatttttgttgcttattaacataaatgttatatatagattcttttttaaggaaaactcagcagataattttgtattattttattttatatattaataactaaaaaataaacattggttatattttatttaataattcggttatataaaattatattatattttttttttctataatatgaataataaatttactaattttgtatttcttttattattttttatgtgtttgttttttaattaatttattagacatattactatactttttaaaatactaagtgaggctagcacgtgcctagctctccttatgtcacttcatttatacttttattagcttaatttttatttcataaataattattttactttttacatattagttatagtgcaaattacaaaaatacgtaagaactaaagactaacttttaaaattgacattttagttatatatatatataagatattcattatttagatatatttcacacactatttgcataatttgacataaattttataatgactggtactactttttaaatgtagcatgagtaagtatcaatactatcgggtatctgaatcaccaacaaatttcttcagatctacgtcactgctaacttcatgtaaacaacaccacaattaagcttttgttcgtgcttaatcaaaaactggaatactaaaggtttattattgttgctgaatttagggaaatcaaagcccgcatagcatagaatctgtaatcttcttggatattgtgtcagtaaaacatgtctcagatcattagcaagtgtttgcattaattatagcaaattaagcacataaaaaacaacaaatagaaaaacatcatatacctaacagtattaagaatagtatatcatctcagattaattgaggtacatttttcattaacgttcttgtttccacttaccaaaagtgtagtagttctaccccagcccagccatgttctcatctttcttccaatcagacttaacccaactgttcttccattcatttttagtataaaagaaaagtaaataacaaaataacttcagaaaaataattcatcacacaagtacgtaaaagttagtattttacaaagcacacattaagaaataaataataaactccacaggggaaaatttgaccccaacttcatttccatcttttgagagtagattaattgaaaagcaaaatataaaatcaagaaggaattcttaagcttgacatttaataaaaagaagtagccacatcatacctcttacacaagatgcatcagcaatgatatgtagttaaacgaactttttagtacacatgcttactctaattaatagtgtaatagatgtccatataagtcctattccattctaaacagtaagttagactcaaaataagcataatcctaatcctttcaatgggatcaattaagtgattcaactatctctccacaacaaaattagattcaactaaacttaatcacatattaagtctggcttaggatagtcttttggtacaaaatatcataccgtcgtattaatttaacatctctgtcgctattttgagaatggaaactcaatcgagaagcattcagactaactgaatactcaactttttatttcttatgtagacataaaaacttagttctattaacacttgagaaagcttataatttgtttgtaagaattgatatattattaaattttttatcgcagtacgtcacaaaataaaataaaataattatcagtcttaggttaatttaagttattttcctacatcatgtttagctttgaataataattaaacaaataatatgcactactttactaatcaacatcttcatgactattataaataaaagacttggtcaacaagcatttattagaacaaaatcatatataaactttcaattacaagtgtacgtacatgatcaaaatatagataatacctcatcatttctattaattaactatttgctccgctcatctttatatatgtaattatttgtttcctcagaatatatataatatatgtgtattaactaacctccaccaattttagctcacaattcgaatgcaagtaattataaactctatccctctctcttttcaaccattcctcagcctaaaattttcactataatttttataatcatgcaatcaacaaaaaagaatatacatattgtgcatatgacatgatgagtagtgcgatagaacacctttaaaatgtaattaggataagaatcctccaaaatccaataagaggctttaaaagaataataccactgtccagtagcattagtccctcaaaatcatgttcaatacgattccatttgtctcattccaatttcaactatccctcacactctttgtccataacaagaataggaaagtaggatttattatttagttattagactgttaatttctgtttggcactaccgttatttcagttggtagttataacaactttctgttgttatctgctactggtttttacgctgctttcttgtatctctgttcattaatcaataaaatctttccttttgctttctttcatttccgcaacatggtatcagagcaaggaagttatgcttcctttcggtcttgattacctctgttcctccttctcgccgtgtcaattttcttcttctccggcgacggtctgtgtctgcattgaagaattcatctcttcatcgacacaggtttcctttcgacatttctcttctctgtgaatgttttgatctctcccttttcgtctttcttttcctatcatggctacaaatgatcaaggaatagggtcaatcgatggagattcatctcaaataaacaatggtggtaatcaaaatcaagctacaaacgctggttttaatgttcagatggtcagatcaagaagcccgatcgaggatccctccgatccatactacttgcatcacggagacaaccctggtaatgttttggtgtctcaattattgactggacaggacaactacattgcttggtgcagagctatggagcttgctatatctgtcaagaacaagttggaattcttgaatggaagaggtttcaatggttacatttttattgtnnnnnnnatggttacatttttttaagccattggattactatttaatggttgtgattaatt

SEQ ID NO: 78981 - DNA, 20981 bp, Cannabis sativa
  modified_base (1358)..(1360): a, c, t, g, unknown or other
  modified_base (1886)..(1888): a, c, t, g, unknown or other
aaaatagtatttaccctaaaaatacagagtttattttatcatttaacaaaatagagagtctaattaataacttttgcaaaatacaggatccaaaataatatttatccttcttaaaatgagagaaattactgagattcacaccaaattatggaaagaataaagctaatgttagagcatttataatgatgttataaaaagtgtgtattgctatatatttaagaaaatgtggtatattgctatattattactactctaatagtatatttaagaaaattgtgttatattattactctaaaagcgtgttaaatttgatatatgctaaaaattatgtaataaatatacttttatatttagtataatgtctcaaattattatgattaattgacatttactaaattttactttctttatttaccatattactattatttaaataataaaagaataaaaattaataacttttgtatattcttaataaaatattaaatgaccatcaatataatcaattatattttttcttattttacatcttgtgtgttggaaaataattgtaaatagtgggtcaaatatagcacaaattcattttggtatcaaatttagtacaaattttatatcttccattagagatagtctaaaaaatataggaacatctccaatagatatattatagaagcaaataagtgatacaaagatataagatatctcacttagaaaaaaaaaaaatatgttacaatagtgtgccaaaaggtaatgcaaatttggcacataacaaatgttgtgccaaatttgacaccacatttgctatgtaccaaatttccatcacctcacaattttatgggcctctcgtctccctcacacgctagaggcgcaactggtcctccctgaccgtgtccctttagcaacccaaaatgtcaaccttgcatgcttttttagctaatccgcgagtgccacgtggcaccgcctcacccaaaccatccagtcttaggctaacacgtggcacccaagttttaactattggataattatatttttacctgatgcaatttgtaataagttttaattgtgcattagtcctttcaccttcttataaatagaagcttaggttttttagaattcaatatagtttcagatagaaaaatctaaagaaaacactcagagcgctcagtgttagtttaccgttttttttaattaattttcttatgggtttctaagtttccttattattaaggtggacgatgaaacctaatatatttaattaagtatttatttttattttgattctcaaaacaatatatgcttatgatttttgcttctttaaataatttttttttttatttttaatatcacgtattttttannnttagaaattattaatgattggttctacattttattaaatataatattcattgattttatgtattagcattaaattgtttaacatttaatgcttaaaagttatgattttaaagtaaagaaaaatctatttttattatagaataattagattgattgttaattaaattatgagaatcaatataaacataaaaatttatatatacacttaagtggattctgaaatcttaataattctctcaaatatcattgaaaatatctgaaactgtcagttttactgttaaacactttactttattttgttaccaaaaatctcactattttcggatttagattagagttttaataatttagattaaaaatgtactttcttcgatctcacagaattcttatgagttcgaccttgttcttcacaatctttacactataataagaatatgtacgcatgcgagttgataaatgtaaaacgtattgcactctcgcgggatcgcgaccctttgtcccggccattgtagcacgtgtgtcgcccnnngcataaggggcatgatgacttgacgtcatcctcactttcctccgacttatcactggcagtacagggttccaaacttaatgatggcaactaaacacgagagttgcactcgtaccaacaactatatatgatagctcaaaattacatattttcaagaattttaataaatgtatttttgataataaatttataaataaatatttcattctttcatttaaactatcattaaatttaaagcatatttacaattttttttttttttttaaaaaaaaaggataaaaattaatcctatgaacatggattatttattcaaccaaatgggaaataaatattattttattttcattccatttcaatgtaggaaggcaatttaacgacttccaaatattgaagagtaaatatcatttttaaccttttgttctataaaaattatcaattcaactctctattttgttaaatgataattcaaattttgtatttttcaaattttttttaaaaaaaacctctactcaaatcttgtcaaattagaacataataataacttgattagaagcattgtgatcaaactagttacatttttcacatttattcgtaataaaaattagtttcaaatttaatttactatttttaaaaatacaaaatctaatttatcatttaaaaaaacagaggatccaaatgataaattatgcaaaatacaaggtacagaatgatatttatccaatattaaacttgtaaaatacattaattgatgttgatctcatctccaaaaccaaaacagcctctatgcctatccacttaactcaatgatgcagcaacaaaacctaattccaagtataaaatatacatcaataattcatactaggaaagttgtactctagactaaaagcaaaacaaataacaagttagaatacagcaaaaactataaatgagtttctaaatcattatcacatagcaacataagtaaagggaaagttcgaatctcccctccccaaagtcaaaaaacataagtataaggaaacgaaaacgaaaacatgtgtatgatatttttgtcgattttgccttatgggtttcagtgtcacaattcaaaaccgctaattccaaaccaaccaactttctagaaaaattaatcggatttagcttggtttttaatttgaatgagtacctttccacaatcgaagaaatttcgaacaccccctactattgattcacaagacatgagtttagctgcgccagctgttctgcctctttgtttcaaagtttgctccgtcgttgagcatgtcctgagcatcggtctccattccaagctttgatagtgccagggcctgcaagtagaatgcagttggccactctggtatgcacacttgggcttgcatggcgtctctcaaggcaagctctgcttgatcattcatcaggtacgagaaagctcttcttgcaaagacagtcgctgaaggtgcagccatcatagctactaactgtttctcaaacaagtttgagatgcaagttttagcattacaagaaagaaaatatccaacaaactcgtgcaaatcgaacaatttttaaactatctgattctcaccactcataagaccattatcatttttgtagaaacatataagtctaaaaggagaaagaaggacctttgaataatactcgattgcactcttgaaatccttatccctgaatgcaatatccccaaacctcttggtgttaagcatatcttgcacttgttgtgtccattcttggaatgaaagctgtgcatgttaagcatcatatgagcaaaacacaaagcaaaattgatcagggcagtatgaaaaagtaaatgacctgagtttcgtaagcaaaacaatccaaaatcaaactctattgtattttgagttacattcatacaagaatctttgttataatcagctttgtcatggacgaacacaagaccactagagcagccaatccattccacattaacctctctttcggttcttcatttcacaaatttagcaccccttaattgacttgagtgcatattcaatagctaagtttatcccggcacacttgttaactctactcattcactatttttcgacaacttaataaactatgtttgagttgtagagaaaccacaaaggggaagaatgcaaagaaaatacggcctaggatacctcattttcggctccctcttcatctttatagcctgttttaagcaaaatatcatgaatggcagtaagatccatccttgcacaagccttcccaaggggtgataacatagtcggaagcaagatcatatttttaggtaagcccattaaaacatgagaagccaccttcacaaaggaataattataattaataacattacaggatgcggtgtgaaacaagtcctcatagaacaaattagtggactattaggaaacataaaatttcacctctttctgcttttgaagtggtgccactgatgtgagaagaaacttagtatcaggtctgtccctagcctcggactgaagacattttgaagcaagctcaaccaatttagtcgcatcatcattctcatactgcccttccaatgatgaatctattaaacacagtacacttttcccccttattaagtccaacgcctgcatttacaacatttattttcatcatgtcaataaatgaaatagaatgtcatatcaatcacaaaatctgtttaatagaaattagtccaggaagtgaaaaaatgcgacatgaagaaaacaaaaggcaacatacatggcttggaggaatatgtttcccacttaaaaggtccaatagaacggttccataactgtagatgacactctctgggatgaccctgcctgcatatatttgactatgatcaatttcataaatatgagtatgaactttcatgtttccattgatcagaacagttatcaaagattagcatgaagaaataagaccaaattatattttcacgtgaagcgaaatagccacatgcagaatacttatttcaccagttttgcagccttaaatatgtgaaatttgaccattgtaataattttgagaaaacttacctgtgcgtagaaattcaggtggagtataagctaagttagtactgtagcttttaccatctcgactgtttttcattaggccaaaactagacaaacgagggtcgccatcctgtaaaatgttcacaacttatttgtaatccaaaatcacaataagagcttacaacctgttttgagcttcaggccataaatttgccatgtacccaattttatttgcaataaatgcagatgactagattaagaaatgtgagagattaagacattagaagctcaaactcgaatcactcatgacctgtgaacaaggcaacgacagcctcatgtaatgtgagagaagaaaagactctaaagaacagtatattcctaccccataattgaaatgtagagaagactcgaaacaacatggatctaacattatgcacacaactgaatgcgaaaagcttgctcgaaatataagtgtttggtcaatggcaaaaaaaatgttgactattttatttactagatgaaccagtggttgtaataagctcaggaatgttttaagttaaaaaactacatatgcataaatgcttctctggatctatgtaggaccacaaagaaaatgaccttgtagcttatactttataatgctataaagaaagcacaaacatgtggtacaactgattggaccacactgagaatgaatacctcttgctgaaggagcaagtcaagtataataaaacaggcataaataacaataactgcaccaggaataagtgataaatttaagcaatgaaagcaaaagaataagcttgttcatgaaagctgacacgtctgaacggttataaatgtctttggattcaaaaaagcaaaataaaaggaagcagcataattaggcaactgtactaacagaaaatttaatgacaacatttacaacatacctcatcaaagagtactctataggcatttaaatcatgataaatcttccagttttctgcattgcaatggtcaagggcctgagcaatatagtaagcaactctaactctcatttcccatggcagtggctgtttttcccctacaacaaacgatgctacaaatatcagtatgaaaacaagaaaactaaattctggacagagatgcagttaaataataaatacaaagttgaaaaaaaaaggactcaaaataaatagcaatggaagaatttacagccgcatttatgcacttagtcgatactgttatccaaacaatgcattaaactacactcatgtgagccaacctttatcttaaaagggcacatttatcaacagtaaaagtcctaaataaaaatatacttgagaagtgttaggccttcacaaagaaaaagaaaaagacagaaaagtgaaaactgaaaagacaaacttttggggtgcatttatttcaccaaacaaaaggaactaaaaacaaaagaagtgattgagttgagattgagattgagacatacaatggaagagatgcttggacaaagtatcattgggcatatactcagctaccaagagtcgttcatccccttcagcacagcaaccaatcaaattcactaatctcgtatgcctcaccttcccaactcctgctgcctcagcctgattaatcaaactcagtacccttttaagcaaaatgcaagaaggccccatgcttgtttaccaggaaaacaaaataggaaaaattaatagcttaaatctatatgaaatgtcccatttgagttcaaaaccagaagagcccagattttttttcttcctcttctagttcatatctaatgcatcacctaatactaaaaacacaaaaaagagaacaatgtataaaactcaaacgacccaattacacttctttccacaaaaaaaaaaaaaaaggcaacaacttttcttttcctttctctttcactttctcagcaaccaatcagaagaagaaaaagaaagtgtagtctcttctcttaccacgaattgttgagcatcaggccacgattgcttggagaagcgtttaacagctaccaatcgattattctgaagcttccctctataaaccacattgggagctttctcaccactctcagagacaatatagttagtactaaacccatttgtagcctttcgaagctcgctaagaccatactctttaaacaccggagttcgatcctcttcctcaacttgattctcatcagcttcaaaacccaaaaaacaaaatacccatttaacaatcaatctcaaaaacccaaataagaatactaagaatcagaaaataaaatacctgggtcgggctgagcagtggggttatcaggggaatggaggtgagtagtcttagactgaaaacaacccatatgaaagagattcactttcttcacactctctctgtctctaactctatatctcgctcgctttctctctctctgtctctacacaaaacccattgttttagagctatttcaacatcaaagcagaaaagaacaaaacttgagtggtggggtggctaatacagttgactgagtgaggagaccagtaattgaaaaatggtttgagtcacacagtgatgagtagtgagtgagtgtgttaagggtggattttccaataaagtgagtgcctttgaggctctttctctctcttctctacaaagtaccactagttacagagaagcagattaagaagaagatgaagaaaaggactttaaaatgggagagtgaccgagtcagagaaagtgactaagtgagtaagaagtgaatctttaagggtagaaaagaaataaaacagaaagagtagggacccacttgcaaaatacaaatgaatgaataaaaaggaaaagagaaaggtcacatgataggtctatgatgagccacgtgccacttccttttagtttcactttcaaactaagatataattacataacatacataaggaacaaattttgttctcttctcttgggttgtatcttgtatgtattatgtcactttaactaactgttggatcaaatttattctgtttgagtatgtattatgttcacttatatatctgtttatttaatcattataaattaaagtcttccaactaaatttatgatttgtagactttaatgggtaggttttaagtattattagaaaattaaaacctatttgtcggtttttggactgggtgggtttcaagtataaatgtgtactcttattttttaatatataattttaaaatatactttagccaattatgttttgttgaacaaggctagtgctatgtggattggggttactcctccttgtgcaagtcttgctattgaacgagacatgcttaatcctttgtaagctgtaatgtgattttgatttcaaaaaaaaaaataatatatataattttaaaataataataaaaagatcttttacttttacattatatagattggagttattctattggttcagagaaaaaaaagtttagttgtcgtgaggacttaagtaaccctatgagagtctttcacacgtccattgtgaccattagttttctggtatcttaggtctttgttttggttttgaaggtttggttttcatggcaactagaagtagtacagttgatgagttagcagcaaagaagtaatcttgcagtggaggcaaaggaagagactaacgatgaaatagtagaaactgtgaatgaaaaaaaatgagaaagaaaaggaagacttgtgtgaagaataagtcgaagattatgaggaatggatggttgaagaagaaagaccagaaggttttatagataaatcaatagtggggagagtatctgtgaaaaaaaataatataatgttaacttctgaaggacttcctttggaagaatgggaaaattccctaaattgtgatacaaaaatctataaaggagacactatgagcactactatgggttttatagttgctactagcgtggaagcaaacaaggtgatagaggaggaattatggatgtacaaaggggggatgatgatagtggagaagtgactataatcaatggaatgggaagatgctaagttggatggagttacatgctaggtgttaatagcataaattaaattggtttgttagacttggttgttataagttgttaagttcttgtattcaactaactgtcagaatgttagttaaagattttgttacaattagttaagcactcattaagtgtataaataatcatcgtactcatttacttcgatcaatgaaatacattgtcttcttcttcattttccatactctgtttgtttgaaaatcaacttggtatcagagctcacggttgcatcaatggcctcatcctcctccgatgttgcagcacctcattctgttattccaaccacaatgtttgttctacctctgcaattaaattgagacaactattttttttggagatctcaagttctccctgcaatcagagaccacaatttggaaggaatttttctcaaccagaatcgacctcaaccaagaattcgctaagctcctgaatcaacaacaatggtaagcaatcctgaattcaatagatggatgcgcttagatcaattccttttgtcgtggctaatgtcaactatttctgaatctataattggacatgtggtgaattgtgcgtctgcctctaaaatctagaccatactcgaacaattatttggaaatgcatctcaagctcaccaaactcatctgatgaatcaacttcaatcaaccaagaaaggctctttagccattgatgaataccttctcaagatgaaaaatcttgcagatggtctttctgcagcttgaaagcaaattacagaggagcaactcattctttatgttcttgctggtcttggaacagggtatgaagttgttgtcgtaaacttaacctcaagagaaagactcactcttgcagaggttcaattcatgcttcagaattatgaaattcgcaacaaagcaaatctagcacacgctaccattgatctacatggagctacaaccaactatactcaattcaagaaaaatcaatctggccctcttaaccctaatggaagaggtggatccaatactttttgaggtcatggcaggacctcctatggtgaaagacaaaacaatggtggtggcagaggctactcaaacaacaattgacttgtgtgtcaactttgtggtcacattggccacacagctcaaaagtgttatagaagatttgatatctcttacaatggtcttgatgagaacaatgccaactaaggtccaaatccacccaaagcccttgttgcttcaagtggaactcatgatgatgatgcctggtatcttgacagtggtgcctctcaccatgtcacccaagacagtgccaatcttcaacaacaaaactcctacaaaggcaaagaaaagattgtagtaggtattgattcttctttctctatagatcatattggtaatagtactttagctgcaagaaaatctctttatctcaaaaatatttatgttccagccataacaaagaatttagtaagtatttctaaatttactcgtgacaataatgtcactgttgttttcattcataatttgtgttttatcaaggacaatcactcgaggatccctcttctttagggtgctcttaaagttggcctttatcaaatcatccccaactttttcacaatgctactgattcctcttcttcaagttttccaactactatcactaagaataattccttgtaccaagcaaatacactctataccgccccttgtaataatgctagtaatactgttgtttcctcttctggttcaagaaactctcaacttgtaaaacggtggcacaatagacttggccatccaaataaataagtgcttaataaagttctcaatttcttgcatatttcttctactgatatgcctatttgtcatgcctatcaatatggaaaattacaccagttttcttttcactcttcaaataacagaactaatgctccttttgaaatagttcacacagacctttggggaccctcccctcacccttcacctgaaggatttaaatactacatatgtttcattgatgattttacaaaattttcttggattttccctcttattgcaaaatctgaaacaaccactgtgtttaaacatttcaatagctatgtagaaagacaattcaataccaaaattaaatccattcaagctgattagggcagagagtatagaccattaaaacctattctttatgatcttgacattattttcaaacatccatgtccccatacacattaacaacagggtagggctaagagaaaacatagacacatcactgacatgggtcttacactcctagcacaagcacaactacctctttctttctggtgggatgcctttgtctcatctacatatctaataaatagactccccatacagaaaaatcaatatgtatccccttatgaaaacatgtttcaatctaaactagattatagtttcctaaaaacatttggttgtgcttgttttcctctacttagaccatacaacaaacataaatttgattttagaacatcaatatgtgtcttccttgggtatagtccttctcacaaaggctatcgatgcttacatccttcaggcaaaatttacattgctagaagtgttacatttgatgaagcctgtttcccatattctgagctatttcccccaaagtctgtctcaccacctgttgttactacattacagcaaatgcctataccaactagtgcaatctcttgccctaatccaccaacaacaaatacttctgctcatcaacctctagccaaccccacgccagaaccccgacaacaacctcccaccattcaaatctcccattcacatagacctttaccaacaacaagtagctgtcatcaaagttctgtaccaatttagaacttaaatcttatagacactgcaccccaacagactaaatcccaaaccaatcctgtctcaactactcagccctcacaatcatctcatagcatgacaactagatcaaaataaggcatatacaaaccaaaagcacttacaggtgaattacaatatgaatgttatcctacataactaacatctctcaagatggccttaaataatcctctctggaatagggcaatgggtgaggaatatcatgccttaaaaagaaacaacacatgggctctaattccttaccatcatggaatgaatgttatagaaaatagatgggtctatagaatcaaactaaaggcagatgacactgttgagagagattaaaagctcacttagttacaaaaagttttcaacaaactattggggtagattactttgatactttcagtccaattatcaaagttaataccatttgaattatgttcacatttgcagtaatctatggttggaaaatacaacatataaacattaataatgccttcctaaatggtgacttggatcaagttgtttatatatatgcagcaacccaaaggctttgaagatcccagctacccacttatgtgtgccaactcaagaaagccttgaatggcctaaaataagcacccagggcttggtatgccaagctaaaaatagctctattgtcacagggttttatcaattcagtttctgatagtagcctattttccagctacaaaaattgataacttctactaatcttagtatatgtagatgatattttaattacaggtgcaaattcaacagatgttcacaaagttatcactgatcttcagtccaagtttgccctgaaaattcttgggacagtgaactacttccttggttttcaagcacacaaaactggagacaagcttctactatcccagtcacaatatgctcttgatatcctaaaaagaaccaatatggatacatctaaatcctgcactacactcatgtgccatggctacaaactttacacctcagacagtgagctattttctgactcaactctttatagaagcaccattgactccctgcaatatctcaccgtaaccatacccgacttagccttctcagtaaacaagctaagtcaatttatgcaaaatcttactattgctcactggaatgcttgtaaaagagtccttagatatatcaaaggtactctacaacttggcattatctttacacaagcaacagatctcagtatagaagcctttttagatgcagattggccctacaatttagatgatcgaaagtcaacaattaggttctgtgttaaacttggaggcaatcttatatcatggagatcaagaaaacaaaaattagtggccaaatctagtacagagtctgagtataggtccttatccactactgtcattgaagtggtttggactatctctgtcttagaggaaattggaaacaatatagttggcaaactgactatctggtgtgataatcaagaagctcaacaattggcatctaatctagtatttcattcaagaacaaaacatattgaggtcgatgttcactatgttcgagagcttgtaacacaaggaaaactcattgtttgttattacctactgaagaacaaccagctgatttgtttaccaaaccattaactctgccaaaatttaacttcttatgtcacaaactgtctctgggaacttcccactccagtttgaggggggatgttgatagtataaatgaaattggttagttagacttggttgttataggttgttaagttcttgtattcaactaactgttagaatgttagctaaagattctgttaccgttacttaagctctcattaagtgtataaataaccattgtactcatttccttcaataaatgaaatacaatgtattcttctttattttccatactctgtttctctgaaaatcaactctaggtgaaagtgtatggttttcccaccaaagttcttaaccagtgtgtctttgtaattacttttgtgtgaagcaaattctcaaagtgaagaaggtgaataacaaccttctgagaagattttatctaaatcttgcattggaaggaagcaagcactgctatcttcgagagaaattttttacaaatcttgcatcaaaatggaacaagcattcatcaagtaatttgaaaagagttcaaacatttataacttaaggagatttatttaactaataagagtatatcaaacttgcaacaaaaacagtagagagaatctaagttttgtttaagtcaattactttgtacttttaaaatctaactaataaatcttatctttgggtgtagcctcgtaaactagtagcaatttataaaaattacaaataccatatataattttgagcattctttattttatgtttatttctatcttctattgataaattacttaaacatatcaagtttctgtatctatgtaaacatttttgtaacataacaacaattaattatttaaattttataattaagttattaatcatgaaaatcgaatttaagtcattaacaaaaaaaataaagttgtatagaggaaggtggtaacaagaacaagctggtgttattacattagactacaaacccttctctaaagaagctggtgttgttgtgatcaacattactcatagtaagtggtactatacacaatggtattctatatctattctgtcacaaagagaacagaaataattaaatctgttttgcctttgtaagttattttataaaataaaacgaattttattcgaggaagcaaaatcacctaaatattgagtacttgataggtgggactatgcaacaagaaaaaatcagatacagaatcttcaacaggaacccttagaaggaatcttaaagcactatccgcagcttgatgagtaaactctcaaaatacttacatgagaagcagaaatgacagaaacataaggtaacaacctgtggaaggtagcattggaatcaatagagctcacagcagcaacctcgataacacaatccggttcttggtatttggattggaataacgcagcatgaaggtcggcccttgtctgtacttctacatgcttcacactatgctgtcaacatgtttttaagttcagaagcaaatacttgactcacaaatatacatggtgggaaccaagattaggtcattagtaaatcgtgcagcatagtttcagtacaatggaatggggatttgaaccgcttccacctccgaaacacactcacattcccaaccacttgagctagcctgaagtggcggaaaaataatcatccatttaagtctataggcacatctaacttaagtatagctattggaccttccattttatccatgatcaaaaaatcttcacttggtacaaactatattgactttttaatccagacatgtattcaactctaaaccgctgcccagaaatttacaattacaaaatactttccacaaatcttcatcccaattcgaggagcaaaaatcctaattagccaaaaaagataataaaaaattgttattttcgctctatgtatagggaatgatgtatggctgcactattacttgagagaaaaaagataaacaggggaacaaaatggaaataaaagatcttacccatgtgcaatcactgattgaaatgtcatgagaagtgtagaaagattgatttagtattctttcttcagttctttcagaaattgggagaaggctgaaaattgcacctccatgattgttattcactagaacggccattggtttcggtgatgtcctgcacacattgtaaattattattgaagaagttacaagatagtatgttgtatttgttattactagatatgctatgtaaataaattgaacatcaaatggataacaaaattaaatataatgatgacaactttaaatagtcacattctcatttcaatatatagaagatgataagagggttaaaactaggggaaatttatcaaaacataaattaaataaataaattacaaaattatatcccgaccctgaaaacagacagataagatccctacctttgcttcaaaagtgccaagcaattggtctcatgaagaaaagaaacatctccaattacacaaaggaccagaataataacacataaatatgaaactgtctataaagaagccatgtaatagcaacaaattgatttcacaatgattttctcaaaatcggtctccactaaggtcccaatggattgtccgccctgatttctagcagagtcgtgaaaaacattctataaataggatgcataaggaatttacctgttttttgcatcctactgcaacgccatcacctgcagcatctacaacctccgttgcattggagctcatctcagccattgctcatcagaacaaaaatcaggtctttatgttgacagagcaccccatcatgaatcaggattcaaaattcacttcaaagggcagaagcgtcctgcagttcgacatgatacaaaattagaacatgggcactaatgttgccaaactacaaaaaggaaaaaccttggatataatgagacttctactgtagtaagatgtctggagaacaaaactgcacctgccaatataagcttttacttgtttgtgatttccattgatgtgcagcatcatcataagtagctttattctggcacaagccagaaaccaatttgaaatcttctctgcctggggtctttgcactctcaattttgggagggcaaatatgcgatgttgcttaggaaaagttgtgaattgcattcaactgctctcaagttctagcatcaggaactgtataattgcttgtccccttaattaaacccctttgtaccaactcattttgcaattcagcagcttcaactacattccctaagtcatggtattttttcactagacaaacacataagatctcatcaggaaggatacctttctcagtcatttcatcaagccatgcttttgcttgttgcacttgaccacactccgaaaaaccccatatcaatgatgtatatgcatgaagatcaagatccatacccatttcaatcatcctgtcacgcaaattcaaagcttcttgaagattaccatgtttcaagtttccatcaattagagtggtgaatgcagatctatcaggtattatgcccttttctagcatttcatcgaacagcttctcagctccctcgacgcaatcatttttacaaaacccgtccattaaggctgtatagactgcaacattatgttgcaaaccaatttcaaccatcctagcaaaatagttagttgcctcctggaccaaaccatttttgcacaagccatcgattaatgcacaataagttacaacattcacctcaattccgcagtcatgcatttcttgcaaaagagagagtgccttcgtagtcttacctgccttaaaatacgcatccataagagtagtatatatgtaatgatttgcacttagaccagaactcttcatttcactgaccacaagctcagatgtgtcaagttcactttggctgcacaaaccccaaataattgttccatataataacaaatcaggtttaatatttttctccttcatttctttcaaagtatccatagctttctccatattcttagccttaatatacccatgaacaagggcagaataaattggtaagttgggagttagcccagccttcagcatctccataaagacttcttctgcttcctttatctttccatcctcacaaaggccatttaataaagcagaataaccaacaatattcaacttaatttctgcatttaacatctcatttgtcagcttcaatgcttcagttaaattacctgctttacaatttgcatcaaccaaagaagtataggtatattcattaggatatagaccaactcgtctcatgtccacaaaaaatttaagtgcttcttgcatcatcccttctttacaaaaggcatcaattagtgtactataagtcacaacatttggtttcaagccatggatcttcatctcatggagatacttcaaagctcgagggagttttcccaatttacaaaaactattaatcaaaacattgaaagttattacatcaggctcacaacctacatttttcatttcttcatataaacaaactgcttcctctaatttcccagcctttccaaacccatctataagagaattataagtcacaatatcaggcctcaggcccctgtgtttcatttctgcaaacatacttctagcactgtccatatccccttctttgcacatgtaattaatcattatattatatgtgaaaactgaagggttaatcccagccccaaccatgtccttgaaaaacttcttcgataagttagcatttcttgaattcgaaatcctacgcaaaaattcattacaggaccgagtttttggcaaaaccttaaacctcctcatctttaaaaaacactggtttgcttcctcaaacattcccaactcaaccaaaacactaaacaaggcatcaaaaactccgaatccaggaacacaaacattcctagttgaccacaacacatcaaaaacatcacaacccggcaaaacccagctcaaagagaccagttctttcaaaatctcactggcctgaacatacattctggcacaaaagagaatgtgagccaaaatgcaataagactcagtagtgtggcaaaacccagttcggtttccaacccatttaaacaatttcaaagccaaaaatgggtactctttcaattcaaccaaaaacttagaaacccaaatgggcgccacagccgaatgaaacaaagtaacaaacttaggatcattccagcggtcttgttcaattattttacgcaagttctccttatctaaatcttcaaggaaagaactagggttcgatttagttgaaaagggtaaacgaataacaagtagaaaactggtgaaaaaaaccaaagggcaagctacaatacaacggtcggatgataatgctggaagaaaattggaagtaggaggataataatgaaggatcggagagaaagggcttactcgaattgaagctctggaagccatggtgattagattattgcgcagaaagaaaagcatcctcaacaaaaaagaggaaaatgaagaaaaagaaaggaagagcagcttcagttggcttcatttttcaaagtgcttcgatgaatgaggagattgagattgagaataacaccatttctgcgtgttcataacgattttttgtgagtttgattcgataagaagaagaagaagaagaagaagagtgactatgttcgaaaatgattcactagggtttatgcagcggtttaagctttttatttttcttattttatttgtttttttttttaaaaaaatatcattagtaataatcaatatgtttttttattaaaaataataatcaatgttttttatggcttcttctttcggttattatactttcgaaatccacaattaaaactcacgaaaactacctcccacctataattttcgccatcttcttcttctaactactgtaccttctttattagttttttttatatcatcttctgcttctccatctccattgccaaaaaaagcttcaataataggtcataaatcagttgttaccaaggctaaagggaaacgcctaatcatcgatgatgatgatgattccgattttactcccccgtgggtaaaagtggttattgtctagtgaagaagaagtcgaaggtatctttgcctgaaaaaaatttcaacgctgacgaccagaaggggaagaagaagtcaacttcaaagcaactctaatcaaactttaatacaacagttatatctattgcgagccaactaatataaaaccacaaaacaacatatttaatacaaacgaatattacaacaatcgtgttttatctatttaagttgtgtatttgataatttcgagtcctatttttataatactatgatattgtagtagcaaaattattattcaactaacgtgtaacttaattgcaactaaaatgttaaatgtgaatgtgtatctgtaagaaactatttatcagtattttttttgtcaattacttaatgtgtggggaaataactgttagcaaaatatttatgcaactattacgaaacattaaaaatcagaataatatttccacatacataactctaggagttttcataaaaatcgaaaaaccgaaaccgaccatcaaaccgaccagaccgtaaccgaatttttggttccacgtcatcaccgaattcggcggtcggtttgggttttagtttttttgacatggcggtcggtttcggtttttgaaataataaaatagtttaaccaaaaaatcgtcaaaacagccaaaaaccgcccaaaaccgccaaaccgaaaactgccaaaaatcgtacggtcagttttatacggttataatttctaaacggtcggttataaaattataaaaaccgaccataaccgaccgattttcacccctacataactctatctacatgtctctttgtgatttaatatgaataaattcaccattagaaatttagaaaacaacaaaaatgtattaggataaaatattttactatagtattgatgtaatttttttttggattatacttgagttagattgcttgagaactccagttcaactttttgagatctgcatttcatggatctaaaaattgaagttaagacattagttttatgcaaattaaactggatttttagttgaattttaatttcgtagtagttttttttgtattttttttataaattcgaaacaactcctgttttgattgattctggtcgtcttttcaggtaaagttgccagaattaatggtggctctctttctggttgagttttgtttcggttgtgttgggttgctgggtggttgatcgaaggttttatgtgtttcaattctaagaagcgtggatcatgatttgaaggtgtgtgtaagagatatttgtgtaactttttttatttaaactgtatatttgattacttggcttggctggctgattttttttttttaatattgttacttttttttatttgaattgaaaaaaacactaatattattatcttcttaacaaaaatttcaaaaaaaaaaaaaaaaaaagcacaaccattcttccaaacgattaattagcccgaaattgaaacactaaaactaactagaggaaattacagtctataccttttttatattgtcctcttttatttttaccctatttttttaaagtctatcatttttacctctttttttaaacattgtacca

SEQ ID NO: 78982 - DNA, 5990 bp, Cannabis sativa
attatataagaaatttttacatgtaaaatataaattgtcacttttatatctaatttgaattgattaggaaccttatatttacttaaaatagaatttacattttatattgaccaatgctctctctcgagaagagccttcctgaagcaatgctggaaaagcccgaaatgatggtaaagcctgaagcacaagctcaaactgatatctccatggaagaaattcttactagaaataccaatctcacagtcctggatgatgaaggatgggagattaatgacaatggagccaaggcagcggcctctctctgtgcaaagggacgactgtgctctaaccgcccaatgagtcgatctctcctcaaaacgattctggggcgcgtttggggaattaatgataaggattggggtgttgaaattaaatgtgtcgtcaaagaatcaagcttcttggttttctccttcaaatcatctcaagatatgaacagaattttaatcaagaacccttggttcctcaacaatggaattctaattatggagagattggatgaaatcccccaagattggagttcggtcctcacaagtttccctctcacagggagaatcctccgattacccactcgatcgatcacacagatgaatatggagcgattggcgatgtttgcaggtgctataattaaagtccagaaagctgacatagccaagattgcatctaaaggttttttcaccttcaaagtctggtgtgatatcacaaagccattatgtccaggctttctatttccaagtgagggacggaaaatttggcttccatacaggtatgatcgcttacccttcatgtgttttaaatgtggttttgtgggacatgatactcgggtttgtgcagaaccagttaaattctttgaagacggatcagggaatcaaattcagggatatggcacttggttaaaggtggatgataacaaaattaattctgcaatatatgatcgtggccaacctatcaagatatctcagtattcttccccccctggttttcccactcaaagagcttccccagacgaattgattggtaataatttggggaacaatgctgcagaaagttcatccaagaccaggggtactgaggagcaacaaaaggagatgagttcagtcggtattcctaacatttctacatcggatgttaaagggaaaggccttgagaatgatttagaagctcccttcggactcctaactactaatcaaccgattcccaatatcaactctaagcctgtaggacaagataatatggaagtggtgtgcgaaaggttatataatgctaaacgggatggttcttggagagatgagggattggccattaacaagggagaatgtaatttatttaatggtctatccaatttttctcagcaaggggtcttggcgaatcaacttcacagggatcttggaaatcttatagaagtgcccatcagttatgataccaattgtgaagctctgaaaaagaatgctgggtcttctaagaggagaaagattgttcccaaaagaaataaaactactcgaaagtgtggttctactgaggcattgatggcagactgatctttggcaaaagaggatgacaatgcgaaggaaatttctcatgtttctgatttgaccttcgctatgaatttggaagcggcgaacccagcaagcctgggtcgccgagagcaatgatggccttattctggaatgtccaagggcttgggaatccttggactttaaacaccttaaaatcccacgtcaaggattatcatcccgggatgatcttcttgtcgaaaacaaggttatcaagtgctcgaatggaatttgttcgcattcaattgggttatgagggatgtttttcagtggatgctaaaggaaaaagcggcggattggctcttctctggactaaggactatttggttcaaattaagtccttcacgagctctcacattgatgctcttgtggaaaatgatcttggattcacttggcgctttactggtttttatggcaggccagacccgggaggaaggacgaaatgttggaaactattgaaacgactcaaggccatgttctcttatgcttggatttgtggaggtgattataacgaaattattgatcagaaggagaaaaaaggagggggactaaaacctaaatatttaatgaagaactttcggcaagccatttcttcctgtagtctgaaggaaattagtgctgacggggatggatatacctagtgtaatggtcgggcgtctaatctaatttttgaaaaactggatagagttctatgcaacacggtttggaaaggaaaatttaagattaacaaggtctctctcctcaactggtggaactcagatcatagaccactattgttacaagctcaaattgggaatactgaagaagcatttactaagaaatggggaactagattccactttgaacaagcttgggcggataatgttgaatgtcaaaccattattaaggatgtttgggggtaggaaaattcggtgagacctatacaacgcattactcggcttatgaagatttgtggaaataaactccaaacctggaataaaaagcaaaaaagtgaaatgatggccagatctaaggagctaaaagggaagattgaaagccttgcgagttcaactaagatggaagattggattactaaaaactagcttgaacgtgatttaaattgtgtggaggaaaaaaaagagatctattggaagcaaaggagtcgtgctctttggttgaaacatggcgatagaaatacaaagtatttccacttcaaagcctccaatcgtcgaaagaaaaatactattgagggcctatttgatgagaaccaacaagggaaaactaaagagaaggacattgagaatattgcaattaattactttcagcatctatttatcaagacaaatgaaggagttgatatgaacaatattcttcaacagtgcgtccccaaccgacttagcactactgagaatgattttttactgctgcctttcactgcagatgaggtgcattcagccatgttccaaatccatccattaaaagctcccggtaaagatggtctcccggggctattttttcagaaaaattgggaagttgtgggtaaggaggtgacttaagcttgcctcgaagcgctgaacaataatgatgattgcagccttattaatgaaacgctgatctgcctaattccaaaggttcaaaagccaacgaaaatgactgaatgtcgcccgatcagtctttgtaatgtggtgtataaggtggtttcgaagtgtcttgctaatcgaatgaaacaaagcatgaccacagtcatttcttccaatcaaagtgcatttataggcggcaggataatccaggacaatgctattattgggtttgaaagcctccattgcatgaggaaaggccgctttggcaatggaaaaaaaatggctatcaagctagacatgtccaaggcgtacgacagggttgaatggaactttttagaagcagtgatgactcatttggggtatgactctaagtggatagccaagattatgaattgtgttcgttctgtgtccttctcaatcctcataaatggtgccatcaaaggatttttcattcctaaacgtgggctacggcaaggtgatcccttatctccatttctatttctcttatgttctgaaggtctttcctgtttaatttttgaagcagaaagggccggcaaaattcaaggtttaaagtttggaaacatggatcaacggttgtcccacctcctttttgcagatgatagtcttgtcttccttgaagcaaacttggaagaaagcactactctaaaagaggtgcttcaaacctatgagacaatgtccggtcaatgtatcaactttgaaaaaacggaaatgtgtgtgggaagtaaaataaatgactcatgggcaaacaccttagcttcaaacttgggggttcgcttggtcaaacatcataccaaatacttgggtatgccaacttttgtgggaaaaaacaaaaagcaagtctttggtaagattagagagaaagtcgagtccaagcttcaaggttggaaaatgggccttttttctcaagccgggaaagaaatcttaattaaagcggtaatccaagccttaccttgctatgttatgagttgttttagaattactaaagggattctccatgatattgaaagtttgattgcccaattttggtggggatctactaaaaataaacataagttacattggggtaattggaaaaagctttgcaagctgaaagagcaaggaggaatgggattccgaaatctagaagacttcaatcaatctcttttggctaaacaaggctggaaaatcatcaacacacccgattgtttgatggctagagttctcaaagctctctatttcccaaattcaagctttcttgaagctaagttgggccattttgggtcatctgtttggagtggcatgctatggccggggcagggatcttctaacaagaggtctccattggtgtgtaggagatggtcgtacgatacgaataaatgaagacagctggattccgagaatctatccttataccctccgaaacaaggtccaaattcctccggatgttaccattagttcgctactgcagccaaatggtcaatggaaaagtaatgaagtaataagttggttccacaaagaggacattccttgggttctaggcattactccgaacatgaataaaccagattggcttacttggagttggaatcacaatggaatttactcggttgctagcggttataaacttcggtttcataatcctgacttagctgaatgctctaatacttcccaaatcaaagcatggtggaaatttgtgtgggggtctaatcttacaccgaaaatgaaaaatttcacttggagggtgttcaatcattggcttccaactaaggtggaacttcaaaaaagaggtatggctcttgatacttgttgtgactggtgtcaaatgcaggaagaaaatatttgtcacgctttgtggcattgcccgaagactcaaaagatatggaagtacttgggattctctaaactcattcccccgtatattaatatagcagctgatgctctttggtggtctcatgatcatctctccaaggacgatttaattagattcattgggtgctcttggctggtttggcaaagaagaaatgcatttattttccagcataaagttccaaatgatcattattggagtaaatgggctcttgaccttctcgacacacatttggggacacaccagcaggttcaacaaaccagcagagttaatggtaatcaaaagtggcaattccctccaaaggattttgtcatggttaatacagatgcttctctggtttttggcaaagctggctgtggtataagtgcgatcattagagactcgaaagggtcactgattgaagctgaagccgagttcctccctggctgtctttcagttctgttggctgaagtgactgctattcggcttggcattcaattagctcgtcgaaggtcattctctcatgctataatcgcttcagattgccaagctgctatcactacattacagaacaatgcttgctatcccacggattgggggcaattggtgcaggatattaaccaatttagagcttcttttcagtatttacgattctcatttgttaatagagactgtaataaagtagctaataaccttgctcattggagtaggttggctcaaaagtctgctatatggactgatgtaattcctctttgtgctgctgcttcttctaaagcaaataagcctagtgttgcttaataaagtttttctcattcaaaaaaaaaaaaaaaaagaatttacattttatgaatttgaaaaataaaattaggagaattaattttctagaatttgaattatagttcacagttaaatttttgtttcaaaccgacttttctatagaattttacatcaatcgacaattgtagatagttgattaattagggtcttcttctcagg

SEQ ID NO: 78983 - DNA, 9142 bp, Cannabis sativa
  modified_base (8985)..(8986): a, c, t, g, unknown or other
  modified_base (9096)..(9097): a, c, t, g, unknown or other
aaaaatagttgacaaaaattcagtagagaagttttgatctattgtttttcataatttctattaaaggaataaaacatataataccttttataaatgaagggtattttaggtatgaaaaagtaaaaaatgacatttgatttattattttaaaaaaaaaaggacattaactatctataaagttaaaaataaagccatttacttgcatttctctaaaaaaaaaactaccatctagttaaaaagaacaaatggttaacatttacttttgtcaaaaaagtgtctacttgtacattgtatttttagaatagttgtgtttttaataattcttatttagtactttatattttaaaattatacatatttagtcccttaaactcaaatttaattgaaaaaaatctatcaatactatcaaattatctttaattttatgagttataaattcaaatttaattattaataacatataatgaaaactgtttagttaaattgataaaattgtgttaattaaatttgatttaaggataggctaattaggatttttacccccattaactttaccatgtactaaatcatattccttgaatttttttagctgttaaaaattctccctaaacttttttagctattaaaaatttctcataaactattgagattgttggatttaaagacatttgtccagtttcatttaattttactgattttttggttgtccatgcattaaatcatgctccctagattttgatatctaccaaataatgctcctcgaacttggacatatactaaattaagctcctgaactttcatccatgttagattttccttactaaaattaaaaaaaaaaaaaaaattaacaatctcaatagtttaagaagaatttttaatggtcttaaaagctgagatggcataatttattacatgttaaaattcaagaacaaaaatataattaaccattagaatactatatgtacattctcaaactgaaaaataccaaatgaacattataaaaaatcagagtactaattatacttttcaaaaatacatatgactaaaagagtatattccccaattgaattttatgtaagtgttttgttttgctatgagaagatgcaagtgttacttactgtctgtgagaacaatcatgtcaatttctattataacacgtatgtgcataaataattaactatagagtttttcacaaaaataaaataaaatattagaaggaattaaagagagtgggaagagaaaaaaggaatgacgaccacctgttatgatttcttaaatcttcattaggatttaattttcttaactatttttaatcttgtcttgtagttgtggagctgtcctagtgtccatggttttttcttgaggtttttacaaaaatattaaattttagataaaatttacaattttactattacaatactgaatcttttaagaaaatactgtcttcttataaaaataactgtaaaacaacactacagaataattaaaacaacagtaaaacatttaaaaaacaactgtaaaacaactgtgaaaacttaacatattacacggtataaaacttacacaatattttaaaaaaaaaaaaaaaaaatctgtcgtaataaaaaaattacaaatttcaatgtatatagtataaaaaccctttttttctttgagtctccctttttttctatctctactcaccagtgagctagcctaagacctcttcaagcgtccatggttttatctttcgggaatattgtatatgtatattatatatatatatatatatatttgctttttgctttccgcctgcaatggtagcagtgtcaatatgtacaattataataatgtcgagtggagtagataaaatgcaacgtgagtccgtacactaatgatggtcgttgcacgtgtactaagacgtaaaggtcacatggatgagtgccgataaagataacatcaaccaatatcctatatataattatcaaaaaaaaacccaatatcctatatattatatgactttcttaatcttgtctgcattatcttatacgagaattcattctcagccagatcaaccttagggaaccattgataacccatcacagttaactgagttaagtgttcccaaagaaacatgaatcacaaccttcaatgtcaactactacattctgagtttttacttttttttagttcttcaacaaacttggtggagtcaatgagaacgaaagaaaattaaaatcttgtacgcatcaaaaatgctaaacagtacagcgttcctaagcaaaaataaaatatgaatttcgagttttaataagaaaactaccacaaaaccatacagttttcttcaatctcgtacccatttcactgtatcctaattgctagtgccaaaaactcaaagctaaaatcaaaaccagaatcgctttagcaaataaatcaaaacattctcattttcaattagtacataaacccacatcaaaacccttgagctctccttcaatgctcatctacgaatcatagcattcaacacaatctaatcctcattctgactttcgtctttgacaagcctgatcatgtcatcaattctaagaatcgttatagcagcctccgttgcaaactgtacaaggacatttagggaaatgtttggttgagtgtaatgaaaagggggataagaattaaatatagtaaaattaaatttaagtaaaagagatatctatatgtataaattaattgtctattggaatagccttccctaatttatttttgaaagaaattgtcttcccgcctaaataatggaaaggctatttaattttctattgctttagactgcagtcagacaatgaaatagaaaaacaaaatggattacattcattatccttagggcctgaattttacctgaattatcttcactttgctcattgcaggctcaatgactcctgcttccaagttgttgcgaacagtaccctttaacagatccaatcccatgctgcaaaagttgaaaagaaagccaaaaatttagctctagaacaaaggacaatttccattccaagaaaaatatatattttcagagttttcggtctagggtatacccatgattttataattgtccaaaaaatgagtttttgcctaatatcattgctcattacaaacaccggataacagttaaagtattaaataaacatatgtaaagtcaaatagttgtgcacttgacacaattgcaaactgtcaagtacacttgcgctaaagtagcatatgacataaaaagaaatgaaatagtacaaaggatgctgagagcaataagatggcatctaatagtccagcttagtttggaacaaaatccaagttcggtcctctctgacaatgataacaaaattaaaatttagacggacgtaaggaccagcaaagtacctagatagatgcttcttatcagccttagtctgagcagtatgatggtatgcccgcaattttgccactaactcagttgcatccttggcagcgttgacagagagaacctacagaaagagaggtcgtcaaacatttcaatttcagatcagacccatggggatacataatggacccataacatgtacaaaactaaacctttggtatgatcagcaaagattcagcaaactctgcaatagccaactgctcacgagatcctaaagttgtagcaaggtattccaaatacacagataatgcagactcgactgcacctccacctgctaccacctgcatactcggccaacataaaaatgagcacaaacaatcagagttcgttcactagccatctctccagatcaatagtaagagtaacaaacattttttgaagtaaaaacacaatgagtttactttgttcgcatttctgccacaaagggtagaaaatctttaaaggacacaaggtgatgtcagaattgtacaaaaaaatacagagacatgagggggtcacagtgtgcacaaatcaataagaaacgtagaaacaactcgaggagtagctcaaacagtgaggcatgcggtttgctcccacgaggtatggggtttaagtcctttcctcttttgggtacccccatgtagcaattggtatagtttcttggtccccaaatactatgggctaagggagaattgttagttttaataaaggaaaaaaataaaaaattggccccctctatcaaggagcccatttagttgggcatccatgacagtacttaactaagaatgactctaatcattgaaatgaacagaataggcttgaaatataaacgaagacaaagatgaaggagtcaacaggttgaaaactactttattttcattttcatttacagtaaaatttggattcagatacatgtatcacatatctggagaaaagttcataatgtttaccgtgtttgactcaagggttctcttcacaattgacaaagcatcatgcaaagctctctccatctcatcaagcatataatcattagcacctcgcaggatcaatgaaacctagacaattacacaataattagataattcattttacatagcaaggtttaacaaggtgttaaagttaaatgcctcatgcatgacactcatcttgtaaataattcaccatgtacaaataacttttaggataaaatagtgattaagatcacaagagtagtttaaagtaacagaactaccattgatataaatatagaagcaagtaataagatttttatgttattggtattaaatttgatttggattcttgaaattagactccttatgaatttaattttccatttggtttcttagatgtggttttatgatttatctataaataggattagctgtgttcattaaattcttagacatgataagaattactaaacatttctttctcaagaatcttctcattctaagtttttctatttctcacctcctcacttcttttctaccttgttctacatcaaatagttatactagaaatcttttcattttagttgacacataacattaataaaactctaatagcttttcaatttttgtcttattcaatgctttagaatgaagcaactcctatacggcttatctcttattaataaaaaatttgtttcatgtaaattctttataaccctaaaatgtttcacttgttacattacatgtatatgatatagttttgattagatagtgaggccaagttaatactgtagctacttcataagagtatgtaatgcaattaaacctccagaccaaatataaattgaggtaattaactcaagtactcactgcactagtatttttggtcccttttatcattatcacatcatcatctgaaatgcgctcctctacaacttcatccgcagatccaagaaatgatggctcaaatgtttcctccccttccatatcagcaaatgttgagacctgaagacacattatcataatgaaaatctacaaaagcaccaattgcaaatcttaataacataacagggtttaataccccacactaacatgattgctgtaaaataattatcaaacaatgatttagtgtgtaggctactttagtcatcatcacatcgactaaggatctgttgagagtatataaatgagaaaattaccaaagttgcaccagtagccttggcgacatgacgcatatcctctttcctaacacgtctaacagcaatagccccagcttcaacaaaatactgtagtaacagaaattaattaaaacaaaatgcttagtaaaccatatatccattggtcaaaaccattatttatacgttcttccacaatgttaaataaaaattatatagatacttctttaacttcttcaataaacatggtgaaatctttgagctataaaacatttatgtaaccctggagctataaaacatttatgtacccgttgatgtataaaataccttgaaaaaaattaaacttaattgttacctgaattcaaacagaagttagcagaacatgaatatgtaactgtgtacaagaaacaaacatcctctaaacagaaaatggacatgacgaagacaattagaaagaagaacaaaagcttgccttgagtgccatgtcatcaatccccttagtagtcagaacaacatttgctcctgctttgagaagtttctcaatacgctctttcgtcatatcagcttccctgttaagatttgggtgtcatcagtaaattctctaacacattaatctgaaaagagctttaggtcattttgctagtcacctttgacgaattttttcaagttccctaggatcagttactaagacttgaacacccatttgcatttttgttttctgaagattaaagtcaatacatgcaattcttgcaggggaaactctagtaggcattccttgagcagcacgtcctgtatttaaagcataaccattcaaaagataactttctcttgcacttttcccatgagctttcaaaatattgattccctggaacagtaaaatgcaacatagttcagtatctgaaaatgtaaaaaaaaacattttaactgtttatctgcatcctttaaaccatatgtataaactatataacctccatcaacagatcaccacagaatggatagcaacaaaccttgatgggatatctaatttcccctcgtgcattggtcatctttacagcttgtacagaatctacaacctgcaaagaagaacttgtacaaatacataagaaattccaagaagtatatacagcagatatcataagtgcaagataaatcatacagcaacaaaaatattaaaaagtcaaaacccaaccataaactacccacataggtaaaaaaagtaagagttggactacggaaaacaaattaaaccacggatctaagaacacaaacttattaatgatataggaaatttgaaatgaatgttactttgaaaggtattgctccaattagttggttgtgagaaatagcataccaaatttgcaaagaagtcactatcaccagctattaactttgatgacatgcttgtcttggcacagtttaccaaagaatcttttccaagcttctcaaccttgaaagaacaagaaacaaaggaattatgaacatcttatgctaaataaacatcataaacgtgcataatctaatgcaagaataatatttttcactgtagatatacatttctacaaatacataagaacaaataaagtaagactaagtggcaataaaaacaccacagacacatgtactgctccgtgagtgtcatagtgttgtttaacctcactttcaagtataaaagatacatgtcaaactttaaacaccttcccctaaacaaattcatcacagacgccttaccttcacagccaatttctcctcaacgtatttacaggcttccctcatagcaagctgttcacatcaaggcaaatacatagatgttaggtaataatacctaaggaattcaacacacgaatttccatgttaaaaaacttaggcatatgaagatactcactctataaccactgataatggaagtcgggtgaatcttgttcctcacgagatcatttgctctctgcaattattaaataaacatcacagattactatgccaacaaccttcatgaaatcagctgaatcagaaaggttcctcaccttaagcaactctgcagctactatgaccacggaggtagtgccatctccaacttctcggtcttgaagctccgccaattccacaagcacctatacaccacaaatggaagtcaaatcacatacatagagaatatacaaaaatataatatacacaaacatgaaaatgtgtggaaaaaaaaatacaaacaaacaaatggaaagcttgttccaccttggcagcagggtgctcaacttctaacatcttgagaatggtagctccatcattagtaatagtcacatcaccaatatcatcaactaacatctgaagtaacaaaaaggcaaaagtaacatatttaagggtccttaggtcgaacaaagcagattggactaaaatttccacaagtaaaatgtcaaaataaggctcgagaaaatggaagggtaccttgtcaagaccaacaggaccgagcgaggttttgacaatgttggcaacagattgacaagccatcactatactccccagaaagacacacaaataacatcaatgtaaacctaaaaaatgtagaaaaatacaaagcatatgacagcatatatggataaatagagcgaaggagagtaccattttgggtacgaacgtcctgaccggattggcggtcgcccataatatcgggggtttgtgctgagatagacatttttagggtttcggagtaaatgaaaagaaatcctaaatcagatctataaggaaggaaaaagaagaagtagcagacggcgattcctgcgaactgcctcttgaaacttcacaacaacatacaatacaacataaaacaacagcagcagcagcagcagcaacaacttccgctttagagagtgagtacccctactgatgttttcctttgttcactaacgaaagggttttagaagccgcgacgtcgtttcagtcttctatttacttttcctttttatttttagacaccgggtacaacaactaaagcaatcaattaggttatttgggtgatttgaaagaaaaaaaaaattattattataaaataatataaaatagatgaaaagaaagaagaaataaaaagtgaatgagaatttctcagttatttatttcagggatgaatccttatttatacaaaaatattgattaaaggaataggaaactaaattaatatgtaataaaggaaaatacaatcaagcattaatggtgataattaatttggtgatttagacatctataaataatatttcataatactcccccttggatgtccataataattgcattaataaaaaccttactgaaaaacttggtcaaaagaaaaagagtacataaactagctccctctcatttaggcattcgtggagatcttctaatcggcgaatttcgatctagtttgtcgtcttctcaaatattgatgttgttgataactttgtgaataagtttgcaagattaacacttnnttgaatttattgaacaccaatatgtattttcttgtaatgtaattaaagaagaattaggtaaaatgtgttctaattctatttctattttgaatctaaaatttaaagtcaannacttaaatttataccaaatgtactatgagttttattctagcttgg

SEQ ID NO: 78984 - DNA, 3928 bp, Cannabis sativa
  modified_base (48)..(52): a, c, t, g, unknown or other
ttgaaaaatattttcacttttcgacttttaaaaacagaaaactgattnnnnnagtgttaccaaacgccaccttagggaattaaaatagagaggagagtgtgagaaggggtcatgtttttgatttgtaattgagtggtagctcttggagaaaaaccaggtctctcgaatatcctgggcattttactttttcaagaaaatctctctatttccctccatatttctttatgtatttttctggttttgactttatacactgctggtgtgtgtatcacagtttatggttctctgtttttccagagcagaggagctggagacagcatttatggagatggtcaagcatgataatcgacgacaattgagtgcaagggtaattttttttctttaaaaaaaataaataaaaaaagaactacaaggatattcctatcattgatctatatcagttttgtgaagtcctactgaagaacattttgttctagtgtagatcaaatatacttagatatattgtggttctcattcctgacagctttcctaaatgctttaattcctttctttgtgaactctaacaggtcctttacatctataaacttgctgcttaataaatatgttcttatgtcacctttttaactgcttttccatctttttcatacatgtaaattgtaatgttgaattaattattgaatgtccagtctctgaagctcaaaacacatagaaggaggtattttttttcatttgaacaaagtgctttctttggttatcaagcaacaattttgttcacaagcacctattggctaaagattagattacttcaataacgtcattatattaggtggcaatattcttacatacttgtactaagaaaggtcttttttttttattatcattattcaggcaatattagtttctatacttttttctattctcatgtgcgtgtcttcacttacacttttgcaggttgagcaattggagcaagaagttgccctcctacatcaagccctctctgataagaaagaacaagaagctgcaatgctcaaggttttatctgcttcagtttctaggaaatgttctgtgtttttttcctgcctataaattttatgggttgtacatataataggtcttgatgcgggtggaacaagagcaaaaggtaaccgaagatgctcgaataattgcagagcgggatgcagctgctcagacatatgcagtacatgtgcttcaggttttgttttgtactgggatatcttggttatttaagatgatcactggctgccgtgtttctctgtttcattgttttattcttgctttatgaaccaatttttattgttactactatatatagtcaatgttatacctgtttttcaaggtaatactgttatacaggaaaaatatgaaaaggctgtggcttcacttgctgaaatggagaaaagggttgtaatggcagaatcattgttggaggctacactgcaataccaaactggccaagttaaagcacattgttctccacggtacatctgtacatgaaaattgatttagtatcttttattcccctttgtttcttttcttacccttttctaggccaaatcatcttatgggtgtggacttgagattgattttgataaaagtatctatgtgggttggggaggcgatgtttactatagtccctgtcgaagaccttcaattaaaatactgaactttttttaaagagataaatctacccaaatgtgtaaatgatcttagcttccattttttaatgtacatgccatatccttctagttcaaatctttagttctttattcgatgacttgacacggctgtctgccattctaggtctgtgggaaatcaagcaaccactcaggagaacacaagaaggggtattttgccatttgcacttggttggcgcgacagaaataaggtaattgtgatctttcagtgagtcttgttagtcctatgaaaaaggcgtatttttatgtttccaaacaatttgaaggaagtattttaccactagatataattcccctttgtaaagaagatatgtaatagcccatattcatgctcctttgaccttgccatttctccaaatacattgtatcaaaagctttgtcaaattagaatccgtttgtgcatcacagggcaaaccatctaatgccgaagagtctagcgaaactaaatcaaccaatggagcaacagatgtggtgggcactcctcagaagaatacaagtgaacaagagaagaaaacaagtgagcaagggcagtaatgctgtcttgttgaaagacagattgtacttgatctggtttaacacttgcccactttttgtattgtaaatgtgcatacaactggcttaggagccgatgatatgtatcaatttaaattcaaaagtcaccttgtttctcccaggatttaaaaactgaaattcattgtacattcaatcatttttcttatgtttttttaatagataataaaggtgcagagattttggttaagtaaactagctgacccttctaccagaagctgacattggaattagtattacaaaatttactttggttctcccaggatttaaaaatgaaattcactgtacattcaatcaattttgttaccttttcaaaaaaaaaaaaatcaattttcttatttgttttttttaataaataataaaggtgcagagattttggttaagcaaacaagctgacccttctaccagaagcttagacattggaattagtatgttttctttcatgctttttaggctgtattaagagtatttacagcttaagatgaagatcggaaaatctagcacattatgtgtagcaataaataatgttttaatcatcaaaatttacacaacccttcataaagttcaataaaaggcagagctgtacaacaaaactcccaaggtgaaatcatgtaaaaaaaaaagacacctaagatagtataaagaatgcaaatttatacaatcaaaaaccactactacccaccttcttggtttgcatatacatccaagacaaaactagtaaaaaatttcatcccagctaaaaagacaaaaaatggagaagcaaatgtgattgacatttttttattcgtatcacaggaaatttgctaactgtagagcgaatgagatgcaagtgagagaagcattcacaaaggtctgatctttgtatatcatcatcagcagccagaaccagtagtaggtattcttcaagagtatgtggagtcaatcctcaaagcagtaggaagtctgcatgtatttctacatagcaaaatcacaaaatattatgttttcacattcactaccaccattgtgatttcttctcgctgtctctcttggatttaggagtaccgggcggaaaacgagaactttgaactggttcagtatcagggttgtatttttgtgtagcaagataagtcaaagcagtgacgacatcagctatgacgggccgcatattaggctgctcttgaacacacattgctgcgacagcaagagcttggtacaatcctcttgcaggatattgaccttggagcatgggatctgccatttgcgaaaacttcctccggtctttaaacaagggtcttgcctgcaagtaaccatgtgagccaagaggaacaacatcttcattactaaagaaatagttaaagctaaatttggcacaacatctcataacagtcattcttattacatgtttagttcctcagaagaatattatccactaaatggggttttcttacccaagcaaccaagttctgctctcctgtagctcttgaattgtcaattgctttcctgcctgtaataatttccagaagaactaccccaaaactatatacgtctgatttcaaagtcaactgaccagtcattgcatactcaggagcacaatagccataggttcccattacccttgttgacacatgagtgttatccccaacaggcccgagttttgccaa

SEQ ID NO: 78985 - DNA, 6423 bp, Cannabis sativa
ttttttatcaaattatcaaatttaactttatattagatgaaaaaaaaatcgagacaagtagtgactataaatacacggacaccaatacaaatatacaatattcgtcgaagacaaagattggtgttttgatcatctcttctctttctttcaatcttgtgtttcacattttcattatcattactcaactccctcgattttcgtaactagggtctccggcaatcatcatgagaactcgtaatggcgccaatcttaaatcgccagctccgaagaagacgccaccgcccaagaaatccaccgccaaacccactccgacatctgccgaggccggcgccggctcgtccactccagaaactggccaaaccaagcgttcgccttctactagaggtagaccaccgattaagaagaggcaaatcgtaaccacgactgattcgaaactcgaagaaccatctggtaaataaatgtttgaattgtttatttgtttaattgattagagaacacgaagattggaattggttttgattaaatttctgaactttgataggtttagtgaatttcatataattaattggattttgaagtgattaatttggttttgatagtttgatgattttgattagtttatttttcgcattatcttgaatgagaaggtacgaaaggtgaagagatttcggctggtgctgttcaagtgacaccagattcgaaggtgggtagagtaacaaaatcagtggcgaccagaacatctgggaggattaagacaactactgtaagaaaaggtatttctccacaggggtctgatgttagggattccggggaggcgaatgttgaagagtctaatgatgaagtgggggaagccttggtcgtgggaagtacggagaaggaaccgagggaacccactgtagttatagaaacccaggtagtagagactgtgaatgaggaaccgaatcaacccggtgcagttttagaaacccaggttgtagagtctatgaaggaggaaccgaatcaaccccgtgtagttatagaaacccaggctgttgagtctatgaatgaggaaccgaatcaaccccgtgtagttgtagaaacccaggttgttgagtctatgaaggaggaaccgaatcaacctggcgtagttatggaaacccaggttgtagagtctataaatgaggaactgagccaaccggcagtagttgtagagtctacaaatgaggaaccgagccaacccacggtagttgtagattcccaggctgtagagtctataaatgaggaactgagccaacccgcagtagttgtaaatgaggaaccgagccaacccacggtagttgtagattgccaggttgtggaatctatgtatgatcatgcagaagaaaataaggaaccagttgctgaagatgtcggtgaatgtattttgaatgagcagcacccaatggaagtagtagtaatttctagtgagaactctgtagaaaatttggacaaaaaagagcttactggtacagaaggcactgtagaactaaataacatagcgtgttgtggcagaagggatgaaatagaaggggatgcaaatcaacaaaagtcaagggatggtggagttaatgagcagcaggatgttgggccttctaatatggaggaaaatgtcacagaggttatgcaactagaagatgataagtcgataaaggaggctgatattgagccgataaaggaggctgatattgagccgataaaggaggctgatactaagccaataaatgagggtgataatgagccgataaaggaggctgatactgagctgataagtgagggtgctaatgagccgataagggaggttgattgtgatcatgaaatggaatatggagaaaaagttgatcttggagaaaatggaaatgaagagcttcaagaggatgatgttgatgatcatgctgaagaagccaagaataaggaagaggaacaaagggaagtggctgccattgaacaaagggaagtggctgctattgttaatgagcgcaggagtcgaaaagagcgtgaagtatttgttggtgggttggatcgtgatgttgcggaggaggatgtgagaaaggttttcgagaagattggggaaatagttgaaattaggttgcacaagaatctttcaacacataagaataaaggatatgcatttgttgaatatatgaagaaggagcatgcaatgcgagctttgtcagaaatgaaaaatccagttgtatgcatctgttttacctgttttcctctaattcaaaaatttaaaggtcttgttctaatattaaaaattaatgcagattcatggacagcgatgtgggactgcaccgagcgaagacaatgacacattgtttctgggaaatatctgcaacacatggaccaagaaaacagtgagtgactagataaataattaaaaacttaaaaattaattaaattttctcgtgagcatttgatcttagatttatgtttaacctttattcacacggcatgtcagataagtgagaagctgaaggagtatggcattgaaggtgttgagaacattactcttgttgctgatgttcagcgtgaaggattgagccgaggttttgctttcattgaattttcatgtcatgctgaagccatgtctgcctacaagaggcttcaaaaacctgacgttgtatttggccaccttgagagaactgcaaaagttgcttttgctgaacctttacgtgagcctgatccagacgtcatggcccaagttaaatcaatatttgttgatgggcttccacctcagtggaatgaacaccaggtaagggaacaattaaaaggttatggagaaattgtacgtgtttgccttgctcgaaatatgtctacagccaagagaaaagattttggatttgttgatttctctacacatgaagcagccgtggcttgtgttgagggtgtaaacaaaactgagttgtacgatgggaactcaaaggtatcaattttggagatattggtttattagagatgttgaaataaatttactttgttcatgggaggatcccatataaatactatgtatatgtatatatatatttattcttgtaaagagagattgtaatttctttcaaacttcagtagttcaatataattcgcttttgatgatatataagtcttgtgttttgcaatacaggtaaaagtaaaagcaagactctcaaatcctatgccaaaaactcaggctgtgaaaggtggaatgtgtggtggatttcgaattggtcatggtgatggatatattcctaaatttggtgtgttcatatgtctatatttgcttatttatggtgtggtaactcagcaatggatagtgtgtcatgtcttttttacttgttcttgcagggcgaggtaatggaagaggtggtaattcctttaacaatgcaaattttcgcaggggttctcatcgtggtggacgtggtcatccgagcatgatgaattttcctaatgaatatggatttgataaaccacatgctgaatttcatgggagacaaaataatggacgaggttatttttcaaattttcttctaattatcatttatttttaattgttcttatcttctctattccaattgttaaatgtaaaatattcaaccattttaacaagcctaaacaaaaataggtggaaggagaggttcgttcagaggtggtaattacccttctggtaagtttgctggacgtaattttgatagaccatggcctgctggccccgacagagaacgtgaaatgcactatcctcctatgaggcagccttatcctccacaagaacattttgacagaccttttccaggaagtcactttgatgacccttatttttatggtgacggtatgcgtggcatgaagcggccattgcatatgagggtaagttttctattttgcttgttaacttttagtatggtttatcttaaaatccattgaatcttatgattggtactattctcctggatttaggacccagaacctgatttcgtggagccaactggaattcgcccaagattagattatgctgatccagtagctccctttcgtggaagccattatcatggtatggattctactctgatttgacctttagtatctactcatgaatactgtcatgtacacatgtatttatatatatatatatctctttatatatgttctaatcatatattgttcttatgtatttgtaattagatacttatggagccggcagcagtgtctatcctcgtgatttttatggccctgatgtaagaaatcgatgcatttaatgatccgatataccaatgatttttactgatctctaatttttcagctccccttgcagaatgctggaggtccttatccttcttactatggaggtgacccccctcctccatacggtcgtggctactactattaatctcaagagaactttggtattaaaaattactttgcaatggttttgatttttgataaataattacccatcttaatgttttaaaggttttcatatattttgtgtgtaggtggacatgaaaatgcagagaaacttttctgatggaggcttgctgtttgataggaagctgaagttccatatcgtttcccttcttactccttgcttttctctaatttcttcttcctcatggtttgctcttatatatattttcgatagagtatccagagtttgtagagttttgagttaggttgtcttccgagttctaagattcctaattaagatgatgatttacttttcgtatgatggagagatacagagatgccccctatacccataggtatgaacaggttgatgacttgagttatgagttattgtgcataagtgcagatttcattttctgctttatataaattgttggtatggatcaatatttcttgatgatatttaatcttgtgatttaaaagagacaaagtggggacttactggaagtaaaaggtttcaggttaagattatagttttcctatagagatgggagactttagtttacttattcagatgggggcttctctgaaaaatgatattgaagattttatggagagaatgaagttgcagatttgcaatgcagggtgtgtatatatataaatatatattatgaatttctatgttaatttaaggcgataaaatgcacgatcttgcagtgttctgggatatttcttttggaggtgtataatagtttctttcctttttagaggatatttagtaggaatcaaaatttgaacttttcaggttttgtcatgctttttctttttaaggagtagaagtgattaggcttgtcaagtataatttagtcaattatgcaaataaatgttggggagactgttatatctatatattttcaatggtgttcatcgagattttgattccggattttagttgatacagtttgggtgagacttatgtttaggtttgttttacactcttagagttttatcatatagatagaggtgatcagtttatttttacaactttatttaggtggactttgttttagtaacatgtaacatgattcttgacatttatttattctggaaaacaagtataattatagactaggtgaaaactctagatttaatcactcataaaaaaatactattgatatcttggtagttgttatctaagaggatttctctaacccaacttctaatatttggtgaataagaatgatctaggaacactttgaacatagaattttatggtgttatgtagtttcaatttcatgtaccagatggctgatatgtgaagtttgatgatatgtggtaacctgctcttttactttcactgtcagtttcttgtactcaatctatagagatttttgttatcttatacacatgtatgtatatataatcacaaatgttgtacttggctatttgtagttgatatatgaaatctagtaaatactttgtgtatttggaatcactaattgaaaatgttgctgctttttagaatttggtaactgagaatttgaatcttgtcttaacagtcatttttttttgttaatagtgccaattagtgtgccaattacactcatttatgatcaattaagaccaaatgacactctggttgtcttcttgctcatggttttaccacatgatcgtaagtaaaccttaacaatcactatttatgttttattaaaaagatgatttgataaagtttcatccgcagataggatagtgttttttttgtttttttgtttttttgtttttttttttttttgaaaatcagcgttttatagatacattggatcaaaggatactccttttgtcttcatgatcgtggttcgaccacacgattgtaaatctaaattatcactatcttcgttttattggaaaaatttattgataaaatttcacatgaccgattagattgtcgatctagttataatttcatgatcatggatggtttcaccacacgaccgtaaatgttatgtggcgtttggtaatattttttta

SEQ ID NO: 78986 - DNA, 1682 bp, Cannabis sativa
gctatgttatatttttactgttttgattattctctttagtttatattttgttgattttgtttcataacctgcaggattcttaactgggttttggcattgtttcttcttggcagatatacttcaaaaagaaaaaaactgggggcatttcattcaacagcactctcactttaactcacgtggatgagaagctttgttatcaaattttacacgaatacaaaattcacaacgctgaggtatgttgttaaggttctttgttaattgaatcacctcgcacactcagctcagcttatacatgtttatctacattattcgactttacatcttgggctatttgaatagggaaatcatattgtttaatggtgattttttttttctcgcaggtgctatttcgcgaggatgcaacagtggatgattttattgatgtcattgagggaaatcgtaaatacatgaaatgtgtgtatgtctacaacaagattgatgttattggtattgatgatgtggacacattggcaagacaacctaattctgttgttataagctgcaacctgagggcaagttctttaattaaacttcactaaataattataaatggagaatattggtttcattattcaatatattttgaaatctcttagtgttgatttctcatatctgtgccgctttaacagttaaacttcgatagactacttgcaaagatgtgggaagagatggggcttgttcgagtttacacaaaacctcaagggcagcaacctgatttcacagatcctgtagttctatcctctgtacgttcagattattttcagactttctatttgattgtcaagtaatttgctctcgatttctctaaatctggcctctcttttgatttcctttcttggttggttttacaggacagaggcggctgcacagttgaggatttctgtaaccacatacacaggaatttggtgaaggatgttaaatatgtgctggtgtggggtataagtgccaggcactaccctcaacattgtggtcttagtcacaatcttcatgatgaagatgtggttcagattgttaagaagaaggtagacttatttcttcgtttagttgttcagttgaaattaaagttgctttttgtttatcatatcatcgccattattatagccaaaccattgtaggttatttgagcaactttatttctttagactatttcaaattccagatcttttacactttgtttggaacttggaattttgggaggaaaaaaaaatcacttgtttggattcaaacaaaaaatggacgaactttaagataatttgagacaaaaatttttatttagttttatataatttagaacttacataaatacattcaaacgaaaatagcttagaaaaataatatgagaaatttttatttagttttataaaatttagaactcatataaatatattcaaacaaaaatagcttagaaaaagtctgctatagagttttcggaaaacattttcctccatcttctctttagtattttatcataaaatggcaatccttgagttccaaacaagtttagagatacagattttataaattctaagttcagatgatgttagattttttagtgttgtgtgttgttgccttttgacaaccgggtggatatggaccattgttttagtacacttccattgttattgtcacttgtgattagaacc

SEQ ID NO: 78987 - DNA, 4658 bp, Cannabis sativa
acccaaagtggacatgatagtcattcaggaactcccttccagatggtaactatcattctacaagacttcttccagatagacaagttagttgtccgagaacatatttccgagagagaataactttctaagaataacttttagagacctttttatttgaaagaactataccacactactcattcatatgtgatactcaataataggcatgcctatttattttcttagggctgaatttttttcgaacaaatgtttatttactatttttttataaccaagtgtttatttacttgtgaaacaaaattttatgatacatacttacttcccgaaaaatgtaaaagaacaactgcagttatttgttttgagaaacttaactcaaatacaattcaactttaaaatctacaaagctaaaaagaaacaaccacggtcttcaccatttgtctctaccgaaatcactttaaccaaaatcattgaataacattctcttcttctattcactgtgaagagtgagtgtgcatcatctctttgccctctcagcccatttctaatttgccctccatcgccttctccatgtccagtcacagcgaaaatccaggtgttgtcttgtaattcattattggtgagttatgtgtactctctatttgattttcacaatcaccacttattatctttgttgaaatgtgtttgctttgcataatctatcgagttgtttgtaatgggactaagtgaggttataaagtggacacaaaatgtggacagaatttgtgtgcccattaagtgtttgttttaattcctcaatgaaatgcatgagaaatgttgttgtgcttatttatgtctggattttagttaattgtcatagaaatgaaaatgatgaacttgatttttctgtctgactaatttattagatttctttctttcattaaattaatctcagccttttacctcagtggcctctgttggctcaggctccaaacattctttggtctgtatatcatgatgttcatgatcttattgttaaattttcgtttgttgctttctttttgtcttgggattcatttgtaaaatattacttaattacaaatttacttatgagacttttcaaacgttatgaaattattttattaattatgatttgtagtttaataacttttattgaatgaaaattgtgttcagatttaagcttaatcaagtctttttcctttcttttttcattttattctcaaagagagaattacagttgccagcttttccttttctccctcatagacaatatcctttcctctttaatttttgacctttttctcgttgtcaccacaattttcttactgcagcagcgttttcacacttaaggattgtctacaatatacttttacaaggttagtgcttcaccattatcactctatattagcagaattaatcttttttctctttatatctcagattaaaaatggatttgtcttgattttgtttatttcatctttatgtagaaaatttattgaaacaaactattgaattcagaaatatattttcacatacagtttttgaatagtaaaccaaacagccacatctcaaaaatgggtcccccaaagtggaagaatatctttataatgcgccactattttgcatcttcttcttcttgttcaatcggatccaacagtaggggcatctctttaaccgttgatgctgttgttacaggtttgagtagttcaactatcaaacccacaaatttttttcccaatgttacaatttttccatattcatgcttcggtttagttcgcctatggagttcctccaatgctttggttgcgtttagggtccctaagcgcttctattgttccgaagtagttagattggatgagtcttttatttctgatcatactgatcttgatgtgaatggtgaagaaagcaatgtagaaaagttatataggactattatggataattcttatgcatattctaacatggaggaagctttggaccatgtgggtgttggtttgtccactgaattggttgccgagattctccaaaggcttcgttttgaggagaaattagcatttagatttttcacttgggctggtcaccaagaaaattatgctcatgaaccttctgtgtttaatgaaatgattgatatactgtctactacaaaatacaagataaaacagtttcaaattgtttgtgagatgctggattatatgaaaaggcataacaagaacactgttcctgttgaggttctcttgacaattttgagacagtattgtgaaaagtatttgacccatgtgcagaaattcgcaaagaagaagaggattagagtgaaaacgcagccggaggtcaatgcctttaacttgctacttgatgctttatgcaaatgcagtttggttgtggatgctgaagggatgtttaagagagtaaagagaaaagttaagcctgatgctaatacgtataacattttgtttttcgggtggtgtagagttcgaaagccaaaaagagcgatgaaggtactagaagaaatgattgaaatgggtcttacacctgataattttacatatagtgctgccattgattcattttgcagagcagggatggtaactgatgcagttgagcttttcgagttcatgagaacaagtggttctaccttgtcttccccaactgccaaaaattatgtgatcatgattgtggctcttatcaagaatgatagaatggaagagtgcttcaaatttctggaacatatgataagtagtggttgccttcccgatgttacaacatacaaggagttaattgaaggaatgtgtttggctggaaaagttgacgtggcgtacaagttccttcaacagatggggagcaaaggctaccctcctgacattgtgacttacaattgttttcttaaggtcctatgtgacaataaacacagtgatgaagcacttaaactctttggtataatggttgaggcaggttgtgtgccgagtgtgcagacgtataatatgttgatttccatgttttttgagatgggtgatccagatagggcaactgatacttggaacaaaatggataaaaatggctgtgctcaagacattgattcttactgtgtgatgattgaagggctttttggttgcaataaagttgaagaagcatgttgtctattggaagaagtggtaaacaggagaatcaaattgccttataggaagtttgatatttttctgacacaactttctaaccttggcgatttacgagcaatccataggctttcagaacatatgagacaattctacaaccctgctatggctaggcgttttgcactgaatgagaagcgaaaaaacacgagtttgagagggaagtagtaatgagtgctttggtttgttcaattcccacaagctaatgcagtctagggagccttaatttgaaagcattaatggttcatcaccctctttctcattcagggagcttctgaactatgtgcacgaattcattagagcggtctgcacaaaggtttaaaagtttaaccttgtgactcccatgatttatcatgctcatttttctgttgttgaatctcagatatgttctctgatctttcagttttaaacatcctattttagtttaaatatgtaacataattacataacaaaaaagaacatttttatttattctactttcttcattgaggatgctgcatgtgtgatctgttgatatattatgtacaaaatcctctttagtggtggatgcaacctgattttcccaagattaatgtcgacggtgctattttcgacaggcagtgttgacacgatttcgggtttgtggccaagaattcagttggtagtttggccaaggccgtgcagcagagctggcctgggaagttgcagcccgatatgattgaaacagtaggactcaaagaagccttgagttggcataaagggaaactgattgtctcagtctagtccaagctattaaaagttctactcttatggtttctcgtattaacttgtattaactttatgaactctgtaatgtgtcgttaaattttgttaaataatctacaatcaaagttgcccattctcttgctagagcctcttattgtgatgccaattgtgtttttagttggagtcttggtcctgctagtttgttatccttgattttgggtgagcttgagttattgaaattgcaatttcttattttaaaaaagttcaacctatcatttttgtgatgattttgtaaggtgagactagtttggtccaagaaaatatgagatgtaatagtgacacttttagcaatagagacttaaattctaccatggcaaaaaattatgtatactttattctatatatatttattaaatatttgagactaatctattttttattttttattttttttttgtaaatgttcttttagtgggatgataatcacaactgaagttttttttaatttttttttatattaagattttattgttagtttttttggagttttattttattttatttttacacttcaaaacagttttttttttggtagttttaaggaattctacataaaaacttctattacaactaacgctgagggtgggccctgaaacaaagtgggccacaggagaaaaatttatttttgggcccttatgttagaaaaatatggtatttttcaaagtcagtaaaaaaaaaatgtataatttt

SEQ ID NO: 78988 - DNA, 1620 bp, Cannabis sativa
aacataattatagtactgttaattgtagatgaaatttttcaacataggttggatgatcatgtacataaatgaacttgcccaccaaatatccaaattctatttatgaactctagttgaaattttcaaagtctctattgcaaagcttaagcatttgctggactggactgacatcttttgctgtactcttaaaattgtaatgtaatcaggtggattgaccgagaatgacttcatacttgctgctaagatcaataaactcgagttgcatcacctgctgaggaggaaagtttccgactaaaccttccgaactctgtggaatataaataattgggaaaccaataaagatggtcttattctacttctcatgttaatgctttggtcttaagtagacatctaagaggtacttacttagttaacttgttagtatgtttctcttctcttacaaaattgatgtttcctttgagttacattgagtaatattttgttctatcacacctaaatatctcatgttatggagtttaagtgaagtgttgacaatgtttaccttccaagctaaataaattgtttaaattttgtcattttggtcaaagtcaaaattcttataaatgtatccaaaattaagtaatgataaagagtaaatttgacacacacttgtgtacaaaaacattcaaccatttgtattagtttaagaagagtcgctaatgcttcgtttagtcagaatgaatgaaatggaatgaaatagaaagaaaataacttttattgtattcttttatttagttttattttaaaacattagaatgttattcttattctagctacgtttttattttttctaataaaattctatttaatggagtatttattatgtgaattttagttgcagagaatagatttggcaagaatatggaacctgtgtttgaggggattaatatcaccactattttaattaaaaaagtgagatatatttaaaaatacaaatctcttattattcaaatttaatttaaattttatattttatttccatcaagtctaaatcttatatcaaaatactccaataaaagtgttattttttgtaaaatattttgcatgacattgttgcatagtggttgagtaagcaatataatagataataatcattatcattatctaatttgtcaaaagttttgtcaatgatataacttttgtgatgggctttgtttgttttgttgtgtgaataatttccatgaagtagcatgcccatgcatggtgtactattttgtattagtgggagttgatagtgacatgacacctgagactgagagccctctaatttttccatgggtcacccctctcactcaccacaccaccaaaccaatctcctctctctctttggtgcttacaagcttactgagtttggataaagcttttcatcaaaaaataaaagtttggataaagctactcctcctaattggttaacaagaaaactgatattgaattatacaaatagcaaaaagcgatattatacggtactaattagttaacaagagaactgatattgagttacacaaatagcgatattaaacagtattagacattagacacaatgggtcttgttttgtgtcatctaagtatttctcttatttt

SEQ ID NO: 78989 - DNA, 2825 bp, Cannabis sativa
taattaacctaattttaatattgtattattgacgatggtttcatataggctataatctttggatatttgtttaataattctagttgattaaaaatagcttgtacataaaaatcttcataaattattatatcaatttcacgactaaaatttataaggttttttccgtatgtatatattaaaatagtaaaaatattacgcaaatatattgagcagaccttataaatatttatacaacccaacaataaaaatttacaaaaatatatcttgctctatctatttagccttactaaccactttcttcaacaacgacaacttccaataactaactcagcaacctaacacaactgaaataaaattcaataagaaagagaaccaccattaattttagcgaattcatctgagaaaaaaaccaatatcaatcggggctatttcgaattcatgaaaagaaaaatgtagaaaaactacaacaaaactaaaattcaaccaaaaatctggtttaatttgcataaaactaatgtcctgacttcaatttttaaatctatgaaatgcagatctcaaaaagttgaactggagttcccaaacaatccaactctcaagtataatccaaaaaaaaaaaaaaatttacatcaatactatagttaaatgtttatcccgatgtatattttcgttattttttagatttctaatggtgaatttgttcatatttaatcacaaatagaataataaattcacatgtagatagagttacgtacgtaaaaatactgttatagttttttatgtttcataacagttgcataaatattttgctaactctctaaaacttgacatatcaattattacaaattgataacgataaaatagatttgatcatatttgcaagtgttttatatcgtcaatacaagacaaaactttttaatgatacttttatagcatggttagtcttattaatatactaaattagttgatataaagttggtaaatagaggtataacaattcttctacatataactaaaattgaaagaacatgacttcacaagatatccattgtgtgtgatccagaagaccaagaaaagaagatttctaggtgcatggaaaaaaaaaaagaataggtgcagcaaatgtggccaaaaaagttacaactggaagacataacataaccaagcaattagatattgagagagttgggctcacgtctgggttggaactatagctcgacttagtcatctgggcgaataataaatcagatcgggcctaggtttgggccagtcttagctagtatttgtactttaaaattgtacatgtcatcgttctggaaacttgaataacacttataaataaatatattgatagtaatattactaatctttgttgaaataatataaccacagtagatatccagatatagcatcagatatcaatagttcatggatataattgggattatcgggtcaccaaatcacactactattagccaacaagacaagtttgaccaaagaatgagcaataatattacaagttctaaagcaataaagcaatgggcaaactaacatctttgaacttactataatgaccaaaaatgccatccaaaataagtcccaaagaagtaataaaagacacattgctcttaattttaagaataacactcaaacactcaaattcagtaataatattgccatacccaaaagagaggcattgagccaaggcttgctggataggtaaagcttacgcaacttgagggttgaagcaaccctctaatttccaactcgctgaagcccgaactacaccaaactcatcacagattagcatacccaaaccactatagttgccagccgaatcaatgacagcatcaatgttgactttgaggctacccagaggaggactcaaataatttcatttctacagattaaggttcgagctctttagatcaatccaatcagttgtaagcgattagaaaagcttgcacgagggggcgcctcttatgtctggtaatcagctttgtttggcagccatctatgactcgtcgaaggcgcttgaggacacaccgcagatcgagaagaagaactagacaccactagacttgaagaagaaggaatcaccatctttcgcctttcgttttgaaagtctctaaggtaatctcgagcccaattaacctgaaagcttggcaacatctcgatattgttgtggacttttttattttgcttatgccaaaatcttcacataatcaccatcaccaactcaattaaatcttttggaagtagatcaataaatctataaataaaacttataaaatcctcacaatcaatgagatgatcccctaaaataaactaaaaaaaatttctacaaggcaaaaagaaagagcacccctaaagagtatgatgagtagtttattctttttcacaggcaaagccgatcaaacgggtatgcaaggtaggcacgtgcctagggcccctatcaaactgaggtcccgaacaaataagtcatttcatttttcaatataaaaatttaaaaatactagtataatattatagtataggttagtgtggtggcaacgacaaccgtgttgcacgaagttttttaggctgttgctcaaaataaaatttaaaaataacatgacctgatagtgttataatttaattggtttttgttttcttgtatttgttcattgtttgtgctagattctggtattaagttaattatataaaaaaaaaacaaattaacgacaattaaacacatggtattattttgcatcattttaagaaaacacacaagcacatttattattaaataaaataaaaaatctaaacggtaatttttataaaaaaaa

SEQ ID NO: 78990 - DNA, 6116 bp, Cannabis sativa
  modified_base (47)..(64): a, c, t, g, unknown or other
  modified_base (5621)..(5622): a, c, t, g, unknown or other
ttgttcttcaccattcgaaacccatagtgaaagagtgtcatgcccannnnnnnnnnnnnnnnnnctcaatcatagtgagtaagacgggtgtaaccaaacgctaaggagagaaagagatccaagtttagatcttgataatgctcagctacagaaaggaatcaagggctagacatcttgaacggaatgagtcattatattccgctgcaatcaatgttagattttcttaaaccctcatgtgtttgttccattgttttagagaattcatatttaggatgttaatttagcatacttgttagtaattctaaatcctggtaaaatattcccaacagttgagacactcaataaaactgtcgacatatcatcgatatcacattcataaagattgactttgagaacctatcgaaaacctatcgaataacatttgagaaaggtatccctgaccttggaacatctgcttcgagaacctttcgagagcttatcgatagctagtcgagaaaaataatgacatgacattgaggtagttgagacactcaataaaactgtcgacatatcatcgatatcatatcgataaagattggcttcgagaacctatcgaaaacctatcaaataacattcgagaaaggtcatccctgaccttggaacatctgcttcgagaaccttttgagaacttatcgataaacaatcgagaaaaatacaaaacccagaataatcttaaaaaagagatctcgtgattttgacaaaattctacgaacaaccccatagatctgccgaaatatgctatacttttacaatcatttaacaaatgttttaaaaaaatacttacacattaatctacaatgaaagggaggcagaggaggggcggcgcggtggttggaatgagacgtgaaggatggatggtgtccttcacggtggttgggctggtgcgagttggctcgtcggacgtcctcaaggggtgtaggcggctgagctagagagaagggaagaaggatttatttatttttatttttgaaaaaaatggagaggagccattatggagatgagaaagggggaggagttggttgatggggtgactgatggccgatggggatgtggtaatttatttatttttttttagttttgaaaaaaaaaaataataataagagtattttaggtgaagtgggaagttaatagaattgtattgtataaaataattaagaaggttttttttttaagtatattaaataaaattttttaattataaataatattgtggctataacaaatactatcataaaaaatatatttttaatatatattttcaaacaatatttttcaaacataaaagtaaagaaaaagcttgtaaataagagattgtaattaactaactatagttaatcagactattttaaacttttattaaccatcatcactccttaaagtttcatatcagtacaaattgattgacatgcgttaaaactctaatatgtttgaaaacctcacaaaatcctaaactacattattttcattaccgacagccatcaagaaaatactacactagtttcattgtcgttcatctaaaatgactttcctgtctgcaaaaacatcatggtcaaatttgttttgactttggttttataacagcagtagcagaaaataataataataataaaaaaaagtgaaaaatattctgaagataaaaccatggggatagggtttttgagtatattcttctgtgatttttctctatcgtaatcctttctctctctctctaaaaaatgatagtcttctctccgtatccaagtccaaccagctcagtccttcactcttcttccaatatctttcatacccacatcgctttaagctctatcttaaaccccattggagatggaagcttaatcttcaagcgacggaccagggcgtatcggttcctggtgctcttctcagcccattccaaccccaaaattgttaagtccaaccgtaggtctcggtacggtcaggctctgtctccgtatgacaatgatgaagaagatgaagaacagtgtggtgtcgacagtgaagatgaagatgaagattggtcgactgaagtgagtttttcttaacttgaaccgggaatttcggatagagtttcactggatttttttagatgttttacgctgtgttttcaaccatttgaatgtttttcatgcttttgaagctgtaaattttgaattattgttaattaactatgtcgactatttaatttaatgttttgttatgaaaaatgaaacttgatttttccagactttcctacacttaaattcgtcataaggctttacttattgttaatcgagcttttcgttttctttttgtcattgattttgaggaagtttgatttgttttgtttctattagttttaaaaaaattgtaggaagtgcacgttttgagtgatgcacagttgccctgagaaacatataatgtatagttgaaagcagcaatttttttctttttattttatttcttttcatttgtgctctttatgctttctgctatatattactagtttgctactattgtgtttgtttgtgtgtgagaattaacctgtagctttacccgggaacggtttccaggatgaatttgctgaggtttcagatattgatgctaaaagaaaaaggtccaaattgcaaggaagatttggtggaagtaggtgtcaattgccattgaagcttttcttaaagcattatatataaaaagaaaaaaggaaacagtgaaaagaattaactgaatgaatgttttgatattgcaggcagtcgaaaacaacctcagaaaagccagagcagagtcttatcaagttttccggttgataaggaattaggtggcagaattggcaagcaaactctagacaaaaatattgctggaagttatcaccatacttcaaacagaaaagaatcagttagttccgtagacgtacgcaaagaaaaggtgtgaacactactttagttatccacatttactatctgatgtaacaatggctcaatatacctaattcttttgtatttttcttttttgagcagctaaatatgaggaagatttttaagaataaatatcctcggctatttgaagagatagacttagatgaaaaatggttaccccttatagattacttgagtacatatgggcttaaggaatcacacttcattcaaatgtatgagaggcatatgccttcccttcaaataaatatatgttctgcacaagaaaggttggagtacttgattagtgttggtgttaaacaaagggatgtaaaaagaatacttatgaggcagccacaaattctagagtacacagtggagaacaatttgaagtcccatgtcgccttcttgacgagtttaggcatcccaaattccagaattggacagataatagctgctgctccttccctcttttcctacagtgttgaaaattcactgaagcccacagtgagatacttggttgaagaagttggcattaaagaaaaggatttaggaaaagtggtgcaactaagccctcaaatcctggttcagcgtattgacatatcctggaatactcgttatattttcctttcaaaagaaataggagcatccagagatagtatggtgaagatggtcacaaaacatcctcagctcctgcattacagcattgatgatggattattacccagaatcaatttcctcaggagtataggaatgaggaatgctgacatcttgaaagttataactagccttacacaggttgattttattacattttcacggacattttcaatacttcaaattattgtccttgtgttctgatgttatcatatttgcaggtactatctttgtcacttgaggataatttaaagcccaagtatttgtacttgatcaatgagctgagtaatgaagtgcactcattgacaaaatatcctatgtacttaagcttgtcgttagaccagagaatccggcctcggcataagtttttggtttccctgaagaaagctccaaaggggccatttcctctgagttcattggttccaactgatgagaacttctgtgagcggtgggctggaactagcttagacaaatatctagcatttcggcagagactgctactcaagaagtttgcaaacaaatatgaaaagaaatactaatatcgtgatcggaagcttcataagatttactgactgagtttgaagagcagtgttaattgcatcataaatttatttgcccttttatttataccagggtgaaactgtatttgaggtttcaaattgactgctcagactatggtttcttattattaagcttctgttcagaacatcatcaggttactcaagtttatgatgattgcatgacattattccagagctataacataatgtagaagatgctccaaaccttcctgaaatggcccctaaaaaatatttgaagcagttgattgttgcagaagctgtcccccgccaccggtgatcattaaccaagttactaatacagaaataaggtgaacttctctactattaaatcatctatggttggtggagtgaatgaaagtaaagtcacatattaacttgcaacagtattcacttagtcattgtgcatatctctttctgccttggactggagtgctcttctttgatcatctctcatttccactctgctattataatttgatgtttttatcattggtaatgcaggtctggccaaattactgaaaatcatggtgacaacttaacagaaagctgtaatgactgcaaattatgttgtcatgtatgcattaaatagtttctgaagtattcattataatgtttcttgaaattcaatataaatatgttaggcagtgggatatatttttatatgtaaattctttccctgcagagacagtaatatatctttgttatacctgttcaccctcgaaatacccataagagttacatatcagctttataattttattcgtctcttctcaatttattgtaatgaacactttaaacagaataatccaatatgtaatatatcaggtatttttgttagctgacctggaaatttttttcatctggttgaatacatcctgtaggatgataagcatacctgctgtgctgtgattactgattagttactaaatcgcagatttggttgaagctcattccggtgatgcatgtagtacatactatgtttgaaatttttatttgtttatgtgggaaaattacgtgtagaattaagaatgttgaaactttaaacaatcaaaagattagcaatgataagattatcaaatcgaaaataacaattggatgaaaataggggctaacagagtaatagaaactagaaaacaacaaaaattaaagaaattagtttaattaggatttttatctcctaaactttaacatgtatcaaattatgtttcttaaatttttgtagcctttaaatttttttttttgaactattgagattgttagatttagggactttgtttaatttcattcaattttaatgtttcccagactttgatatctactaaatcatgcccctcgaattttaatatatactaaatacttctgaactttcctccatgttagacttttttttattaaaattagataaaagctcttaaattcaacaatcacaatagttcatggggcatttttaacgaccttnnaagttcagggggcatgatttggtgcatgtcaaagtttagggggtaaaaatcctaattagccaagaaattaacaacaagatatatcctagttaaagtcctatagattgatgtgatttatggctctactccagttctggaataccactgaaatccttctttattgatcaaacaataataggtacaatacagtcgagatgagattctttgttgagtcttcactaagtgtttcaactctcacacttacacacatgaatcttgttcatctacaaaagttttttcttatgaaatcccaaacacaatctctctcctttctctgtacctctctatctctctcaacctctcaatcgtttctctcacaaactctcaatctcatctgaattgagttataaatctcatttcttgaaataacaagtcaaggtggcatttataggcttaggatcaagatcctaaagtcggtggctgcaagaaaagaggttgttaagttagttaggaat

SEQ ID NO: 78991 - DNA, 5259 bp, Cannabis sativa
agagaaaaagagaaggaaatgatgaatggttgattgatagaggtcatagtctacggacgtgtagtgatgcatgcatgaaatgtgtgtgcaagtggtaaaattgtaatacaatagagttgaagagtaaaaatgtaggcttaaccgtgtggttgtaatttagtaataaagtatgtattttgtatttttggtgtaaaaatttcttttatttatgtattattatatattattactttaataatttttttttttctaaaacaaaaatactaaaatagttcaatctattctaaaaccaaacataagaatattttcagcataatctaattaagttcagtccaatccaattcattcattttcagtccaatccaattcaattttttcagtccaatcctgagttccaaaggggctctctggaaacaaagccaaaatacttttacatattgggggcaaagttgtctaacttttgttatagaagggtcattttataaattgtcaaaataaagtggtagtagtgtaaataaggttagggaataaatacagtttggtaataaggtcatgtcacagctttcagtttctaacagaacctaaagcaaaaaaaaccataacaaacctcacttcttctcttttctcaaatttcaaattttggtctgcacaaaagagaccaaaaaaactaatatcggtgaagatggacgataccgaggttagcactaaaaatccttttttgtttttgtttagctaataacggactcctttccttttatttttttattttttatattttttgaaatggtgaagtgggttgctaactgattttgatcttactctaatggttgtatctttgatcgttctcgacttttgtggatatgggttttgtttgtttgccttttcatttttgaaggttttgattgatttcagtgttttttctttgttttccccagaaattgacggctttgaagagggcatatgctgatataatcctcaacacagcgaaagaggctgctgggcgtattttagcatctgagagaaaagctcttcggtatgagagagaactcttaacgactaaagaagaggcgcttcagatgcttcttaggcttaaacagacattagattctaaggtataatgttttttttttctcttttactttggtctaaaatgtgctttgtatttgtattgtgatgaagtagtggcttttggataggtttctgctgtgatttctgaagtgggtttgctgtgaattgttgtttggtgattttgacttgattacattcttctttcttttgcttaaaccgtttgtaaaatagtttatatagctctgtagcaagaaagtttttgtttttgctctttaatcatttaatttagtgtgaatcaaaatcatgtcttgattgtgcatgagagaaaattataatttggtaatggtgacaatttttttaaagtttggttaaagtttacactgaattctggcccaaatttagtcattgatgtgtttactggtagaatcaacatacctttcatgttttgaggatcattgagctataatcagggattccttacctggcaatgtttcttttcaaggtttaacatattctcatattggcatatcttaattttggttgttacaatcccattttacatgctgaagcaacttagtgaggtttcctgggtcggtttattaattaattatgtgaacaagtgaataatgtactgactagttgttctgttaatagatcattgaaatggataaagtatcttcaagtcagcagagaaagattgacgcgctcgaggcccaactgcaggaagctgaggatatagtgagagatctcagagtagagttgagtgaagtgcaagcagaattggagaagacaaagcaaaaccaagcaccaccagctatggatgagcataatttagacggcaatacttcacatgaaaatggaatttcttcaagaaatgaccaagcactgtctttgttagagcaaaatctggagaatactactacacatgaaaaaggtctctacagccctgattttattgtttctgagccaaattcacaagtagaaccagagacgaattctggcacaagcaaaatgttgaatggaatgtttgaaggcttatgttacaggacagatgattctcacatggatcattgctacaatgataaccccaatttttcttccttagtgaagagaaggaaagagcctgagctgtacaagaacgggtgtactcagagaattcgtgcatctgaaagaaatatgttggatggatatttatctatttccaaactaaatgatgatgcagaaaatggatcattcattggaagagataacgatggcaaaaggatacatctaatgtctacctcaaagaatgaaactgatcaggcacaggaaaaccaatatgaacccagagtggcccaaatagattatagtcatgtcctaaaaatacccctgaagtcatttcggaataagaggaaaagagcagctagatatgagaaaactaaagttcttcaatgcaaaaatcttcatcataatgaaggtagggaaaattttcagaaagtgtgtcctacacttaatgatgaaaatcaactggtccattcttgtgagaaaatgccaggagaagttcttaaagagacaccttcagctccatcccaaaaattaggaattgaattgagtagagagtcaggatgtgcaaaagctacagaaaatcttgctgagtttgttaaaccctgtagtcttcagaaggtaactaaggaggataaggtggcaattaataaatcaaatttgattagtcaggaaagtttattagcgaaatttgaggttccagcctgcaaaatagattttaagaaggatgacgaatcagaaagtaaattgaatgctaaagtatctgatttagaagatgttgtggcaagtccacctgcaagcagtaggctttttaagtatacatttcaaagaaagcggaagagagatgctttgagcagtcctgaacaaaatagttctttgaaagaaagcacagccgagaaacagaatggttcttcagagccagaaagctctagcttgttaactgaatcacctcgggacagtcgacgactggcacaagttgctcgtcaggttggtcaatctttttctaattttttcagtgaatgttagttttaatgtcacctgtggtttttatatgataagtttcatctacagctaggaaagtctgtagtgcttataattgttgaatagtctgcagaaactttttatattttagtgcactatgctgctgtttttaataattttgttggttatcctgaacttttggatgctactaacactatctatcatatcaatttggagaaaaatttgaacttcagatcaacatcagtcaattattgttactgagttgattctggaaaaactgtattttgcattgacattgaaaacttgagtggtgcttaacatgtaactgttatgattgctttgtaagctatgtagaccaagctgaaatattctgttaaacttggttaatgaaaaagttattaagcaaaatgatatatagctacctaccaaagaagaaaaaagtatgtgtttgggctctcttgaggttgtaattcagtataagaaagaaaccaattttagaactttgacatatttggtagtcaggcatctgcagacagattctgaaaaggctttcttgaaattttttctacctaattagctctacagttttcactcaaattcatatctttttgtgtgccttaaatatgtcttggacgttagattcctggtccaatgcatgtgcatttgtttgatattttgatattatcctggggcacaacaaggatttatttctttcttaattcctaaactagttatcatttgtactcaaattcatctgtctgcatgctacactactactttatcttgtgaaaactgtgatgtttgatgaatatgataatattggactgaatctatggaaaccatgcaaaaattcagaggcgtggactgggaactgtaggttgtctttttggcatacttatcacatgtttcggtggatgaaagggataaatcttctctgattggaacttgtagcattagtttttttagggagcattatctgcttgtttactgtagttacatccgtgttagtatggattgtgaactcatgaattatctgtctttatgttgaaattcaactgaaaagcagctatgccacggtgatgaaattaaaacactgatccatttctaacatatttctacatattgcattgcacagcttatttccttgtcagagaagaagtggtagcaaaggctatgaggacattttcggagaaaaccagactcaaatctctctactgatgaatgtttttggtgaggactaggtaaatgatgagttgtagatcccccagtaactagtttagtatatcattacttacaattattgtatttcaaatctttttctcaaaagtcattagtcaaaacagtgaagttaattttattgggcaacttccattcttggataatttctctaagtgagtggtatatcatatattgcaatattacatattgttatgttacttgtgcctctctttgggtttgaacacaaacaagtttctcctcttcattgacaccacatatttagggttacttataattaagttttaccatggaacatttgaaaaagaaaaagaagttaaaattagtagcaaacaaactatatatgaaatattattcttatgtcaacaatatttcatttaaaggttttgtttcccaacaaaaatagatcaaaagtgggttattgaatgtccatgtttaaaatgttgaatgataattgttgccattttcttctaactcatctattatatgtgatttaccaatcttttgctctctaaatatctgttttggattgatgatcattattaagaaatcaccattggttgagggattgtttgtttaatttggtgcttgagtttccttattgaaaatgtgaaaagatttgttatcctacttataaagaattgactttgcaaaaaaagaaaaaaaaaaaaaatcctactatggatgaagttcatgatttttgatacatataaaaatattaagcttgtgggtttggactttcgtattaacttttccttagtaataatgatcatatgttttttaggagtaaaaacctaaggaaattacaaattttattagttttaatatttttttgtgcaaaaatatgattttttttttttaaaaaaaattattttatgggaaaaagttaaaaaatataaaaaatctaagggt

SEQ ID NO: 78992 - DNA, 7314 bp, Cannabis sativa
  modified_base (6862)..(6863): a, c, t, g, unknown or other
aaaattataaagtaatgtaagcatattaattcaaatttcccatttataacaaaataatttacttatttgtaaaaaataagtagttaactaattgacttatttgtttcatgtacaaagcaaacttattagtgagttagttgcaactaaaagtagaattggcgactataattgagacggcaatgacaacaaatttaaatattgtaacaaatatatacaagtaaggtatgatgatacccattttaaaatcatatcattctataaagttatcaatggtctttttttcataactttattttgtaagatattaatttattttcataagtaaaaaatattataaagtagttaattttactaataaaaaaaattatatcaaaaatattaaaatatcaaaatttaaaatctgatatacttttataacataattatcacaaaaccgcacacgatgtgcgatttgttttctagtttataaataaaataaaattattaaaatataatgaattcaattgtcaaaatcgacctgaaaatgaaaaggatggggaacgaaaataaggaatctacaaaatagaaataaataaatagaaaataaggtatctgcaaaaaaagaaaaaaaaaagggaaaatgacataggtaatgctacaatatgcgtatttaaatgcttggaaaaggactgagaattttctaacccatgtgagatttatatgaatgagcaataaaaaaaagaaaaggacttttatagagcacagctaataaaatagcttggctatcaaattccacgattccacatcagtaaatatatttaagaacaactttggtctgaatatggagtatcacgtccaaggctgacacccaatttacaagacttaacacacttcttccaatcaccacaaataaataaacactcctgttccacaagaaaaggattgctcatatttatacatcgcctcctatggctcatctaactggtcctgcattatttcaaaacaactcaagtttattacatctttgctcaatcgaagtaacaataacaatatggcacaaaactaaatagtaaatagaaacggaagatgagcctctgacctgcgcatctgaagtccaaagggtgaggttgtcccttaggagttgcatgatgagggtgctgtccttgtacgattcctcccccaaagtgtctaactcagcaattgcttcctcaaatgcctttccagagtagaacaaaagagacttagttaagacttgagaattaaaaaacttcatacaaattacaattgattagaatttacaaggaaagccgtatatctcaaaataataagaacagcaagggacgccactgaacctatctaactggaacaacgttagattggtattaaaaaccaagaaaatcaagcgagaagattagtaaaggcaacccaaacacccatgtcaacagatgcatgttcagtgaggacaattgaagcatgtaatcaaaactccaatcacagttcaactaatttgctaagatgtaacaacactatacaagccaattgagcaaattaatgatcagtttcacgcaaaaccaaaataaataaaacaaagtaatcaaaactatacaaaccaattgagcacatatcacgctaataatgattatagcaaaaataaggtaggcaaagtgggggtgacccaaaagaatcgtagcacccatcccttcaagtctcaatcttgctgtagccgagtcgcatacaattattaaaaacactgaacttgaccacatatttgtttttttaaacaataaataataataataatattatataaataatcacataacattctacgcagtggcccaacgaagcaaacatgtgaaactatgatttgagttgaaagaaagtacctgtttggccaaggtgcaagctttatcagattgattgagaatctcatagtagaacactgagaaattgagcgctagccccaacctgattggatgtgtagatgcaagatcggcagccgctatatccttcgatcacaaaaacaacaactgagttattattattagaacacaaacccactttccctaatccgtaaacgccaatgaaacaaggcaaaaagaaaaacctcacacaaaatcgaaacgcaattgtgaaatttctaatcggattgtcgatatcattaagtatgagttgaattttaattcgattcgattcgatctcggttcgaaataattaattagttaaaaaccctaaaatcaaagagaaattattgtacctgagcagccttgtaagagatcatggtgtcctcagcggcggttttcctctcatcaccgaccttgaactcagccaagtaacggtgataatcgcccttcatcttcaaatagaagaccttcgactcactggaagaggcggagggaattagattggagtccatgagcttgaggatactggcgcagacatcagaaagctcagactcgaccttagatctgtaatccttgactaggacgacatggtcctcgttcttgcgaccctcctccttctgctcgatggaggagatgatgcgccaggcggctcggagtgagccgatgacgttcttgtaagccacagagaggaggtttcgctcctccacagtaagctcagaggcaggagtgcaacccaacacaagcttctgcatgaactgaaccatctcctcgtaacgctcggcttgctcagctagcttggctaggtacacgtactgctctctgcttaggttttcagtaatagtagacgccattgttgctctgaaactgaaagtgtgtgtttggacttgagagagagagaaaaagaagaaagagatttttgagtgacgcagaattttattgtttggaactgaatgtaacgcttttattattatatatcaattaatttcccgcattcaatttctgattctctttcatttatttatttattttagcattgaaatattatcgtatgttttttgttttttaatcctcagaaaacaaacaaacttgtcttcacactcatttgtacttgtattcgaatttgtgatagtagttgaactgttgttgcaagatacttttaagtgcgcaacaacaaaagatgtgtcaattgtgtgtactttctaataatttattaaattttaattaatccactttattttacattaattttttttaaaaaaaaatgtaactataggtgagtagttttatgtagaaattacacaatatataagatttttgttttaattttttatttttttatgtttttttttaaatgaaatggataattcattagatatataaattcgctaaatacaatagattgaagagcaagagagacattgctctaagtaaaaagacgatcaaaccaataacaagcactgcatatcatacagcacgcgactttgttagcagaccgtttaacatgacaaatgaaaataatattataaaaaaaatgaaagcatgaactaacaatcttgaataatctaaccaaatatagatagcattgagacaaaactaaggataggctggacaactaagatgcagtcagtctcaattatcacatttgacttgtttttcctctttatccaactatgtgcctctttgacactcaaaatttttgcaacaacaggctggcaacttgtgatggacaaagtagaaaaagcctcaattaatattctttcacagtctcaagccacaaagcatgtaccaatctcattcgtagcttcaaaaacagctccacccacgttgattttaagcatatcagcttctggtttggtccagcaatccctcctgtcaatagaattgaaaaccagggaaacgggatccaaccgatgcgactgtgaaaagacccattgacgaagagtgttgcgagctaaccaaacaacatcaacaacaacacattttttttaccattccataacagatcatattgcgtgccttccatatagcccaactaaccatcacaacttcttctattagacctgagttgcccctactgtgatttccataaaccagtccacaaaagtgtttgttgcagaatttcccacccccaaagcagatctattccagcatgaatgagcgagtgagcaattaaccaatacatagaatattgattcctcttaggggtgttcataaaaactgataaactgaaaccgaccatcaaaccgaccagaccgtaactaaattttcggttccacgtcatcactgaatttggcggtcggtttcggttttagttttttggacacggctgtcggtttcgattttgattttttttgacacagcagtcggtttcgattttcaaaataaaaaatagttaaactaaaaaactgccaaaattgccataaaccgccaaaaactaccaaaaaccgtccaaaactgccaaaaaccgtacgatcagttttatacggttataatttctaaacggttggttacggtcttcataaaataaaaaccgtaaccgactggtcgattataaaattgtaaaaaccgaccataaccgatcgattttcaccccttattcctttcttgtattgcagaaaacacaatgaagcaccacagggacatgtttgggatggagttgagaacgagttggcaagcaacccgaatgaactttctaaacaaaatgaagcaccttaggagggactttaatcttccacaacaccttctagaaatcaacttccatattagagctccaattaccattgacagttttgaagatgatgataggaacttttaactgaataaaaactagtaggctccttgttccaaaaccaattgtcttccagcacattagtactcaaaggaacctgcttaataagctcaatatctcaaggttcaaacaaatctgaaacaaactccatgtcccattgtctacaatcgggtttcataagttgggaaattttacaattggccaatgcaaaatgtgttgaaacaacacatggattatcatcagttaacaattagggtgtattgagcaggtcatcaaaggcaatataaacacagacatggcaaaactaggcaaagcttgggccacaatttttagcaaaatttttcgaccagttgtagacaaaaaccggccttcccaactctgaatacgtttctacattttgtcttttaagaagcctaaaatatcatctttgtttctacccatggcacaaggaagaccaaggtaagtactatcctcatacgccaatcccattcttagcaaaccacacaaccgattttgaatatcactaggaacattagtgctaaaaaagacagaggacttgctgaagttaacttgttgtcatgaggctgtaacaattgtaaaacattcaaagcctctctctcattagcacgacaataaacatagctatcatccgcaaatagcatgtgagatatgatcggagcaccattggcaaccttacagcctttaatctttccatcccgctcaaattttcttatcaaagaggagaagccttcagcacaaattagaaacaaataaggggacaaagagtctccttgacggattccccgctctggcacaattgaccccaactcctgtccaccatgaataattatatgggttttattattgttatattttgtaaatatttttcaaaattccatattttatctttttttttgtttttttatttttttaatattatttttaaagtaagctacagtagcaatagtttacttttagcatgcacctaccacctcaccactattttcctatcccttcaatctatcaaccattttcatcttattttctttatttttgtttcctttttctctcatttatcttaaggtttcatttttagtttcgtctcttcttcttcagcttcttcaatttttttttccttccgtgcgatagctgctgattcttcggattggtacttgttcgtatttttggattgttggagcaatttctgttgttcgaactaaggtgtttgaatattttcttgtaagtttttgtggtaattttttagtttagagcttagagtgttttattttgttttttgtttatatctttgattgtttatgatgtttttggaatgatcggtggtgatttttgcttgttttggtgttttgattatgtgttctgtgtcatttttttctagtttattggttgatcactgtattatttagtttatttttgtcttaagtttgtgtttattgtttggattttgcagatcttcattatttatagcaccatgaaatttttaggtttttatttatttatttattttatttttgatgaatttgcaaagtgttcgcttattttttgtttggttttgtttattctttatgaactggtttcattgtagatatattttttttttaaataaaacaagttttatttttatctaatagtatttgttgtttttaatttataatttaatattttgttaatttttattgtttttgtattttgcttgatttctgttttgattttgaactagttatttttgttatcattttctttattttgttatattgtattgctatttttaattatttgtgtttttagtgggtgaactaactgtttatcccacgttgtggcaatttttttttcgtgtgtttgtggtgtggattggcaattacattttattgctcgtatatgattattgttaatctattatattttcttatttctctttctttgtatcctttgtgttctttaggtttacatttaacatggataaaaaaaggtgattgtaataccctagaaattagaagtggatgagcaaaaccctaattagataattataaataattgaggaattatattattatatagttcaatatatgagaatttatttgattaattatgtgttaagaccttgttggtgagccaggggcattatagtaattatgacccaggaagggtaaaatgatgaaattaatttaattanntgcttaatagaactatattattatgtagtatgcctgtgttgtcttttcaggtgtgtcctgacaggttggcgtgatatagtcacaaccgggtatttcgggccgaatcgggttcgggcccgaaatgcaatttgaattgaattaattgacattttatttgataatggataatcttaattttatttgaaaaataaatgagtgtgaatgacaactatgcccttgtatgtgtgaataggtgagagttggccctaggggcattttggtcttttgaccttatttgacttatattggtaaaagctcaattttgagataatgaaaagaaaaattctggggtatatccctctcttacctgaccctgtctctctccctaaccctctctaatttttaaagctaaattggtgaaaattgctttatgttggtgttggattaggctttgtaattgggaattaagctt

SEQ ID NO: 78993 - DNA, 12185 bp, Cannabis sativa
  modified_base (47)..(58): a, c, t, g, unknown or other
tttgtcatttaacaaaacacagagtccaattagtaacttttgtaaannnnnnnnnnnnaaatggtatttaccaaaaaaaaatcaagagccataaaaaaacaaaataaaaaaaaaacacaaatatttttgtgataaaatttggcaaaagaattagaatttggatatttcttttctttaattgaagcaagccaaaaaagagaatttgagcgattgcataggagtaggcgtgcgaccaggccaccgcagtgcctcaaaaccaggtttatttcctttgaacaaaacataactgaccaacacaaaaacaaaacaaacaaacaaacaaagctccttcttttctttttcttccctattccatttctcattctgagaccgttaacccactatacctgattctaaagatgggtagaaacgcaaacgaaaagtcaaagctccgaagagaacagagacgccaagagatatctcttcttagaaccattccatattccgatcaccaaaggttttcctctctctttcatttttcttttttatgttcaatgttctcatatattcatactcatatacgcagaatacaaatctgtttgcttctccatttgtttgattcttactaccaacttgggtttttgtgaaaattgtcaaaagggtatctttttttccctttcaaattgttaaatttgggaaacattgatgaagtttttatgccattctttatagatggtggtctgcagaaaccatagcagtggtaactggtggtaataggggaattgggtttgaacattctaggcagctcgctacgcatggattgacagtgatacttacttctagagatagtaatgttggtgctgaagctgctaaggtcttacaagaaggtggccttaatgtggcttttcatcaacttgatgttttagaccctttatctatcaaacaatttgctgattggctacaacaaaactatggtggtttggatattctggtaggctgaactttctacattgtgcatttcacctcacttacaccaatttaatgatttccttgttcttttagtttataaagaatattttattatatgtgtgtttgtgtgagatggtcagaggttaattcctcattgacaaaatgggtgttacaaatcttcaagagcttgtttaaattatgcattataaaaatttaacatgtataattttgtagtgagtcctacagttctactcttgtctcttaggcagccatgtctcaccatttttactcggtgtcccaaatcatattgggacccttccacacacaacacacgtatctcaggtgtgcgggcagggttatgtcttgtgagactaatatctgtagagagaatagtagtctgactttagtactagaaatggattagcattgcatgttcttttgtgtgaggttgattgtgctgcaaaatttgaagtaactaacatctagatgatagagtacaagtgaagaaaaagactcacttgaagccatgtatgttgcttttattttattaaatttgtgtttcagatctcaaatttcagtattgtcttctattactactaaagttggctttttcttgccttgtcttttcaattaattaaaaaaaggaatattaatactctctgaatttagtctaagtcaataagatgatagacatggattcgaagaattatgtaattcagtccattgcaagtcatgtggtggctggtaatcttacagtgctgtattatttcttgtatcagataaacaatgctggtattaatttcaatcttggggctaacaattctcttgaacatgcccgggaggttgtagcaaccaattattttggcaccaaaagtatgattgaagctatgattcccctgatgaaagcttctaatgtgggtgctaggattgtgaatgtgagctcaagattaggtagactaaacggcagacgaaatgtaagtagaaactcaatgttttttaccccttatgtgtgcctctttctgttgtgcatgcaaggtttttgtatgtattgtttttttaatctacttccttcttttcccataccaatatatcatactttcttttgtggctatggtgttttaggttatggtttgctaaggatttccttgtgaaaagaattgttctttgtaggcaatgtagtcatggccattcttctttcctatttcacttgtatggacctaactagttacattgtgggtttcttgtagtattgctattctctacattttctcttttgaaggaaatcaccctaacaaatataagcatgcatgtatgtacatgtatgtaattggggcttattatctctaaatatgtttagtgttgaacttttggatgagaaaatgtaagtaaacaactcataaaggaacaaccccaaaaatgtatattggccttcaaataattgcaaattagaaattagagtgttgtacttctttcctttcatttttttaatgttgggaaaaacaattttcttgctattgttccttttattcaactattatattgttatttatcaattttcaggggatttccaaaatggggagtacttttggagtctccatttcatatttttaatcttaccctgctctgcaaaaaattgttgagaagtcattttccgtaggtaatgttgtgaacaccttggtgctagtcactttaaactaatcaaggctttaattgacagagagttggagatttgactttgagacaacaactaagtgatctgaattcgctctcagtggaattgattgacggtgctgtatctacttttgtacaacaagtagaagaaggcacctgggaagcaggcgggtggccacaaatgtttactgactactcggtatcaaaacttgctgttaatgcttacacaaggctaatggcaagggtactatctgataggccagatggccagaaaatttacattaactgctattgcccgggctgggtaaaaactgctatgactggttatgctgggaacattccagctgaagaaggtgctgatactggggtatggcttgccttacttccagaccaagcaataacaggaaagtttttcgcagaaagacgtgaaataagcttttaagttgtagtggagctgaagactggcaagttcaattgtttctgataattagaggggtttgaagaacaacctagaaaaatctgaaacttactgctgaaggcatgttttgtgccgcattaagctttgctcgaagaacaacctagaaaaatctgaaacttactgctggggctgttcaactggttctgatctctggaacgagagccaggaactaaaatgtcgcttcgatcaatttctttgcgcaagcctacatgtcaatgcaagttatttatgtatcattttggtattttgaagagtttattatgatgttggataaatactttcgaactttacttttaagttgctattaagaacagtggtagctttatataatatatattgccttaatattactgagcgtttgagttatggttcatattataatgggtaacgagtgtaatgtaaaaatgcaatatggacaagggtaaataaacttcatccttcttttatataccattttgttttcttcataatctgcatattgctcattagttagtgtgatgcttctagtttctcattctttgatttagttttaaaagagacatcaatcgctcaaaatgatataaccaatagtttctgtattctcctttaatttcaattttcttagatgattgaagaaaagtacagcaaaaaaaacagtataattgaataatatattgtattcacatattacctgtaaattatgatctagcactgaaaaaatgtcatttttgtattaaaaatataagaatataagttgctctattataccattttgttttcttaaaattaataatttaatttaattttggcacctattagcaaattctcaacaaattcaggtaaattatcaacattttcaatactaaaaaaaatactactttgccaaccacgatcatttcttgaaaaatgaacttattgatatttataagcatacaaaattatcaatcagagtttaacaaaatccaatatttgtaagactaatttctcactgattttagcctactaaatttttatccagtggagtctagacaaatatggttaaataactaatgaattctcttttgttttcttttctttatttctttcattattgccaccccattaatgaataaattctacacgcattgtgcctcataaatgaatttatgttaccatctttaagcctaaatatcaccatcataataataatgtacccaaataaacgtgatgtatcattccaaagctcaagatatttggccaaagcatagccagagacatgtacttatgtatatagataaatattttaagaggaaaaacttgtacattgttggaactgatacttaaaaataatcatatacacaaaagactaaacttgggttgggggttggggtattcaagaacatgactggcaaactctcacatttacctaacttgggtttctttctatccactatccacatccacagttgtgtaatcactctaaaattacttcttggtccttcaagcatcactcacttggctgatgacaacggaagcatatttggaaatttccttttctggagattgccttagcctcccaatcactgggaacaactctgatgaacgaaggaactgtctgcaaggtggatgtgcacacatttttgccaatgaaaacatagcaatctttagaggtgactcgtttagagcatctttcttacttgggtttaatgctactgctgaacagtcagctaccaactttagtaaagcctggccatgcataaccaaagaacaaacaagtcattatcaatagtgaaaaaaaaaaaaagccatatgaactgattttgatatgtcaacattgtttaaatttgcacaataacagaaatacagaagagtcacatgagcctctgtaaattctctttcatataaacaacatactcaagtcttgaagctaatttttctcaccaaggaaccagaaaaacacccatgtagtgtatatactgttctcgctcactgcacgtagattttgtatatattcatagtatcggacagcaaaagatccgatgaaattatctagctgatataacaaaagaaactaattctgacctagattaagaaatacacacagaagtaacttactaatccaaaactaaaacatgtcatgcggttgtatgatgtggtagcatagaaaagcaaccaaaaaaaacatgcccacaaacctgcaaggctcctctagacacaatgtcttcacaaagctcgctggaattgcgaacaagattacttaatgcacctgcagcattcgatttagtcttgttgtcttcttctgaaagcagcagattaccaagctgaggtatggatctcctcagctcttgatacaatgtgtcgttgtggtaagcagcatttccaatctgcataggaaaacaaattacaaatcagccatagatatgataagggatatctatgctttctcatgcactacttcagaacacttaaatcaactgtgagagcttcttactaaaaatgtagttttaacaaaacggaaacagttggaaatgttttcctctagtatagcaacaaacttacagcaaaacatgcaaattttcgtgtgcgtttgtcaagatcagagcatcgatcaattaaaaggccgatgatttgatgcattgcctggaacaccaatatcatgtgaaaagtgaaaacacaatttgaagtaagcccagcatcccaggtagtatgctaaaagtaaacaggaccaatggatgaatttgtgtgtgctcataatagtatgtatgtatggttttgtcttcataacttacaagagcattataaaagtaggagctatgccggcacatgtttcctagagcactacatgtttttgcacggatgttgggatcttcgtgagtaagaaattccttcaggtgctccaaaatagaagccctgttgatgtgttcataaagtccctgaaaacaacaagtgtcaaaaacttattgaacaattttatggcagctccagacgaccataaatttgtttatcaaaacatatattaatgcatacacgttgcacaaatggtaatgaaaccaaaaacaaacacaccttatccatgcgagccaaatctgaaacaatcataagagcgtccagtgtgacttctttagggcttgaagaatcaaacaaccttctccacctattaggttccaacaaacctttatttacaagttgaattgccagaggtcgatagttcatcattttagcaagaaaggcaacaggccttcctaaatctttcgagtccataagttccaaacatcgtaaaatgacaacaggcattcccacctggaaacttcagaagaaatgaaatgagtaacatatataggtccctttcaagtttaacgtcattatgcttcacggccacataactaaatttagtcgtcaagtgaactaaaaggcacagtttgcaacatttttttagttatcctccataacgattaaccaaaaataaaaaaataaataaaaaatcagtaatgaaaacagcatagaattagtgaatggtgtgagtatgacaaggttgtacatgagttttaaacattcagttatagagcgcacagaatttctagacaacttaatataaatatggcgttttgaaactaaggaagaattttttttttttttggatctagatcttccatctttgtacattttttcttaattctacacataaaacacccttccaaactaaaacattctacccacgttattatagagcacatgattcctacccgagttactgtatatggagtttaaaaactaggtgaaaaaaaatatttagatcctttataagatacaaatgatgtgtgcaccaaaatattacatacaatgggaaagtcttatttaacaaagtggggttcgttggttatttggttgagaagacttagcatgtagtgtggttttttttatttatttttaatactatggtgcacattatatatatacatgttacagaaaaatattaaaataaataattagtaattaagaaaaacattaactggatttggaatgaaataaagagggcaaaagatctaacctccaaaagaattttaatatactttcccatatcttcttcaattactttcaccatgtccttgtcttccatacacaccctaccacctggtgaacccatattgagaataaatccactattaacagaggcggtagcagaaggcagccctggagcattctgtaaagcaacgagaggaaatgctactagatcaattactgaatttattatatctcttacaccatccctgcctccaccaggaccaacccagcatcttacaagcttgagatgtacatcaccaatcaaatcagatatcagtttcatatgatcactcttcataatctgccgaaaagtagtgcttcccccagaaagacaatggcttatagatgaaactgtccacactactcctgtaggagaaagtccagctttatctttggtactgtcaattccttcaggtgaaacttttgaaggttttttagctaacaactcgagtagaagcagagggatgccacttgcacacagctgttgaacagcgagtggtcctccccacctcagcctggattctaacaaaccaacacatccatccttaagcccatgccaatacgaaagagcaccatttgcagcctcggtactaatttcattttcattgcctaatgaaattttaaggcattcaaaaagtgaggcagttcgaggaatcaaaggcactgctatctcagaaacagaggattcaacagaagatccaacttcgagggatagaatggaagcaaaagccaacatagctgaggcaatatggggttggaaggaagtttttgttctgtcatcagaagagaaataatgggcaagaatcataagtcgagaaacctgcttcttttgggatgttgtaagcataaatagtgccgagtttcttccagttgcctttaaacattgtgcaattgttgcaacaatgagacaagaatgctgaaccaatacactgggattggctaatttgcactttaaattatttgcttcacctgtttccgtatctttattagaagaggaagcacaaaatgaaagtatagagaaaacttctgaaataatggtgccatcccctccgccgctgacaacagtagttactggtagggaactaggaagaccacacaaaacaccaggcaccattccactatgtagacagcatctcaacaaaagctgaaacatatataccaattacatcatccctcatgttaaaatactcaagttaaagaggagaataagcattagaaacatcaagtaaattcaacagcttttcataatcactgagaatctatgcccctgctaaagaaattgtaaaatgttgatgataagaatgggagatatatacctgaatgccagcacataatgaagcctcattacgttgatgaagacaatagtaaatagcaacctggacagcctttgatctgaggaatgcctttgtcactgcatcagaaacttttgctgactctgaattaagcaaggaccgtctttcctgatcactgatgtcaagtcgggccaaagaatgactttgcattgcagtaaggggaaactgatttgcacttcctttcatgtgtagaatttctgatgcatctattagtgaccatatagctcggcaggcttcactagcagcacgcagcatctcagaagaacccgagataagacttgagcccgtgatagctaaacaaagacacatttgatccactaaaccagatgttttagcatgttccaagatctgtttaagtgtctcgataggaacagtaatgtcattacgatcagaactcaaaaagtaagtctttaaactttgggaaactgaagacaatatgacagtaatgcaggcagtggactcatacaaaactttcccaagcacatcttcactgcagccaacaacctacatatttaacaaaatgagatacttagaagcaactgacattattttgagctaccagtgtgtcccaaaaagattaaaacctgtgaaaatatgtcagccaaagcaacccagtgcctgaagtatgaaccagtaatgccacttcctcccctatggtccatcaaaattttcacgatacataaactctacaaagaaatcaggtttgaattagtcaaagtcatcactgagaaaaatcattcagagcatttatttagctcttctacttcaagaactgtttgagagattattaaatttcacaagacatatacaaaacatatgataaacaatttctgattaatgctaagaaaagcataggaacaaatgtctggatcaagcttgataaatacatatcaattggaagggggaaaatgacacatcatcattaaacctgccaaaaaatgtgcaaataaatacacagatgactgatatgttatagaccaaagaagagcatatgaatataacagtaggacgtaaataacatgaaactaaagacagaagatcatgatctgataacagccaatcatctccattttccactttctccaaacaatctaacaacatgcatcacagtcatttacagataggcaatgaataatcaaactctactacgttctaaattaagaaaagcacctttgctttcaagtcattaacgtcagatgacttcaagccaacaataatggcagtgaaaacaagaagttcgcgtattatttcatcaagtagtccactggcatgaatggtgccagcagcaactaagtttgaaagaattcttagtgactgattcgaactaagaatatcatgatcactgcaaatttggcacagcaccaaagtgttaaataaatatataaaaccctttgtacatgtatggtgtgatgttgtgagtcagtgacatggctaatgatataaagaatgcaactagatttacctgcaaggagttgaagatcctttcggccatctttttagtggtaacaagacatggcgtagagcctcagtatcttgacaaataatttgtgctcctttgactgtacgtgaagcactttccagtctatcaaatgtttggccacctaaaacaaaattacttagttcacttcattctactattctataagtggtgaatataatttctaggctgtcaatttcattgagacatgaccaaaatattctcaaaatcaaaattatggtcataacttatacaataaatacaacaaattgtaatctggcatacaataataactaataaggctatgcaaggaaaaagtcatgtagacatgcatctacctggctctttaacatcgattggatctgcaaaaccttggaagtcctgtggagaagaattgcccgcagtagtggcagggacatttaactgcgtctgcatatcattctgacaggccggcccattactactctttaaaggacaaggggaatttattttgcctgcaacaagataatcagtaactattaagaaatgatgaaaagtaaatgtattaagtgaaatgacaccaaggactggaagtagctaacctgatggcaaataagttctgcccccttctcccttccatgctgcatcatagtctctaccatttacagagtgtaaattctggaaagggaaaaaaaagtttaacagtcatgtaattggaattattgaataaaaataatcacacaatgttcaggtgccagtatctaaataagaattagatataatagaatattatttaccctggactccagttcatcagaggtttccttaacaaatggatgttcaagaagagatggccatgtcaatcgactttgaggtacctgtgccctcacatataagaaaaatattaaaattggacgtcagtagtataaaatttataaatttagaaaagggaaggtcctgattataatatgacaaccttattgagcaatcccttcaagaaacttctgaaatttggactcatgttatcaggatatttgactggatcctggcacatttatgaaaattaagattgcgggcttatacttaaaactatagcaaaattcatattctttttaactgaacttaccttaacaatgtggcggatgagcgcatatacagaatttgtataaaatggaggctgaccaacaaataattcatacctgttatatacatacaatttaatttcaggtttcaacaaagatagaaacaatggcatagggaactttgcaagaaaaaatgtaagctccagtttttgtattctttttccagaaaaatacattaaacttattttgctgacaagcaatcaataccatcccaacaatcaatatttatattggaaatgaaaatcatttcaagaagagaatatattaacccgcaactatactgtaacaaaacagcaatttcagctaacaacaaggaagtagatatccgcctaaaatagtttgcaagtctaatcaaaagaatcttggcaaaaaattcaactagtaaagtcaaaccagatcattaaaatatgatgcgaaaaaaaggttacgtacagtatgactccaagagaccataaatcagcagtatggttataaggttgttcccgtaccaattctggagccatatacagtggagtgcctaaatgccaaaataatatcaaaacagcaaagacagcagtatagcttgtcaggattttatatgatcgttcactgacaataaactagaaaagtacataagtcatttcaggctcaaataagctaccttttatagatcgtagaacaacagtatttgtagacattgcacgtgcaaatccaaaatcacaaagctgttaccaaggaaattgttaaaatcacatgaatgtagaaatgctataaaacatctgtatatagaagatattgacattaataattaatttcgcaacattaagaaaatgtttattctcttaaccgtcaaccttaattacagatccagcaccaattagaatgttctgaggtttcatatcacgatggataatgcggttggaatgcaagtaatgcaatgcccgcacctgtaaagattaacaggaaatcagaaggaacagactataaagtagaaattgatctggcatgtatctatgtatgtatgtagtgaaacataaggtaaaagagtcaccacagatgaaaacatcaactgtaaccaatactgaaatgggatgcaaagaatattcctaaagaggatgtaccaactgtttcgcaattgc

SEQ ID NO: 78994 - DNA, 6723 bp, Cannabis sativa
tttttttttccttcctatgtatatgcaatgttttcagcatttttcttgggtaaagtgacaaacagagttagagtgtgacatcaataatcgctttgactcaccagcagtatcaatcatatcatccaccataactgcaactttgcctttcacatcaccaatcagattcataacctactaatataaaattaatatagattctaggatgagaaaaaaatcagtataaaaacataatcagaacctaagcttcatgcgaaaacttattaacaatttgtcttaagcaaaatgattaaaaaaaaatcttcaatagtatatgttcagaaactacctcagccacattgtgcccatggcgtctcttgtctacaatggctaaaggtgcatcagataattttttcgcaaatgcacgcgctctggcaactccaccaacatcaggggagaccactaccaaatcttcagaacaaattttcttgctagcaagataatcaagaatcacttgctagaaagcacgagataaaaaaaaaatatcagtcctgaatgaaactaatgaaatcaaaaacataaacttacaaaaatatttacctcacaatacacatgatccactggaatatcaaaataacctagtgactgcccagaatgaatatcacaagcaagaacacggtttgcacctgcttctgtaataaggtttgcaaccagtttagctgcaattgattcacgtccttgggtctgcaataaagacataaatgtttagcaatgcaacatagtttgaatgctcaaacattctgagaaatcaacacatggacaaaacttacatttgagcgcttacaactcataagtataacaaaaacggattaaatttacctttctatctgctcgggcatacccaaaatatggaattacagcagtaatatttttcgcagatgcccttcgacaagcatcaatcattatttctagttccatgagatgctcattcacaggaggacatgttggctgcaaaagatagacatcacatcctcttacactctcttgcaactgaacataaaattcaccatcagcaaatctttttatgttgatctttccaagctcaagacccatgtaccatgcaatttcctacgacaaagtaactgaatgtcagtaaacataaagcataagaaattcaattaccgattatccactcacacttgatttacacttgcatacaacatatattcttcacaacaatatatacagtataacgaatatagaagaagagtccaatagcaaaattatatggaaaataaaatcgaaaggttaattacctgactgagtgaaggattggctgagccagaaaacaacttaattttggagttatttctgtcaacttgtctctccactggaaccgattccaagaacctaggcagtgttctatcattaagaataggaatggtcggtttcacattcccaagcctgtttgactcggccatatcacacctcttcaaacaacaatcatacacacaaaaaaaccatgtcaacacaactcttaactctcaggttccaataaaaatacacaaaacaaaatgcaaatttgtaccgaacactcgttttctgccattactatctcaatcaaagcccctattcacggtcaataaaaaacgaaagaaaaaggaactacgtcgcttaccacggtgttagtagcataaattcgagtgaaagagtcacactcaaacaaagttctacgacagagcaagaagcgagacgaagaagaagacagagaagccgccgccgccaacgccgatgacgacgaggaaggagaaggcataaccagcgaggcagccatgccttagtaattacagggcgtgagattgaagctttgttagggttagtgaggagaaaaaggagaggtgtttatcaatggcggagggcactcggagattccacgacacactcggacttagagagaagagagggacttttgattatcccacttgacactttttcaacaattgacccgcgcccttatcaatcagagtttctctttatatataaccccaaaacgtcgtcgttttagctctcgtaacggtgtcgtttttggtcctttagtgtcgttttgtcgtgctcttttagcttcttaatttgagaatagagtgggacccaccaccagaatctaagtttgaaaatcaaaacatggacggaagaatggaagaggtttcttttccacgtggcagaggtccaaatcccacattttaaaacgtttgattataagttaatttttttttttttttgtgtggtcaactgtcttaggattttgtcattagaaaaggactttcatttagtttggaagaaaattattcatattaagcactatatttagaatatttgtttatggtcaaaaaaaaaatataggaataaaaagaaagaaaaaaattaaaaaagagtaccatcatcaattttttattacaattttttagtcaatctctattctttgtgttcgaaacgcatgctaaaattatttttattttattggcattattcgttatagtcacaacatcattttttttttttaatttttataaaatttcaaataatttatcgtggcaaaaataaatttaaaatttgttgaacactcatagtaaactgaaatattaataactctgcttttaatattataaactatttaaaatttttaaaaattacagaaataatattataagtataacaaataccatgtaatttcaaacataaaagtaattaaaaaaatataataaaaaatttaattagtgctgctaaaaaaatctatatagtaaagaaattgacttggaacatagaatttgatagaaaatgataaacatgaatctaggtgagtatatataatcaatttagaatttagaatataataatagtaaataacattaaattaaaaatatttacttttcctttccataaatctttaccctttttccaattttagcctataggtgagtttttgtacaaaggaaaataatttatatggttttaaattagtattagagaagtaaatactttactatcttttgcatttacattgattacattaggatgtggcagagtggaaattcctcaaaaagtgacaataatatatgtggaattaattatgatatatataaatatatttcctcaaagtgaaaattaattattatgatatatatttttatgagtactaaaaaaagaagaagagattctgtagaagaaaattgaaagcttttaaaagcttagctgtatataataaaaataatctgtatctgaccttgctaaaattctggctagattcattcctattgaagaaacaatgtttgtatttaataatttatatttatttttaggataaagacagtttttttttcttaaattataatagacaaattactgtttatttaaatggttatctgctaacacttatgttattattcaaattcttactctaattctctgttttttttaaaatgaaagtaaatactttcattatacagctaaataaaatattattctaagtgataatatgatcaaattataaataagaattacgagtaagataagacacaactttatttacagatcataaaacaaaacaaataacaacattattaagaatagataacaaatctttacaagcactaataattaaaccaaatataaaaagtatcaatttcaaccatcacatcagaccaattcttcatctttattcaacttaaagcctctttcaaatttagtctcatcaataataggctggcaaaagcttcaagtaagagactattcggcccccaagcaacaagagcagccccataagagttttgagttccgaaaatagcccccttaacattaatctttgatcttattagtatttggttaatgtttttaagtgttattgatttcttctaaacataaataagtatttattgtaaaaatatttaaattattatgttgagctgatttaattatttttaattattttagcagtaaaaatatttaagttactatatttagaatccatttttttatttggaataaagcttagttttattaatgaagtcactcaacaaaatagataacaattaagaaggcgcatttccttccacaaacatacgatcaaaatataaacaaaattttttatttacaaattgcttaacaaaatgtaaataaacattactcaaagacggtgttttaaccaactcaaagtgtccttaacccaaaggcaaagcttccaccacctccggaggaattaccaatccaaatagggaatgttcccttcatcttcagtattcttccaatccaaattagtttttcttttttgaatggtaaaatgctactttattaaccattaaaatccgctaccaaagagggtagcaagtcgaatggaacagattctatatcgaaagtacaaccagaatataatatagaacctagcctcattaaaacttatgagcaaactctgtgggagaaatctcatgtcgaggggaaaaaaatgtcaaaacaatatcatcaatcaataaaagtcagcctacaaagaagtattgatacaactggaaagccaaatcatcaaacaaaataatcgtttaaagaaagatctaaacactattcacaatcctaagagaagagcaaaagagaaaatcacttacaataaatcaaagtatctataacaatgtagctaaataaaaatgatccaccgaatgatttttaagagtgtttaagacattgagaaaatctaataccaccataatatgaacatagccaaactcaatgcaaacttcattatcatataaattgatcataactctagtcatcacaggagtcaaggcaccactaaaaagccaaatgatcgtggctaaaacaccaccagaagaatctatatcacaccaaaaccaactctaacatttggaatattcaaaccagcatcacaattaattttaataatcctagaacttcacccatcactagctctagagacttttgtaatacttaagtaactatgttattattgctttttgcagtaaaaatgctcattataaacaaattaccacttaggcagacataagtaccaaacaaattatttagatactggttatatatatataatagtttgattatttttgtcattaaataaataatttggctactcaagagttaaagtgtaataattcaaataattttttttaaaatgaataatgcatttcattaggctattgccaacacaaattagaagaggaacatattcaagtaagcttgaccactaaactctcgccatatcaagagagagagccatcttggcgaggtcatgagcaacagaattcgcaaagtgattaaaaaaaaaacttgaaaacattaagattattacaaatattgtaaatatcttacaaaatcgtgccaaactccacaaagcaaaagtcttttttattcaggagcttagcaacatgttggcaatatgtctcaacctctacatcatggtagacaagcttatagcaaagttgaagaccatggagaaatgatgcaaagtccacagtgatgccacaggaagaatagcgaccggggaaagagccttaggagggcgaggagtcttttggtttgcctcctagtagttacgggaaaatgacaaagcccaccccaaaactccttcagtgttgagaaatttatggtgatgaactcattggtttctgcgatacaaaattcgccacaagagaaccaacataagttccatctcttcttttgcataaacaacctcatgttctgaagaaaagagtagaggttagttttaggcaaataaggagtcacaaaaccaaccaatttcacaatagacccaaggctagaacaatcccgaagagcgtggaatgaggtttcatcttcaatcccacaaactagacaagcatgaactgtgggaattttatgaagagcgagattattagaagtaggaaaccaatctaagcaagttttctaaataaacactttaatcttagaagagatagaaagactctaaagataatttcaccaagaagaggggcctgaagaggagtcatattgcccctttcttaaaagtctaatcgcatttcagtacccgctcttaactgtgtacccactcgatgagttgtaatgccaaattaaacaatcatgttgttgttgggaacggggtagagcccaaatctggagagcttcatcaatcgagaagagctcatcaataagaccttcattcaaatccccattaacgagtttaagatcactaaccatagtcacattcggttagtcacgaaaagagtaagagagagaagcaaacctttttgaaatccaaatttaggacttaatacttacgttggagccatatgagccaccgaccaccttccacaaaaatttcctaaccctataaaatgctcttccaaagaaaagagccttcggatgtccccagtacatttagaaaatccccattcgaaaaataagtacctttcataactctcgcagcaagagactctagaacagagtagagtctccaagcttgtttagctaacaaggctttattaaacagagatatcgcgaaagctcatgccaccatccgacttgtgctagcaaagcctctcccaagtacaccagtgcatgttcctgttatcatcatcagcaccccaccaaaatttggcgcaaagtctatataattcctcattcaatttcacaggaagacaaaagattcattgcataagtcacaatttcacatgactgatttaagaaacacctcac

SEQ ID NO: 78995 - DNA, 2444 bp, Cannabis sativa
atactattgaaacaaatcctccgcccagacgtaagatgatggaaaaaactaaataaacttacagaaaggcctcaaataagcaccctcactttgcccgattttttgttatcaccaatgtggaataagttgtacctcttagggaggatattaaagtgaccactgaggacattcaagtctaagaggttgatgatcaagactagatctgtgtagccactttccctaatggtgaaggagaagaaatagaggaagaggatggtgcccaagttcttccgttcaaatgatacaatgaggccggagagcctttctcttagtcgggggatgtcttggttttggaccaagactacgtcaaagaagagtacgaggaagcccatcctatgagaactggggagaaaagggctccttagtggatttctcctctgttcgtccttacgtacaagagacttaagaatctctatcataaaggacttcttggcagagtggatgcctttttgcctaataccaattacctggccactaacctcgaagagggactctgagattggtctggaccccttgctgaatatagcatgatcttgcctctgtattcgtatttcaaaaagattgcaaattaccataagatctgcccaacccaattcaccccgaaagtcattaagtaattggccatgatacaaattggttctttgacttgaaatttagccccaaacagaacatgtcaggttacttttatttacccataacgagtaccaatggctgagtagcacgatgcataagaacgtctcaaagattggtagcttcctccaagattactatattgtgaatgacatagatgttgaccatctttcattcagttggctccgagttattgatgtccccttctactttggggttggggcaagggcataagaaattctttaacttccaaactatgtcggacatttctctcctggctactgttgagaatttcctcaggtatagactttatccgtctgaaaaggaacaaaaaaatgatcaggcagataaggattttactactgagcgggaggtcccgaagaagaagaaggagacactcgaaaagcaaatctaggggccatgagagcaacctattcaatttagagatgattctgaagcagctgctcgtccagccgcccaagtggttgttggcaaagggaaggtaatagttgaggagtcggacaaaggagactcctctgatgaggatgctttatctttactagttcgggagggtgctcctccgaaagttcaaggtaggtattttaatatttaaccttatttcctttttgatttgtacagatacttatcaagtattttgttctgtgcagctatgtcgaccaggattaaaaacatgttgaagaggaaagtcggtgacaactatggataaaaatctcccgttaaacagccaaagttaggggatacttttccagtcaacattgccccaagcatcaaaagtgcatgttttaatactgaagaaactacggaggcactgactcctgggatggaagaagttgtgggcattaacatctcgaattttccatctttggacaagaagtcttctaaggcttgcccgcctaccagccagtcaaaaaattccaagtcttctaagggtttggttggggttaatgtttccaatggtgagtggcacaccttacctaagtcgactgctaccacaaccaaccttcagcctaaaactaagaaggctaaggaaatacacggtttttatcaaaagtgtgttatgaccgatgtgaatgaccaactagctagtactgaggcctttaccggtggagcttttggtcaagggttttgaaagaaatcactagggtaagtttacaactactattaagtttttgttcagatcatactgtttagaccttttaacttagctttattgtttcttttcttagtccaatttgaagcttgcatatgtttattcccggactaagtccacagctcttaaaaatagcacgaccaccaacaatctaaaggaggtcttagaagaagccaagggtgatgccgagaaaaagggcattcaggttggaaaagtgaataagcaactcattgatgcgaacaacaccatcaaagacttaaagcaacaaatagaggatatgtcgtccattgccaagttggaggaagacttggagtaggaatccaagagagtatgggaactaactaaagagagggaagggctcccaacacttcttcaaagccaggagaccaatgttaaggactttactgaggcccttaagaaaaaagaagaattctctctaaaggagaaaactgctcttgaggaagcattggctgctgagcgagaaacacttgctgttgagcaaaagtcctatactaaagatgttgagtatcatgaaacaactgttgcagaggtgttttataagttcttgaaggctaatcctgaggctttctttggttatcttaaa

SEQ ID NO: 78996 - DNA, 2063 bp, Cannabis sativa
aaaaaaaaaacaaatcggtactgagattcgtgtgtcaacggaaattaccagaataaccttaaattatatatagtaccaccggtgaccagtttagcattaaaatgagaaggcaattttggtcaattcctaaacaatattgcaatggtaagaggaaatgtatggatatgactgtgtctgtaagtccctagaagataagggtagtagtagtactgagttaggagtagaaagataatcactacgtagagaaaaaaaaaattaaaaaaaaaaaattcaacaaaattacataatttgatgcacaatttggttttctttcacgtgaccatagcaaaaagtttcatactattttcaacagttcagtactgacctgggaccaaaaccctaacctaacaacaaaatataataattattcatccaaaaagaagcaaacaaagaaattcaagtcaatttcagagtattcgattcagaaaatctcttcgcaaattttctgtacatttttacaaatataataattttcaattgtctgtacaaaatttaattaccatgccctggcaaaatgtcctctcaatctaaacaaaaccccaccaaagatcactctgtttcggcgagattacggtacacaccgacaaaacgacgtcgtttcagtaccgccttgccatctcttccccatggaaggaacagaagtttcaaagaaaatacaccaaaaatattgaattgtatatgttatagtttttacgaaaattacagaattagtgaaaaaaaaaacgaaaaagataaaatcacctcaaacaagccttaattcagtcgggttagaaaccaaaaaaaaatggtgatcactgatcagggattaaaaaggcgattgtggcagcggcatttccaacctaaaggcttgtaatcaaagtacttgttacctgaatctaagaccacaaccgggtcggttcgggtgacgcccggtcgaaccggttcgtgactgggtaggcttgggacttgaactgccatgcaggggtggcacgtgttgcacttgttgtggcagcttggaggggtcgaacccagtcgggatttttcctcaacctcaaccaacaacacctggaattcctaattctgtatcaatcaaccagacccaaaaaaagaaaaaatctataaaattcgtaacaggggtgtttttttttaatatatatattaccttgcgtgaagaagaaattggtggaatgtgtgagtgtgaccgagacagagaagagcaaggagagagaagaagatggagaagcataataacccaaagattaaacaaggaattcatggtgtttgatgacatgaaattcatatcatatcatgtcacaccatgaagtcatcaactggtcaaagctttagaaaaaaaaaagttagccaatttagttttaaaactcggaactggggaagaaagaaattaaagagagagagagagagaggggtatatagttgagtgatgaaatatataataataataaacaaggagattgataggaaagaagagtagtggcattaaaggagggtctgagtctgatgtgagcagaaactgaagactgaggagagaagagtctgattaatgcagtgagcgacagagagagtgaaaggaacaatacagggaagaagaaaacgaaacacgaagctggagtatcacacgtcagatctacttatttggattatagtctacttttctgaacctcctttactactcttatcatatgttttttttttatttgtattttttttctgtgattctaatataacatgtgtcacactagcttgttgtactagctataaaacccttaccataaattactttattgaaaaaataaaaacaacaaatttgtaatatatttcatttcatgattttttaggcttttaccatgaaaaattgactaccggtataaaaaaataaaataaattattggccactaaattagttgaattatacatatttaattgtacaaattgttataaatattaataattatgtggatgtctaaatcttttatttattaccattaattgtaatcaacattcctttttttcttagtttcttaata

SEQ ID NO: 78997 - DNA, 4251 bp, Cannabis sativa
tttttttttttttgaataaagaggtgaagtgattaagtgaagagggcataacataaatatcttatgtaatccattatttttgttttgtcaatagagtcacttaaatggggtcacgaaaatgttcacgggcaaccagattttatctctcctccctttatattacagattaaatataggtctctaatgactgtatgtaacagtactatagaggaaagaaataacaaaattgctaaaatgtgatcgattccctatcttttaatgtgataacattagttttgtttttggttagtgtgatgttatgctctcaaaatagacacaagaggttagtactcactaggtaagcaaatcaaacagtagtggttacgttacatatatactattcatcaagctaaaaaacaacatatatatatatatatataagagagttgtatatgcacgagagttgatacagtcaaataatctcatttcacaaaatttctattttaccatatcttcaattatctcatgtcactcacgtaaggaaaaacttaaaataaatttcatcacaagaaaaatccataacaatatgtatatatattttatatttaaaacaaaaaattctaaaaagaggaagaaaaaagtgaagagaatagaaataaataaaaaaaaaaaaagcaggttaagctgaaaccgtgtcaattgtttatttaatttattttgttgcattgggttagaagtgaaatggtctaattcctcttacgttctctcttttttttatctgtgtgtgtgtgtgtgtgtgtgaaatcagaatatgatatcttctctggcagtaataaaagcatgaaatgtccgtgcctcctccaatacccacattgactggtcttttttctctgtcttggaaaagcttttcctttttttcttaattttacaataataataataataataattataataatatatagtcagaagaagtcaaggaccttgatcaagtttttgaaaagctctatccagagaaagaggcagctttaaatagttgaaagttattatattatatgttcactggagtctctcctcctgtcctgtcctgatcttctgtcacctacactacagctaaccaccaagcaaccaaagcagccaccttctctctctctctctctcattctcttttctgtttttttcttctttgtctctgccaagtgtttgataaaaattcagggccatgggaagagccccttgttgtgacaaaaccaaagtcaaaagaggaccttggtctcctgaagaagacgccgccctcaagcactatatgcacaacaatggaactgggggtaactggattgctctccctcacaaagcaggtaatcttttatgcccctttttcttcttttttcaaaaaggtggtaagaaattaaagtcgacttatttttgttttgtttttctttgttttatgtaataggtcttaaccggtgtggcaaaagttgtcgtttgagatggctgaattatctcagaccagatattaagcatggaggttttactgaagaggaagacaatgtcatttggaccctttatagtaacattggaagtaggtaagttcaattcatctttctcatctttgtttttatttatgtattcatagctttttatgtatgtatataactatggtaatttttgacttaaatttattaggtggtctgttatagcatcacaacttccaggaagaacagataatgatgtgaaaaactactggaacaccaagttgaagaaaaaactattggcaagaagcaccaatagcaatgagactactgataacagtactactactgatcatctcaacttgactcgtttcagttcacctttgattaatcccaaagctgaaaactctgatcaggggaactctgcttactgtgatcatagtactaattcagatacattaccatatctgatgaatgtgaactgtgtgcaaagctttgatctcaaacacccaactagtcaactttcttactcatcaaacccagtggaagtttctgattttggaacaaatgggaacacaggctccagcatttcatcaacttcatcatcatctactttggctatggagaattgtactagttttgcttcatgggctggcacaggcaatgtcaatattgaggatgggattcttttggacttgggatttgactcttctaatgatactttcctcagtggctttggattttaggtaaaaaaaaattcatattgagtaaatttgttcactctcttttgcttaactctgactaatattaacagtgcactagctctaaactgaaggcttcattcagtaaaagtggaataataataatgattgaaacagaagctaagtattaattaattttagttattcaaatagtaattaattaactttactaggttgttctagttgtggttcttttattgggtccaatgtatgtgaagaattaaagttataattacatgttgatcataaatatatgaaacatggaagatataagtaattaattaatggacatgtcatgaggaaggactgtttcccattatgtttgtgggggaacctttccagagctttggcccttgccttgtacgttctattaaagtttttatttatttaattattttatttttttatggaattaaaaatggttatgaatgattgtaatgtagtcaaaaaaataaaaaaaaaataatcttttttttatttatttatatttagataaagaataattattctgtattgtcagtggctagtcacgaaaatttgcaccgggccatgtagccaattcaatggtgaagaaaaacgtcttaatctaacaataacatatgataaataatatacatattgagtttttccatttgtgatcctaaagttctaaatattttcttttgtttaggctcaatttctagtttgttttcaaccagcatatatataatgaagacaaagtcatggtgtttaattatataaaccataggctattaattagttgaatatccgagtataaatagtacactataattccaattaatatttcactttacaatacattaatgtaaatattacagtatagaaatacaaatacaatatttccttatttcagtgagattaattactttatggtacaaaactctactcgagagaacttggtcaaaagcaagctctggtattaatcgattatttatcgtacaccaaaagaaagtatatcagcttttttttatttgcttgcgtccaaatctacaggctgttatatatcattatcatatcattagctaatggaatagcttttgcaattgcagctatgtttttcagcaaatcagacactaatttatacaaatttataatacacacacactcaatgtgagtgactcctcctgattatgattatatatatatatatatattcttgatcattcaaacttatccacacaacacaagtaattactatatactatacgatggtttaatcattatatatatgtactaactttcgccaacaatctaagttaagggaagaaaaaagtagactcatttagtaagtagaaggagatgtatgcatatatactatatatacgtataattaaacaatatagaatataaatacacaaaaacatatgtataataagaaattaagaatgtcataatcatagtttgtaaaaacgacaagacatatatattttttaatgatccactaaatttcaagcatgtacctttagacaattcgttgggcggcggcgtggtttaccctctcattgttagtatattctgttccaaaaacaatgcgacaaaattaatgaatatatatatttatagtatatacaaattcaaagaaggaataaaaaagaagacattaataagctattttgttgatgcatgtaacgctagctaccttagctatggcttccaatatatatacatgtttatctatatatatgtggtgatcataaagtaaattagtagatcgattattgttgtatgatacatttttagataactatataaataaaggatgtttaaagatacaggaaatgaaaagatataatcataacatacaaattgatgtataaaatatgttatcttcattatacttttggctaaatcaataattaaaaaaatgtcatttctcattagtattaaaataaattattaatgacaagtttctaattcaaaacgtttatttgtttttttggtgataaatttggcataatatttagaacactaaaatattatactttaaaaagtatagggaaatttgattttctatactt

SEQ ID NO: 78998 - DNA, 5100 bp, Cannabis sativa
aaaaaaacaaacaataaccttaagatcacttccactatagccttctgtcatggttgcaagttccttgtagtttaatctttcttctattttctcttttgcaagtagagtttttaagatcatttctctgttatccattgatggaagccccaccaatattctgtataatcaatattatgtgcattaagatgtttgagattttatttcaaaactgattggtaataaatattaaaggtatgtttagttaaaatgaatgaaaacataaaataagaatgataacgagaataagaataaaaatgagaatgaaattaaatttaataagcatataaaaaaattgataaaaaattattaaattttttcgtcatctgtattagaattgttttaccactcattttgaaatgaaataaccattcaaacaaaatgatagaaaactcattggattggaatgattttataatacattaaggtgatgtttggttggaggtaatgaattggaatagaattgaaagaaaataatttttattctattcttttgtttagttgcattttagagtatcagaatgtcattctaatgaaatgacttttttatcattttagtagaatgactattccattttgaaatgtaaagaatgactattctaatgctaagataagaaaaattttaataatttttttatacattttaaattccattttacttctatttccattctcattctcatttatatttttatattttcattcttctctaccaaacgccacataagggcatgtttggttggcaggaatgaaaatataaacataggaatgaaaattaatttatttacataccatttaatttaatttcatttcattacctccaactgttacttaaaatataaccaaatagatgaatgaaatgaaatttgattattttctattctattaccaatttacaacctaaacttttacacattatcaatgtaagattctctaacatctttcaaaactaactcgacataccttctttcgaaacgcctgataatagcttcatcaagatcaaaaggcctattagtagcagcaagaacaagaatcctttcaccgggtttcgtcaataacccgtcccaatgtgtcataaactcgttcttgatcttccgcatcgcttcatgttccccggctctagacctctgtccaagcatgctatcaacctcatcaacaaagataatagttggcgaaaccttcgccgccaaagtgaaaagagctctaacattcttctcatcctcaccgaaccatttcgatgttatggtagacatggaaacattgatgaaacttgctccagcttctttagctatggcctttgccatcattgtcttaccagttccaggtggcccaaatagtaatattcctctacaaggcttcaatagtcctccattgaaaaggtcaggtcttctcagtggaagcattactaattcttgaagtgattctttgatctcatctaatgcaccaatatcagaaaatgtcacaccaatttcacttgctggtattacctctggccttattctcttctcaaattcattgtcaggtggtacttcctgttaaagaaaacacacatttttcttaatcataataagcaaaaaatggtgtcaaaataactaaaaaaaatggatatttacaggagtttttactggtgctggaattgaattatcagcagcatctttctttgtcgcggaaattgctgctgctgataatgtctctgctcctgatttgttttcaggagcagcgacttcagatttcgcttctggcttctctttaacaacctctttcttttcttctttctgaaaatgaaagcaaatttaagaacatatactatttcgatttgcacatttcaaaaccgtcagcctatatttggaagttggattttgataggaaaaaaactaaagaacaaggaaaatatagtcaagtttgatatcaaattttttgttgaatcaatttctttatcatacaaaaaaaagaaacttatgtgagtgttttgtcccatatcgctcatgtatgagtgatttgtgagatttatattacatacaaacataatacacgcttatgtgacaagttacttttcataattgaaactcatcttaaataagaatagttttgagttttggtagttgaataaatgttatgggtaaaatataaataaatctataaaaaaaaattcccataattatctttacaaaaccaaacattaaaattgatcttttattttcttttgcctacatttttcttacttttttcgtcaaaatctaactttcatacataatctaagtaaaacaaacaaagaaacaaaccttagatgagtcagccttaacttcaagtttcattgtgtctttaccatcaaattttccttcttggaatatactcaatccatgtgacaaactgtttgacaaaaaaacacacccccaaattaataagtaacaaaaaaattgttaaaatgacaaaaacaaaaagattaatcttaccttttggaagaaataatgagttttccatttctatactcaggattcttgttgttcatcaagtgataagaaattgcagacacaacaatctcttcaatataattactcaaaaccattgtgtcttcaatacaaattgaatccaaatcatcacaatcaagatcattagctgagagaacttccatgatatgatttctgttatccttaacttgaatcattctcatatcttcttccaatttagatttccaactaacattttgggattcatcttcaggtggtcttatctcaattgtgtaagtaaaaagagcagaaatcttctcatctaattctctgtattcatctttaggatcataaacttgagacccaagaattaaaactgatccagtgagtttgttcaacattttctgaaataagttgtatattctttgtgatctgcataagaacttctccacatctctaaggtacaacacaatgggaccggttttcgaaaccgaaaccaacacctacaaaaagaaaaatgaaatctttatggtaagattaaaaaccatgatgattatgttagtaacatgacattgttcattgttacttactctgtagagagattgaataaggagcttttcatcgaagcaccagctgctttcgcgcctaagagggccgactaaagagtgaaacaggtgaagaagtttaaggaacacatgtttagatgggaagagaaagttgtataatgtgtgaaagaaagaaaggaagaaccttgattttgattggagtaagaaccaatgttactgatactagcagctgcagaggcatttctcctaagcttgggaagagtattattaccttctattcctctgcaattatagaagctaggatatcaatcaaagcataaatatattatgaaacaaaacatgaagacactattctatgatatgattggttgggagaaatgaaaatacaagaatatgaataaaaatgggagtaggaatagaaagaataaactttaaagttcataaaaaaatttgatttttcttttactttctgttttattctcccaaccaaacgcagcctaaaagtaatgctacataagatctcaataaatgagatgtgattcctgagattaattatatatttgagtatatatttgagtataggagtgacaattcatattgacgtgtcgtgttgaggttttaaatttattaaaaaattgttgactcgaacagaacccgtgacacgaaaaatttgtaaaatacgaacacaaacacgactcgaataaatttcgtgtcatgtcaaacccacagaatctcgtgtcgtattgatgggttgtaagttaaattgttgttttaaagtgtcattgtgttagtgttcgtgtcgtgtgaagttcttaaattttttgtattgtgttgaacacgtaaaatttcaagttgtgttcgttttaaagtcgtgacctgaattttaatcacaccaaacagatcatttaaggttaagatttgataaacccaacaaatcaccctcacatgaacgatgtaagaactaactaacaattttcaacgttcgctcattgctgtattattgaataagtaacaattttcaaataattaatctccaaaataccttgatcttatttcaacaccactactctgccttcttaatgtaccacctgaaactgaaacagagttttttcccagtcagaacaactcttataataaccgttcgatcaatccaactaactaataactcgaaattgtgagagatgaacagaatacattggggttcatccctttgttgaagcccagaaaatgaaccaaataagcctgacaatcgctctaacgttgactcagaagttgaccttttaaaacactataaacaaaacaacacagtcagtcttaaaatactttaatttacaaatatatattataactaactaaaatactatggcttactgatccattgtttgaaccaccatacttgctctgaatctgcataaataaacaaaccacttaattttaaatatataatcaatagaaaacaaattaaagcttttaattaattaaaaacaacataacattaataattacctttaatgaaaaatctgttacatccaacaacaacaacttggcttcaaagtaatgagccaaagccttggccagcatttgttggtaaagttcttcaaaaataaaaaatcaaaattactatacaaatcaagattgaatgtttataatgttggaattaattaaaattataccagcagggccagaaagcaaaatagctcgactagcaggagaaaggtttcgagtgtacttagaaacctctgcgtgtttcagatgtacatatgctgcacttgttagtagtactcttgtctgttcactgtaattaattaattaataatcacatattaatattaattacagacaaatattattaattaaattatctaaactaattgaacagaaccatgcatgcatgcatgcaaaatccttcctacgtgttttataaaattatcttacaactaaaactgatgatcataacaaacaatgaccaagccagcccaaaaattagcggaaaactaatacatattaaaaaaattaattatttttatttttctcatgtaattttttttttt

SEQ ID NO: 78999 - DNA, 6603 bp, Cannabis sativa
  modified_base (41)..(58): a, c, t, g, unknown or other
tatttttgaaaaaaaaaattcgtgtgacagtatttttgtannnnnnnnnnnnnnnnnnagtatttttgtaaatttcccaattctaacaagtcacattaatataattgggttgtcatgtttcaataaggaaaatgaaattataataacaatagtttgccttaccatgttatttgtgattcaaattagcatctaaacaattatcattatctttttcttttttcttttttctttttaataaataaataacaaatgcaggcatcaaaatattaatgacttttaattttattttttgcatttttaaattaacaaaaatattttataatttatttattgatttaagctgagttgtattattctttattttcatatatttgtatttaattgattaatttttataaggtatgaaaagtgactaacttttttataattggaaagtttgtcataaatggtaagttgatgaataaattaatttctatctttctaattgtgtaaatcaaatcatatatgagttttctatttggtttcatcaaattttttgtgaaaaaaatcaaagcaaggattttctttttctataaaaggaaaattgcatttactgctcacgattttatagttacaagtagaaactcattggctagttgaagatctattttagggaagtgcctagtgagttgtggtcttgttcagaccgtgtgtaagttgtcaataaggtgtatattgattataagtactctttatagtagctagatcttggatctctttcacatatttgtatttcattcatatcttgtaagaaatagtgtctttgttgtgtagaggagagggtgttcgtctcttcttctatatttatgtactttgtattatcttgagtctgtaaacaagtctacaaaaaaataacaacaacactgctaccttcaggagaaagttctataagttttcgggagatagtttttcaagtcttgcctcgagaggaaacaagcactcttcaaggagatcaaagggagtttgatcacttgaagtttcagcaagattcagttagaaagtggaatacatcaagcttgcgacatataataagagggagtctatttatgcataagttaattattttgtattttgtattcagtaccactgatgggcgggctccgctaaggtggctgggaagattctataacaaacatcaccacactacttgtatatctatttgcattgcaaaatacttgatatgagatagggaatcttctttgcccatatacattttccatgtgggcattttgaacttgtgcggaaggtcgagttcatttattcgagtaaagaaaggtgatcttcatgtccaaatgagttctaggtaggggagttttggatacgttaggctcttaagattatttatttgggcttgcatccctggatcaacttgacctacctgttgcctagtctatgtcacttgttgacgccctagagctcatactagcacgtaagtatccaaattaattggttgaacataaggagaaatcgtctcgtcccgcttttctctcctttggttcaaggtattactgagatcacccacttggggtcccattctatcaaaaactgattggtcgtggggcctcctcgtagaattagcattgtttggaggaacttctctacgagcacaacaacgctgggcacgggttacactgtctgcttcatctttgttattacttgagaatgagtgattgatttgtattgtggccggaccttgctgttgatagtactgaacttacccattttgttcataaacaactataggtcctcgagttcccctaggcagctggttcactgcattaggttgaggaaggaagtttcggatgttttgcccaagataagtacttggtcgtctaccatttggcctacagtgggattttatgatcttggattcgatgtcgcggcctacttagtttgttgaacgtaagttgttgtgagctactccagcccattatgttgtctagtcgaaacataaggccctttccccctgttgggaattctaataagtggagcattttcccacagctgccgcgttaaaatccattcgatgtgcacctataacttaaataataaatatgatattttataattaattaacgatatttataaaaattattatattaaattaatatactcatttttgtgcacatagaaccaccccattttacctccacaaattaaaaattgaaacttttttttttaaaaaaaaaatagaaaaattgaaacttttttttttttaaaaaaaaatggaataattgaaacttttttaatgagaagaaaataaaaattgaaactttttatcaaatttgggatatactgaaaatcaacgacaccgctcctaaccggagatgtcgtcggcggcggcactaccagacgagctatggcgaagaattctcgagctaggtataactataaagactcaatctttaaccttcaaagatctctgtcggctttcaatcacctcgacacgctttcgccgattatcttccgacgacgatctctggtcccatcttctctcctccgatttctccctcgaccgttgccgatctccattgctcttttccaagtcattgtacaaattcaggtaagtaagaagctctgtaaatcagttttaggattctctctattgcctttttgtgataatattttagggttttaggtttgagagggaaagagagaagaagaaagctgctcacagaagggaaatgttgagaaaagagagccaaattgctgaacatttgaaaaggattaagaaattgaagaatcgtttggtggaggagcaagaaaagatgaaagcaaccattgttgagttatcaagtttgagcaaaattaggtaatggtgtttttttttttttttggaaaatttgccaaactaacaatatgaaaatgttaaattagagaaataactacattgaatttaaactgtgcgaccattcgttagggtcgttattcgattcaatgaatctcagtttcagaaccgaacatgagattttcactaaacatgtatgtaaaggtataatcggaaatttgacagcaatattaggtaatggttgtttttcgaaaaatttgccaaactaacaacatcaaaatgttaaattagcgaaataactatattgaatttagactgtgcgaccattcgttatgattgttatttgattcaatgaatctctgtttcagaaccgtaactacgtatgtaaaaggtataatcggtaatttgatagcaaaggcaataaaaaatctaatatagaatagcatttcgggtgctataaaatacttgattagctgatgtttcaaaatttaatgttagttcattggaacaatgtaaacaaacaccttaaattctgattaatgaaaatgtaaatttatagtgatctttagcatagtgtaatttttagttgcttgtgtgattaaacatggttattttgctaataagtttttgataatgactacttttacaaaattattttttgtaaaaatccaatacagaatagcatttcgagtgctagtggatatgattgattagctgatattttaaatttaatgttattcattggaaccacataaacaaacaccttgaattcccattaataaaattgtgactataataatctttttatggtcgcatagtgtaatttttagttgcttctgtgatcaaacatgattattaattttgctaatgactattttttgtttttctattcttcaagttttggtttttggatattttgattcattcaggcaagcatctgtggctttgaatgtatggcagccagaagtggttcggggaaggcacaagcagatagtggagcagaatgttgtgccagttgagtctcgagtccatgcaatggatatggagctcaagctttgcaggcaacaaattcgtggtttcgaaaaagcttatgtaagttttgagatttatgatattgctatctctatgtggcaaaatgtaaagattagtgtgatggattttttccttttcggttttattttgaggtagaatgatgagaagaagaggtttgatactgccaaagaagagttgaactcattgaagtatcatcctttgaggattaatgaatcaacaagtggggtgaaaggcgaatccgaggctaataatgtcgagagaaagaaacggagaagatgcaataaaggtgagattaaaagctttgttctttctttcaatatatgtcatgaagttgcagtttctaattctaagtgctaaccttgttattgcatttctaatttcttaactatccgatacacaacgaaacttagtttcgtctacattcttagaacgatttcttctttcatgtcgtaaattcattgcaaatcacttcctcactgccacaactatgctccttactcttcgttcggttgttgttgttggatgctgatctacgatccaacttatgttcctatcttttgtattgcatattggtagattggactgcagttcctaactcttgtagatcggttggttttgtcgctagagtgcgacaatacccattggttaactgttttaggccatgtttggtaggaaggagggagagtaaaatggatggagagttggcaaaggatggagaatataaagaagagagaggaaagtaataatccttttatattgtttggtaggaaggatggagtgattgaagaatagataattactaatttataaattactattttattcaaataattattttttaataatattttttgagggtatttatgtaatttataataattgaagagggacagttccaatccttctataattagcgagattccaaactaggaatttaagtggatttgctatcctctcacctctcatttctctcattcaatctctcttaccaaacaaagggatttattatcttctctcacctctcctctccatccccacttttcgctcgtaccaaacatagtgttagagtaattgtttagtcggaaagaaatcatatagatatagctatagatatagtgaaatattcttttccatttccttctcgtctcaactttggattaattattaaatcacaagttgtagtgaatctagtggtgatgttgatacattattcaactttggattaattattaaatcacaagttgtagtgaatctagtggtgatgttgatacattattcagtgtagacatgtaaactaagttaagaattgaaggatgagtattgttttagaatttgttaaaagggttgggaaaatattcatttattttttcttgtgagttttctatgtagaactctttttctaatttgattgtgtttggggattttctaccggttagttgtttgcaaatgtaaatttttgttttcaagtttaatgtttcaatactacttattcaaacagtttacttcttggtgatctaggatcttgatgaaagtttctattatgcaattttcaagcttaacgagtgtataagaggttgattttgtttggttatttgctgtgattcgtaagggaaattccaattccagataatttgtgcaatctcacaccgctttgggaaagttaagcatgtttaatctttataaacttttgagtttcattcactatagggatagttggaaatatttaactaatttaaatcaaaattcgataagccctctatgcagtagttagtgtatcaatttgggaaagttaagcctgcttaatctttataaactttgagtttcattcactatagagatagttggaaatatttaactaaatttaaatcaaaattccataagccctctatccattttgacaggtagttgtgtatcaatggaatatcatgtatattccattgttgtgagcaatggcgctatgtgggtgccaagtctttcgaacacatgttggtctattttacttacaactctattaaataaacatcttgttttgtattctatctttttcttgaatttaacttaataagtcaaaaagctaacactttcttttatagcattcagtagttactcatttgttaaattagcccatgtgggattcaaaattgaaccccaacctatcaattctaatttattaaatatgtcatgatctcatgatgaattgtgttgaaatcaagtgcatctagttgcaataatgatcaactatagttttggagcaattgatatatggttatttattgtttctgattttattgcaacctacaacatttaaagaatcacagactctctgttcacttaactggtactataatttctgtgcaaacaggtactaacaaatatggtactttaatgtttatccagatcagaattcagagaaaaaatcatagctggtcatgcatctttctcagcgaccgagcatgcgcggtttggttaaccgcttccttcagacgatggacataattggtaaaatgattttctatcagtgaaaatctattaaatttgctttgtagttggctctgttgatgatccgaaaacacgtagatcttaccatgaaacttcatacatggcgcgctgaagatcggtttaggtgaaaaaggccagcagtaaagttttgtgctttgttccatttgctgtgatgaacaatatagttgtgatttattgaaatatctatatatataatatatata

SEQ ID NO: 79000 - DNA, 2512 bp, Cannabis sativa
  modified_base (1023)..(1026): a, c, t, g, unknown or other
attttgtatcacactttataatagcatatacatcgtacatatgtacccacaataggatttcaatccaacatgttgttgtgtgttttgagggtttagagttattctatgcttgttttagggtatattgtgtctgtattcgagtgacagacatgaatttgaggttttatttagggttattttctaattttatcattttaaccatgattctttatactatttttgaatctgtcattttagtgttatataagttttcagtcgttttttgatgggttgtggttgtgtttgtatttgttttatggtttataatgcctgcattttagtcgcagacatggattttggcttgctttgttcatcccttatcaaatttttttaatgtattttaatcgtgtttgtttgattgttttgaattattttgtttttttagggtaaagagaaatctcctacggttaaggttcaatatgataatgatgttaaagttcttaatgagatgacaaaagagttcttcaggtataataatattttcccccttttttgttgcagttgttatcttgtttggtgtattttttacagttgttttggttgataatttgatatgtaattgttgcaggattggagttttaaatatatacgcttagagtattatcattccaaagataacattattatttgtactaattgttcatacttgtaatctttaggtatgaattctccctagcttcataatcaacataatttttccttcatcccagttgtcgttggtttttatgagaactggtatagaatttatgacctataacaatttaacaatacaacataatttcaacaaaacaatggtagaataattataagacaattaatggagtgatgttttgaaaaatctatccctattttcatgagatactcattattttttatagggtaaacagcggcataagtacctaaaatttaatgtttgtaagcaacataaactcaatatttatttttagcggcataagtacctaatgtttataaaactgtaatttnnnnctaattttgtcagtacaaactctgttatcgtcttaaacagggcacatataaaagcctgaattctagatcattaagtcaaatatgtagtatcggttacttctaaatgttcttttaataaattcaaaatagagcctgtactgacaaaagtggaagaaaattacagttttacaaacattgagtacttatggcgctaaaaataaatattaaatttatgccacttacaaacttaaaacattaagtacttatgccgctatataccctttttatattaattaatggtgattttttgtttattatttttgaacaaccccaaaacaacgtcaattaataaataatgcatatagaagaagaagagtagctattttagagaatgacaactttaaaacatttatttggagtgctcaaacaatatattgatcgattaggactggcaaaataggtcagatatgacaacataacttaaaacctgcacgagagttgacaagtttgggtttaacttaaatgggtttagattgacttgtttaacacatttaataaacgagtcgtgaattaccttgtctttctttgctccaaaataaaatttatttacttcattttttttctctcaaaatttaattgccaaatctcttacatacacacactattcaagactggtcctaagtaaaatccataactaaattccaaaaatgtattaggttcatgtctattgacatggtttctttagcttctttgtcataggttgggtgattttgtgagttcttgatcgtatgtactggtggttttgtcttgtgaggctctgtcagaattagtgttttgtgttgggtttggtgtgggcattggttctgctgatcaggatggcgtcgtccagtcgaaacaccgaagcaatggaggatgacactttgcattttcagattgaggaagaagacttagaagcagttctggtttcagtgggtgatggggaagaaggaatagatgaccggtggtgcttggttggcaaattcctatcaaatcgagttattgattttgaaaaaatgcagaacatactcgcttctttatggcaaccagggatggggatgttcgtcaaacagttggatactaatcgatttttattccaattctatcacgaggttgatatccaacgcgtgatcaatggaagtccttggacttatgatcgaatgcaattgataattgaaaggcttaatgttggtggagatccaaaatcgctacctttgaatactttggatatttgggttcaattacacaatgtggaaccaggtttcatgacagaaactactctccgaaaagttgggaatacaatggggaaatacttggaatcggatcctaagaattttattgaagtatggagggattatcttaggatgagaatcactctcaatattgaaaaaccattacgcagacgattgaagatcacaaaggatgatgggacttggttttggataaattttaaatacgagaggactcctac

SEQ ID NO: 79001 - DNA, 4242 bp, Cannabis sativa
tggttcctcaatttcacaaacaaaaagcaaattgctttaagttttagaattttgttaaaaaagacagctttgttttgttttgtttcattcgttcttttcctgtatttaagaatgtactaaccgtgaagaagatggtgcaagctcccattaggttggtaatcatagaccagaagcttttcctctttggcataatagtaagctcttaatttaaccacatttgggtgtttgagctttccaataacatccatatattgctcgaactctttcctcccacatgggtttgcatccttaagcctcttaacagcaaccgtacacccatcgtctaaaaccgccctataaacagttcccaagctccctttccccaacatctccgccgaagctcggagcaaatcctcaagctcgaattgtttctttcggtcaaaaaatacaagcttgcttcgatccgtaccagtagtaccatcactatcagcaccaccatttgcgtagaccttcttctcagagccatagctgcttgaactttttctcctcttcccactttcactaccggccatggaactcgagtttctctctttggcgcaatagtgagccacgacgaacgatattatcaccaacaaagctacgctattggctatcactatcgccactacagcgccagggctcaacccttttcttgattccttctttggttcgtcattaacggttgttcgaggtaacgagctcggattcgactgtacggtctgatcagacgggaccggagaagatggattctctgtaaatgaacaaaccggtaatgggttcgacccacatagcccttcgttacctgaaacactttcttcaccgaacttcttcaacatctggtcgggaaaccttccgtaaagctcgttgtttgtcaagttgagttctttaaggttgagaagcgaagcagatagattaggaaccttaccagagagcatattatcctgtagtcgaagagtgaggagccgtgtcaaatgagaaagaccctcgggaataacgccgcggatgttgttgtcagagaggtcaagacggagaagtctccggagcgacgaaatcccaggtgggatttcgccggaaaggtcatttccggcgaggtaaacgagtttgaggtttgtgcaattagtaagaggcgtaatggtgccgtttaacctattgtcgtggaggtcaaggagccggagttggtcgagtgaagagagatggtcaagagggcctcgaagattaagtgaagggagggagagagagaagactctgccggtcggagagcatcgtaccccggtccaggcggcagcgcaggcatctgggcctgtccagttggagaggagaccaccgtgggtgtcggtctggagacgaaagcttgtgagggaatcggtgtcattgttgttgttggtcggagacggagaagaaagaacgagttgagcaaagaagagagtgagaaaatatggtgagaatgaagagaagatggccatgcgaatgcgatgatgatgataaggtagcttaatcttcctcattagtccaatctttttctctttgtttgtttttgggcctcttgggcgggaagaggagtactataatgtgtaagcaatgagtgtgttttttgaatataaggggaaaaaatataacggatttctctcactctagaaactcactattttgtctttcatgagagagaaatgagaataaaacattttctttattgtttctttctttatttctttttctttttctttttcttgttggtaatggggtgagtgaggaagggagagggaatgattatgtgaaatgggtttgttttgtgtttcccttataattatttgagaggcatcataattatgataatagagaaagggaataattaaagtttaataagagggttagaaaatgggtaggattagattagaaagtctagaaagagagagagagaggtgggtttttggggagagtggttgcatgaatgattgctgttctccactcctctctaaatgcaatgagtaaattctaaaaaggggttttgagatagttcagtcattccttttcttttcccctttttccctttctttattaaccaattgggcattttgggtgtccctacacactatgcatgttttcaacagatgtggccttaaaagaaaaacaaatgagaaagaagagcaggcatggcttctgaaagtctctgacccaatataaattagtatttaaaaataaaaaattaaaaaaaaattgtggattttacgtagttgtcatgattcacttgctaattatatcatgagtatatagccatgcaatgtaagaagaggtagacttattttcacctactaatctttgatcatcttaaccgcaaatcccgaccattgatcgtggtaatcccataattagaattaaccatactatttcacattgatcaatcactaagattttgatactcacaatagtcagcgactatgatgattaagacatatcttaatttatttgattagaactttacaaatgattgattttttttttccacaaaatttgttgaattaaatataaaatttgtgtaaaatttgaccaaaaaaaaagcctaatattatatattgtctaaattttgcaattataggctaatatacattcaatacaaattaacttaaaaaaattaacaaaactatatattttttttgttgaaagtataaaaagtaataaatataatttgtttctacctaaactattatgacaatccaaattatgctataaagtctcgttaaaaaaaaatgatgttataaagtgtatcatatataaaatgtatggttactattttttattgtcaatcaattttaaaattgatatcaggtatgttattataagcctcactatattctactttctccacaacagttccacatctattctaaatttagtataatttttaatatatgtcaaatttaatatacatttttcatcttattttatcacaatatgctaaaaaaaatggtgatgaaaaagttttattataccattgcattagaaatgctctaagaattgagacggaatataaagatatgtaagctttcctaaattggtagaaatctcaaatcttgacctgagtagccttatttattagccaattactttttatttagcatattatttttacaattatgttccagtacataataacaaattgtaaattagtataaaaagtaattatcattaattataatcaataaattaaatatatatatatatttttaaaatggttgcaatattgtaattagaaaagtgaattaaagtaactggttaatgctaaataataatgtaaatgaaaaatatacatgtatgctaaatttgtcctaatattatatcatatgtcaaatttggtctaacttttaacataacccaaatttaacacatattttaatatacagttggattaggaatttctacaaaaatatcaaactatagtattttaccatttatttgacactgcattaaaatatattaaaatactatttggtccttaaatttgtttatttatttagtctctcttccatgaaagactctagagagatttaaactcttgacctaagtaagaaaagatataacaaaaaaattcctattacagacaacaccggattagtgagtttttttatgcaatttaaatatgattccattttatttttattcctattcccatttcattattctaattcttatattttcattccttctaaccaaaccactagttttatattctctaatctaattaagtaccttctaactttactccctctctccaagtgcaactcccataacaaacatctatctcattagtgtatatacagatacagtcttataaaacaacaattagctgatatgcaggctttggaaaaattggttggatagtgaagcttaccccactcaaccgtgtgttgggctgtggaccattcctaccttattcaaaatttgtactatttacctcaaaacatgattaattatctaaacctcattggacaaggatttcagataaaggaagtgtatgatttccattttgttctcttcaatttatccatatcctggaagaagaagaaaaggaaaaataaaagtaaaaaagaaaaagttctgaaccttgagtctttagtaagcaaagtttctctgccatacctagaaggatagaattatgataataaacatacatgaaaagaaaaaaaaaatgactagattgcttaactaacatctttttttcttacccca

SEQ ID NO: 79002 - DNA, 4654 bp, Cannabis sativa
gtgggtatttgattctactatcattaatattatattaaattctactttcgagctaattcaagatcaaattttgttttgttaatttagtgttgtgatttttttttatccatttcaggtgtgaaatagggtctttgagaaattgtttcttgtggaattgaaatgggaactgtggagacaagatcaaataccctagttccttcgtctgctactgttacgcctgaaccagctaaacctcaagccccaaaagagaaatccctcaaagatgctcttgagagttgttcaacgcataatctcgcgggtccgaagtccatggtagaaggttgcgttgagatcagtaatgaagatttgagtgttgatttgggtcgaggggctgtggataccgatatttcgggtcaaatgggttcttcggatgttgagaaaggtggtcttgctgattctacgcacggtgttcggtgtgggtctgttgaaaagtttgaagatggggataaagcaagtaattacgtttctttggatgaaaatggatgtgaaaatggtgagctgaggtcgatggaggtacccattgaggatcttagtgaaggcaacgatggggaagtagaagggcacaagtttttggtgggtgattttgtttggggtaaagttaggagccatccatggtggcctgggcagatttatgatccgtcttatgcgtcggagtttgctgcgaagaagaaagtcaaggatcgatatctcgtggcttactttggtgatggaacattcgcttggtgccctccatctcaattgaagccttttgaggagaactttgatgagatgtcgaagcaaagtaatatgaagactttcgtcagtgctgtacaacaggctatcgatgagattggtagacttttggagttgaagatgatttgctcttgtgtaccgaaagagaatagaactgggcttcgtccaatgttggcagagaatgctggtgttaaagagggagttcttgttcctcacagtgaaactaggaagctttcagatgtctttgctgagccgcctgagcttcttgctgaacttaaacgtgttgctcatgatgtttatttgacaaatgctcttgagcttagagtgttaaggagtcgactgtttgctctttatcggactaaagggggttatgatttgcctgaataccatgatcccaagccagttttgggtcttgacgatggcgtgaaatctgtcgaagccccaacccaagggccatttgaggagtggcttcccacgccaatgattgttgataccatccaagctaatgaagctatgttgcaaatctctcttgttgtttcagaaggcaagaaaactcatagaaggaagcagagaagtatggctgatctaattggcggtagcaaagaagctcggactaaaactacgggagggaggttggatacagaggaaaacagctcagagaaaccagcaactcactttgggatgaagaatgggaaagacactaaggacgaggataaaatggcgacaggcggatctaactcggagaaaccattaccagtccctcgttcaggggcaaagaagaggaaagataaagaggaatctgacagtcaagatgacagtttgatttccctaaaagggaagagaagaaatgccgggttgttgggatctcttgtaagcgctagtagcaacattgatagcagtgttaacaaagatagagatttggataaagaaaaaactaaaggaggccctgtttcgaagggaagggcgaagaaagaaggcaccaacatcaagcacgatgatagtgatgccaaaactagatctgggattggttcgggttcccgaaatttgaacttggacattggtactgtaaaaagtgatgatagtgcggtcaaggaacaattggagattggttcttcacctagggaaagaaaaaagagcaagtacttgtcccctcccttcacaatgttggatagtagcaaaaggagaagagaaatggaggcagagttattaagatacgccaccgaggtgagtatggaagggaaaaacagagtggaagtgatgcagaaccatgtctctacagagcctggtcctggtaatgcaactggcaagtctcttgactcaagtcctattcccaagacaccaaccgaaaatccgaacaagattatggatggaacaaaagctaatgtaccaacaaatgaattactagctgaagttctttatgtggctgttaatccatttactccaaggggaaagaagtctcagcagatggttggggactttatatctctgtacagaagcttggtataccggaatggtcccaactacagactatacaacaagcttcaatctcgtaaaaagagaaagaattcagattctgaatctgggtcccagaaggaagatcaaaagcagacagctcgaaagattactgaacaagagtctgggcgaaagaaagtcaaaaaccaaaagatgggagtggacgagcctaaagagaagggggcgattcaaactcctgatgtgatgtcggataggcgaaaaccaatgaaaggtgctggatctccagaggcaaagaaagtagataacgagagtgtggaaggaaagtctgctcttttcgttacatttggcccaggatcctcactgccctctaaagctagtctcattgaaatgtatggtaaatacggggagttggatgaaactgagacagaaatgttctacaacaatttttgtgcccgtgtttctttcaataaaatctctaatgctgaatcagcctttaatgattcacaaacttctagcccttttggctctgctagtgttagtttccggcttcagtatcactccggcgcattcaagactcgggagctcagtgaaatatccaggcggcagagaaatgcttctccacttaagaacaatgtcaccaccccaaagaagcggaggtcacagccgagaggaagttctgaggcagacctcaatttcgtaaaagagaaacttgagaagatctcttcaatgctggaagataaaacttccaaagtctcgccaaggacgaaatcgaaactacaggcagagataaatgaactgttggagaaggtaggcacaatggttggaggatcgtcatcttaattaagtagatttaatctttaaatacctgtttacacagtttcttttagttttattagccagttgtctatgcatctctgctttttgtataggttgtaggaattcacttcatacagatgagtgtcttgtggtggtcttttgtaactagttgctcaagctttataatgtagaggtccattttcacagacaatttcaccctatatgaatatagatacacacacacatattatctatatatgatagagggctaagcgataatcgttctagctttgtttttttcttttcttcttttgctttaaaggagatgacaacggtccaaatatgtcctctggaatttgtaagtctttccttcttgaactgtttttaacttttccttggtcattattttccccttgatttacttccaaattttaaattcaacgacagaatttaacaacgattttatttttcttccagagtctattataattcccttcctggacttcaccgtacattaaatcctcgaacaaaatcttttcgaaatttcttcaattgctaattccaataacaaaatctttttctttatgcccttttcttgtgtttcttccttcatacaaggattactgctacatgtgcaatctatttcagacaatgctgtgttagggggcgttttcttttagtgatattgctttaacttttgaactggttttaatgttttttcttttaccaaaagctgagaaacaaaagtaacctagctgtaggggagcaaaaatttagtgtaagtgtttgaatgtacattgttgaaaaggtgaaactattcaagcagaagatgatgttctgttggtgaattagtatgatcagatgagccagagaacatcctatcccactgagggaagtagatgaaagtgataggaagagtaaaaacaatcatcatagctcccatcaaagaaatgcttgtctgcttagatagtttacaagagtccgagaacagtaacagctgtactatcactgccccaacaggtcctccaccccctgtcatacctgatatcactccaagtgccctgcaacgaaaaaacaaaaatttataaacccaacactattagattccttaatatccttaactatgattcattactaggatttactcaacattttctcttgtcatcaagttgtcttcgatttctgagcttactaagtgagccatgctgtttgacgtggcttatctgcagtaaacggtccactccactttacaaggtattttcttaaagtttacaaaccatttgaaacaaataggttcctgatagaaagaagccatctcacatatcttctgttgccttggcagattttcagagcaatgtacttcatcgttcaatgaatttggttattggtggaagaagataaagatagaagaatagtaactattatcacttttcttttcaactttttattgtgtgaattccattaaaaaattattaagattatcatgaataaatggattagttgccaaaacaagtttcgtttattattattattttttttttaaaaaaatcactattagtctttttttttcccttttcaaaaaactaattcttta

SEQ ID NO: 79003 - DNA, 4548 bp, Cannabis sativa
ccactttcactgactcatccaaatttagattttggcttcaactccaattatcagaataagctattatcagagtgttgattatgatatactgagaattcttgaagaagaagatgctgaggagcctaaaaattctagttttggaccaaatatgaaagatattgtgaatggttaaggaagtctatatacagataaaaaagaaaaaagaaaaaaaaaagagttaaatcccattatactggtgtatattttgattaaatataataaaaagattagaacaattgtggtactttacacttttgataatttcatattataagtatgtgaacttcgatgtagtgcaaaatataattattaattatgttttgaatttttaataaacttatagagagtgtacaaggttaccaagaaatttaaaatcatttgtagatgtgagttaaaatttgatggtctacatactgttactatgccaaaaaagttaccaacaatatttgttacaaccattttaatgaggcttagttaaaattattaagactgatttgcccttcatgtatcatcaaattgaaaaattaccactggccaagtgataattttgagcctgagaaaatttaccaaagtaaaaattggactactgactttctggtaatattataagcattatgcattgcatgaacttgaattctgagcagaacttttctatcacttgatagaagaataacatagaatgatagagcaagaaaatatttaggcttgtgaagcttaaagcaactgctggaatcactagacagtaaaatataacttcattcactaccaaaaatttcttctaaaaagtatacaagaacaagtagtgaagaaggcaccttaatcctcattttgttttcccatctttgatttccctcgatgggaccgctgcgatgatcccgaatgagtaacagcactatgacctcgacttgaattttgagcagactgatcaatagacatggtggattcagatgcacgccttctctttggagtttgtgatggctctccgagatctgataaagaacttttctgtttgctacttcgactggaagttccacgcccagttgaagttccagtagtgtttcttggccgactactttgtgcaggtgttccaacgtaatgggaagaattggtcattgaaatgctagaagacttgtgatacatagatttgcttgaactagcttgtttcaattcatgaggctctgggtagtgtacgagtgatactcgtcgtgaaatcttcccagctaccataatagtacagagatcaattcattgttacacattcattaaatgatatataaataaatgacagtgacaagagaaaatgctagttcaatacatatctagaattttaatgcttaccgatttttgtgcctgttgaagaagataaaaaaacggttgcatttgattcttgagaagcaaaactaaccatatcatattctttgcctgagaaatgacaaaagaacagataatgacaccggaaatcataaattgcaaaatagcttcactgaagtttagcctagtgtcactgcagaagaaatataattaccagatgaacccttgaagctagacaggttcccgtcatggtcaagcttgagcgtcagttcttgtccatcaaaatcggggtcctgaaaaaccaacaaagtaatttgtcaacttacttaatagctggtgaaggtggctttaccagaaggtaatccaattcccactccctagaaactagtttatttattgcaaaacttgtagtaactagttttctttattatagggaagaagaaaaaaatgagaagttctcacattattcttaggccattgaatgagccaaagctcagttgaatcggtcccactaagatcgacaagtggatccttaacatcttgcagaaattcaggcgcaggaacgtaacattcttttaaatcagcagattcagaagccattcccttttgctccacaaaagtcagaagcttaattatacatgtaaaagaaaaaaaaaaacaatttagacgttttgtcaaacaatttgaatcactgaatccagctgatttgttcaaagatgaaaatgtagattactatcaatcaaaacaagaaaaactctgattactatatatcaactaacaccaaaagaacaaaatcaaataaacagaagacaatgaacctagaaggagaaaaagaaaacttgaaagaattgaagtctgcattcatatatagataaatgatatttctaccattttctaataacaacgttcaagatttagaggagtaacatgttcaaatactaagagcaacacctgcaattacattccaatgtttcaattcagataaagcacagagtatcatattattttctatctctcctctcaaaatttattagaattagaaattcaaatgtaaaagaatcctaaagcaactactaataataataacaaatagcacaaaacccaaccacaacaatcaaaagaatcccaaatataaaacacacccgaaattcaaaaaaagagctaaggcaatagaaaacaaacaccgaaattcacttcggactttattggggagcctcgcttatggcagcggaccaaaattgtgataacaaacaactaacaacattaagaaagctacaaattaaaacataaaacatgaaaccatagtctataattccagtacagcaaaacaaacacaaaaacacaggtattgaatcagagtaagaggaggatctctcagtgcttttttccaagatataatacagtcaaaatatgcattacaataacaaagatgaaaatgaatacataagtaaactaatcaagtaattaaaaatgtcaccaaaaaaaataaatcgattgcacaaggaattgaagttaaaagcaatatgaattatccattagtaccttttttaagctgaagaattcaaatattggttgaaggaaaacgattttcagtcaattactatttgagatatttaaatttgagatcaaaataagctttatatactcaaaaacttcttgcaactatataacccaagaactaaataaaaagcatattggatgatatagacagttctgttttctatatatgaaaatcgaagatgagaagcatgaaaatactgacctgctgggctgggcgtggtgcttgtagcggacaaccggagaaaggggagggaccgaggtgcgtgctgtcggcgccgatgcgtggtgttgtcgagagagaagaaggggagacgagagagagcgcgcggaatcggagaagcagcttagggttttagcttttatttttgaaatataaattaagtataaaaatgttaataaaaatatgtgagttttattttgttgggtgttaaatttaggggtgagtataaaattcagaaaatcgaaaaaactgttcaaaccgacctaccgaacactgttagaaccgaaaccaacgaaatcgaaaatcgagaaaaccgctaacggttaaaaccgccattagacggtcggtttttttttttggtaataaaccgaccgaaaaaaccgaaaccgaccattatacatatatatattaatttatttaagtttttttttcatgtattatagttactaataatataatgaaaatactatattattttttttattaatattaaagttaaaagaataaaataattactttttgaacaattaatttgtatgtttgtagttgtaaaatgtagaataatatatttatagaataaattggattatttaaaaaaaaaaaaaaaaaagttcggtttgagcgatttaaaccgaccaaaccgaggttcaaaacgatcggttttaatataggttctggattggtcggtcggttttcggattgcaccaatccaaaccgaaaatcgaattttagatttttatatagaaaaaaaccgaccaaactgatcgatgctcacccctagttaaatcaatgaaacccgaactgagtttggtgggtaactgggtgtaacacgaactcggcctataattttttaaactcatttttggtgtatttttgagtgtaaatgtgacgtcttggttattattttggactctgtgctttgaaaaaattattgattgatccttttgatttattaattgataaaatagatcatgtattttctaaaatagtataaataagtctctcagctcaactttttaatataaccaacttaaagacaattcttaacacgaacaaatacaataaacgtagccagatttattacaacacctctagatcgagttattattaaattttattttgattaaaaaaaaaacagttcaaggtactatttagtactattttagaaaatacatggttcaatttatcatttaccaaaacagagagtcaagttagaaatttttacaaatcacggggtccaaaataatgtttgaaccatccccaacacaccacttgggctacaaattacgccacatgtaacttttgttacaaagggaaatttgatttcctatacttacatatacctaatattttatccctaaactaatacatatcactattgaaaatatatgatcactttatctaaaactcaaaaatac

SEQ ID NO: 79004 - DNA, 3006 bp, Cannabis sativa
ataattgcatcatcactgacttttgccattaagtctcttgagtttagttttacaaaaatataatccaactttagttgagagaagaaagcctaaaattaatttggtttctgatgctggcagatactgttactactgccttagaacaaggtgtgctgcagttccatcatttcgatgcttgagatgcaatgaaccagttattgctatgcagcggcatggtggggtcatcaatcctgtctcaaagtagtaagtacaaccgtatgaaaagggaatttcattaagaagcttttacacaaaatagcacagtaatgtagaataatgcttgaaaagtaacgttatttttgttcctttttttgttaaaaattacagttcaactaaagatataatatttgagtcaagaattcagataccctgtaaaatcattcattcacgatctattaagtggaaagattcattctttgctaattgtatactttcacatttgtgacttcttatcaatttcttttagatgggttgcctttataacattaagaatcgaatatttccatgtataaagaagtgccttctaaatttagttaccagcagtggtttttgcaatcctgatgcctttttgggatgaaacttcaaaaatgatagaattagaatttctttgatttccttttgattcagaaaagatagaaaatttcagggtaacaaatattttctagaatttggctttgatttgagctcatatagttgatagtagtagaatagatatttgccgtttccttcctaaacaggtatttccttgctttgctatcaacctctaatcctaacctttcctacacttcactttaaatgaccaggtattatgtatttgccagcttgtactactaacgcaaagagatacgaatctgatcattatctcgaaaatagacatgtgtgttgttagcatttactatgtagtaaacttggtagaaatatagatggctggtggtgtctttttggttaaacttaaaaatggttggacttaatactagttttagtaaataaaacagtgcctgccatctgttgttcattttcctatttttttcttatcaaattctacgtttcgttcccaataatatacaccaaactgccttttatttcatgaaaatgtgacaaaggaaccgtattcattcagttgtctctttcgagcgacatgaatatttttaagctgtaacttataactaatggtttcaaatttcaattaattaattagaataataactatttcatttctttgggttacttaatcattatcagatatcaaaattgtagaatacaactttgatatattttttcttaaaaactttcttttttacaccgacattaattttcaggtcgaagacacaaaagtatctgtacagctaaataatatttggtgcatggccagtttaaattaacaaagtaatgagttgatactaaattgaaaagaattcttattaaataataagaactgctaataatctaaaacgatttaatacgctaatgtattttttcctttctgtgaatatattttcttgagttcaatgattgaaagggtaggagtaggactagggtcgtgtgacatcaaaaagggacagaacaacccacaaaattagttctagaaacgtaagcagaaacgaaatttaacatttctgataaacattgcacattataataaatacttatttcttttttgaaaaaaaaataatgataaatatttatttttgaattcttaatgcaggtttttcttaattaataatattaataacacatcacatcttatattattattggtaaaatttaatattaatttttaatgttaacaacttgcttgacccaactttaaattcaagtaaaaaaaaatataaattaaccaattgaaattgaaaagaagagaaaaaaaaaattggaactgtggtgcccaacataagccttatgtttgtaattgaaaagtaaattcccataataacaagcattgtaggttctctaatctctatagtaatgctatcaagagtcttattattcaaattactgagcaaaaaaacggaaaaaacagtcttattcgagtattggactcataatactcaagtgattatgcacgtgtaagcctaagcttttgtcattataccgttaatcatttcttgaaagccgcttacataatatcgatcaaaatgatactattatatctatggtatggataatgattcccttacatacatgtgtcacttttatatgctactataaagatatctaattttctaatagaaatttatatcaaccaataatatcaacttttttttttgctgaacagaattttgatattttctttttccattttgtttttttgaatatatcttaaaaatatgggtacacatttataacttataagcactaattacccatgcctacaattgataaattatctgcaattctaactttattctttcaccatacatatataactttcatcatattgtactctccatagagtaactcttcttaaaatcttaaaaggtgctgaattaaaatcttattttaactaaaaattcttgtgatttcggaagatctagctacaagataatcaagaacagagagctttcccccctttttcacctgactctttagtcttaaaaatattggttttaagaatgagtgattgctcttctctgacccttactgcccaacctaaaagcgaacagctaatttatttttggtcttaaaaatgctgattttaaaactaagtcttttatactgcttttaaaattgctcatttatttatggttttaattctttctgctctccctttttattatgtataaaatttaataaaatgactaatagtctatagattctcactaaattaacgactagcaattcattcatgaaaataatgtaatatttttttttggggatttttacaaaaatactaagagcatgtttggtattgttttctgtttttcattttcaaaaaattatttttaaaaatgagaacaaaaaaaaaat

SEQ ID NO: 79005 - DNA, 7816 bp, Cannabis sativa
  modified_base (38)..(57): a, c, t, g, unknown or other
ctcatgtatgaataagaattttttgatatttatatatnnnnnnnnnnnnnnnnnnnnttaataatttaacattcatgcatatatcaaaatatttaacactaattaataatcaaaaatgtatttatcagactttttagggcataaaccctaacagttagatcatgaaggggaagtatgtgccctagtacaatctccagctcaacgtccgcagatgatgaatctacccatcactttcacggaagaggacgcctagtatgtaaacttcctgcataacaagccactagtgattgaagcccaatttgctaacaaaagagtgtccagagtgttagtggacaatgaaagctcagtcaacatattgttcatgtttgccttccaagcaattgggttaactgaagccgatttgatgccttgtcctatccaacttgaaggctttaatggagattctctactgcctatgggaaagattcaacttctagttacagtaaatgagggtataatcacaattactacttcctccgcattcagacaatgtacgttcgtagtggtggatttcccactgcctacaacactatcctagggcacccagtcgagcagttacctcaattagacacttgtgcatgccattcttgtgtgacaatgaaatcattgggggtggtaaggggcaatcaaaaaagtgtaagaaattggtacaatgtctcgaccagatcaatcttcatggtcagagaagagtcgaagaagctcccaaagcacctgtctagcccgcacaagaagtaattcgggaggaagatatgagttagatcctcgagttggggtagaagaatgactgagtcgttagaggatgttgaggaagtcaacatcagtgaaacaaatcccaccaaagtcatcaaagtgggacagaatttgcctccggcggtcaaagaaaaaattgtgtccacggttaagaagaaccaggatgtattggtgtggagccattcagacatgacgaggattaacccaaacaccatctgccatgccttaaacatcgataaaaatgcggcctcggttcgctaaaagagaagaccgttggatctggtccaagaagaggcagtgaaggcgaaagtcgagaaattaacttttatagagttcctctaggcggctctatatccggtttggctagcgaatccagtattggtcccaaagctaaacaaaacgtggagaatgtgcatcgattttacggacctgaacaaagcatgcccaaatgattatttttggcttccacaaatcgatcagatggtggatgacacatcaacgtacgaactgttaagcttcattgacgcatactccagctacaatcaaataaaaatgcatatgacagactaagaacatactaatttccaaacagataaaggagtgtacttctatgttgtgatgccttttgtgttcaacaacgtcggagcaatatatcaaagactgatgacaaaatgttcaagggtgtcctgaaaaagaacatggaagtctatgtgaatgacaaactagtgaagtccaaacctcaggagagcatagcaatgacccagaagaagccttcgctatcatccgaaactacagaatgaagcccaacccaaataatacacttttggagtttcttcaagaaaatttttgggttttatcatcagattttgggaaatagaagccaaattcataaaagattcagacacttctagacatgtatgatttttcatcttatctttactgattatttattggtcattgttcagaaaaaacaaaaaaaaaaaaaagaaaaagaaaaagatttttttaaaagagagggggaagagcatggtggcgacatagtaaagaagaatgacaacatccatgagttagcccaaagtttagaggtggacaaatacagagtgtggaagccattgggggccgtacaatgttctcatactctcgccacacccacgccattttaaaaacaaaatcccctttttcaaaccttaatccttctctattattaaacccacttcttccttctacaccacatcattattattactgctcttcctcaaccaaaccgcatttcctttcattcaaatcgcttcgttcctctttctcaaaccctaaaatgggctctctctctatcttggacgaacccttgcactaccccactggtcgtagagacgactccgtcgtcgatgactaccatggcgttaagattgccgatccttatcgctggtaattgctgaactctctgccttttttaatgtagatgtaaagaatgcttggaaatactatgtaatcaatgaaatgattggtcgtgttcgtttggttgactttgatcttttacattttctgttctgttcttttctgttgtgtttacgatttcattttagatggaattcggattagtagaattgattttgttgttcaggcttgaagatcctgactctgaagaaacgaaagagtttgttaataaacaagttgaactgacgcaatcggtgcttaaggtttgtgatacgagggagaagcttagcgagaaaatcactaagctgtttgatcatccgcgttatgatccacctttcagacgagggaataaggtcttctacttccacaacaccggtcttcaagcccaagacgtcttatatgtacaggttagtatctatttgtgactctggccagatttgaattgatgaatacttaaaatagttttatgcaatggtgctctgtcttattttcttgttctttgtctaatattaggacagtttagatggggaaccagagatattgctggatcctaattcacttagcgaagatgggactgtcgctttgagttcactctccgtaagtaagaatggcaagtacttggcctacgggctaagtacaagtggcagcgattgggtgaccattaaagttatgagtatcgaggataagagagtcgaaactgatactttatcctgggtgagttttttttggcgtcgtttagtttgaattgaattggataatgataagcacttgctgatattcatatgataatggaactgaacatttgtgcaaactgttatccaggtcaaattttctggcattagttggactcatgatagcaaaggtttcttctacagccgttacccacctccaaagtaagctgttagatatttgttagtccttctctggtactacagaatagataaagtatgaatcctattgcattttgtgcctacaatgaaatgcacgtttaaaacctatctgggaagtttttctgaaaccagttaataaaattagtaaacataattatttatttgttgagttttaaactactaaatttgaaatagacgcgtatctatgaaaaaataacgtttcctgatttccataagaaaagcttagtcaaatttaaaagtggtcataaaaattgagtttccatattttcgttttctatatttatacttttaaatgtaagtttttcttttaaaaaacataggttcaatttcaaatttatgaatccaaaggctgagaatattgttgtactaaaacagaagtgttgctaaagacaataatgctgaatattttacaaatcacttataataaataaatgacttcagttagtgtagtgttcgggcataaaaaagtatgtagctcaattattaattgaaaaaatagcaattctcaactaaaaactaagaaaatggggactctcaaaacttacatctacaatcactcaatggtatgttatgcctttttaatcatgtttactttttaaagttatattttccatttcacattgttgaatacttaaatgtattgtctggaattttgttcaagcaaaaaaaaaacccgaagttttgtcatcaaaaaattaggaagccttgggttttttaatgatagtgtctccttggaaaatgtcttatggatattgcaggttctttgctccttatgtggcagaaaatattccaatggtttcttatgtgtgacatgcaatttttttacttcaacgtacaattttgaggttctaacggttaattgaatcaattgtaaatttgtaatgttgtttattcttcagggaaggagatatagatgctgggacggagaccaattctaatctttatcatgagatgtattatcatcttttgggtacggaccaatccaaagatattttatgctggaaggattctgagaatcctaaatatttatttggagcaagtgttacggatgatggaaaggtaggagtagctttgtctaactcatgtacattctctttatgttgatgtggatggagcatatttgctatacgctatactatttctttttttgtccattattgtgatgattgaaatcattgtttgtttctgaattgttgatatgtactcatcactatattttattgtaaagctattgtctttcaggcttgaattattagttgttctatgacctatctgcactctagtgtagtactgtacttatcttttttaggtaattatattaaaataataaaaaaaaaattatgtatgggatgggaaattttgttgaatcaattatttttctgtacaatttttctttccaccaaaacaagaagttgattttttctattttctacacttttttccctactattttctttatctttttctttccctaccaaaatccaacttccaaacatagcctaaatgttttagtaatctgaatattttgttagtgaagtattgatttatgagatttattttaagatgccatgcatatgtgcacaataaattgattttagcatagatgaaatagtgtgaactataaactaatttctgtcaattattgcagtacgttcttttggatattagcgagggttgtgacccagtcaacaaattttactactgtgacatatctgcactacctaatggactagaaggttttagggagaaaaatgacatgctaccatttgttaaggttattgataattttgatgcgcagtatcaagccattgcaaatgatgacacatcgtttacttttctgaccaataaagatgctcctaaatataagctagtcagagtagatctgaaggaaccaacagtttggacagatgttcttcaagaatctgacaaagatgttcttgaatctgcatgtgctgttaatggtaaccaaatgattgtaagttacttgagcgatgtaaagtatgttctgcaggtgagggacctcaattcaggttccttaatccatcaacttcccattgacattggcacagtccatgggatatctgccagacgtgaagacaatatagttttctttgggtttacaagttttctttctcctggtataatatatcaatgcaagttaggctcggaaaccccagaaattaaggtatttcgtgaaattgctgttcctgggtttgatcggtcagatttccatgttgatcaggtaattcttgtggcctagacttctgataaacttcttcagttaatatatgaagctttattttttttatgtattattatttttgtttttaattttgttttgttctttttattttatgtttccaggttttttttcccagcaaagatggtactaaaataccaatgttcattgttgcgagaaaggatattgttttggatggatcacacccttgcttgttatatggatatggtggatttaatattaatataaccccctcattcagtgtaagtcgtatcgtactttcacggcatctgggtgctgttttctgcatagcaaacattcgtggtggtggagaatatggagaggaatggcataaagcaggctcacttgcaaagaaacagaattgctttgatgatttcatttctgcagctgaatacctcatatctactggttattcacaacctaaaaagttgtgtatagaaggtggaagtaatggggggcttcttgttggtgcttgcataaatcaggtgtgacatttcatgattttggttttcagtgttttttctgctttctttcacttatgcgtggttgattacaaaacaaattttttcattttgttacagagacctgatctttttggctgtgcactagctcatgttggtgtaatggacatgctgcgattccacaagtttaccataggttagtctatatacaccttttaacacaactaattaaatgtgtgcataagttcaaactgcagctgattgtttgctataattatttgtccaaaaaaaaaaaaaattcaggccacgcgtggacttcagattatggttgttctgacaaggaggaagagtttcactggcttatcaagtgagtattgtattttctagttatttgaaaacattataaccatacattcgcatcattatgttctttttttttgttctataaatttgtacctactactttcctttcgtctatttttcaggtactcgcctctacataatgtcaagagaccatgggagcagcactctgataaacttgtccagtacccatcgactatgttgttgaccgctgatcatgatgatcgtgttgtaccattacattcgttaaaactattggcggttagtatccctttgtgaaattctgaaatttaggcgacataatatgtttttgctgattaacattgggcaagtatttactaatttcctgtatagcagtaaattttaatgtgctagtaagattgtatattttccttgccttttgcagactatgcaatatgttctgtgcacgagcttagagaatagcccacagacgaatccaattattggtcgtattgagtgtaaagcaggccacggagctgggcgtccaacgaagaaaatggtaatattatttttctaaaatatattttagtaatccttgtgagatttatatttcgtgcacatatctaatagtcattttttttaattagatcgatgaagctgcggaccgctatagtttcatggcgaagatggtggatgcatcttgggtggagtagttgctttgggtggaataattgaaagactcttgtcatttttagtttacttattattgtaatatttgtaatccaattatatgtatccaaatttacttgaattgaaatattaactatagtaaatcccgacaaaaatatcaaccaaaatgaaatataaagtgttaaatttcaaagaagagtcgttaattaaacaaggggtattatatttacactctcaaaatttatttctacacccgaatgttaagtacactttattttatttgttaaaattttactttttataataattacaccatcaataattacaaaattagatttatctatacaccctatgccaatttaaaacttaaaacgcctgcatgtcttcaaatagtacttttgaaagttttgtttactaatttatttagcttttttttttcttgaaatagaccaatttatttagttcaaattgcagagaccattgatttatttacgtgtaaaatggtgatgactttcaacatttgtgaagtattggaagataaaggaagaagtgtggttatattagataatttattgatcacgataaataaatataatatttatatctcaaataaataatgctgaagcactatttattgagaaatagtgctaaagcattatttattgagttaaaaaagtgtattataattcaaatttagctcatttgatggaagattaattttacaaaattttcttatattttagagaatgggttataataagtcaaatttaactcacctaatgtgagtgcaagaaagggatttgttttagtagcgatgagatgttaattgttagggaattaacatcctatgtatatctttgacgcaaccttatgtcatttctaattaaagtaatgttaaaatacatcgtacgacgattaactaggacttcacatcttattacatggttgac

SEQ ID NO: 79006 - DNA, 1971 bp, Cannabis sativa
aaaaaaaaaaaaaaaacaagaccccacaacatagacatcatgacaaaacacgtccctttacaggctaacagcctaacacaatacaaagacaaatcttttctgtatagaacggcttgttattattaagctgtaattttggtatgtatttaattgtttagttaattatttttcatttaaagtagtataaattgtaattaaaaaatactaataaatttttagaaaattataaatattttagagtgtaaaaataaagttactattttctcttatagcttcataaaaagataagaggtagtatataatataaatttttccattattattaaagaaaaatcaaaccactaccgtggggggacctatatccttattcaactaccccatcaacattggattattagtttggatatgtaagtaagtaattatcaagtgatactatgatagtgaacttttcttagaaacttagaaaaactaccaaaattcatcatgaaaaaaacacacaaaacaacaatcaaccaaacaaacacaaagcaaatattaaagtacaaaaccaaataattataataataagtgagtttgaacaacaaaaacttaccgtgtaacaaccaaaacaagctcccattaggcatgtaatcatacaccaacaacttctcttcactagcaaaataataagccctcaaacaaaccacattggaatgcctaagtctcccaagaacttccatgtgttgttcaaactctctcttcccaccaatttgagcatccttaagtctcttcacagccaccacattgccatcgtcgagaaccgccttgtaagccgtcccgaaaccgccttttcccaacatttccgccgaggctctaagcaaatcttcgagctcgaatcgcttgacaccttcgaagaacaccatttgacccctttcgaacccgggttgggccgggtatgggcttgaagagtagacgattttttcgctgtctattagtttttggttagaaccctttgttgttgttgttgttccttgtctcattttagccgagtaattacgccaaaagtaacagtagaggaatagtgatatgacgattagtactaaaatatcgccgagtattatggcgattaatgctagtggggttattttagctgttttgtttgggtgagtgtttgccgagttattgggatttgagttaataatcgggagagaactcggcgatgatgaaaccaccgtttgattaccggaaggtattactgacgatgcggtggctccggttgagcctggtttggtcggattagttaaggctttcttgcaattctccattggagatccacagaggttagggttttgagtaaaagcggatttggggaaagttgagaatgatttggggatttctccggcgaaactgtttccggtgatgtttaagtcttggagatttggaaggactaagccggagatggaaccggagaatcgattctgttctaagcgaagagtcaacagatgagtcaaacggttgattgtggttggaatctcgccggataagttgttgtgggagagatcaagacggtagagtcgagcgagagaagttgcagaggccggaaagtggccggagaagtcgttgtgggagaggaaaaggagtttgagagctgtgaagtttgagagatcgggaatcggaccagagagacggtttcgtttgaggctcatgactcggagctgagtcaatgcggtgagtgactcgaacgagttacggagatcgaggttctctaggacgagtctggaaactctgtggtttatgcaggaaactccggagaagctacatgggtcgatggaggtagagttccaatcggagagattgttcgatacgtctgagctcgctttgaacgccattaaagcttctaaatctgagttcgaagaagtgccatgtagaagtgagaaggaacaaactaagaacaagaagtaaagggttctttccgccattgttgctctgcaa

SEQ ID NO: 79007 - DNA, 4271 bp, Cannabis sativa
ttttttttttttttctttttgggtttttggtttttgaaagagtgtatagtcagaacccttctctcgtttttccacgaatgcagaatgggaatctctgtgtttcgaggctcttcgaaagctcattttcgtttttattattattattttttttctgaattagcccagttcagcatataataaagtctcttcctttggcatcaaaaggtgaaaccattttgctcttttgttatcttttttcattttttttccttctgaattttccaacgtttctttttttaggggttttgggttaatttcaaatctggggttttgaaaagataaaaaaaatgtgggatttgggtgaaagttacttattttagcttaaatggagtttgaggttgaatttttgttactgaaagtatgagatctgtgttggcagctaaagcttaaatagttctttagtcagtaatggatattactcctggaagaaggaagcattggtgatttttcttttactgtggtttttgcagttgatctgagcttcgaaagaagaagaagaagaaaaaattggaactttaagtgaatttcgttggtgggttttggagataatgttgcatacttgatcaaattcgtcttaagaaattgaaagccatttcgataaattcttgttgctgagccaaaagggtattatcatttcctatcaaatatgtcaggagctccacgagtaaggtccatgaatgtggctgattctgagtcccggcctgtgcttggtcctgctggaaacaaagccgggtcatggagtacgaggaaacccacttcaaagacactgagaaaagtagacaaatcacctgaagagggtgctacattggctgaggagaagaagacccgtcaaatgtcttcttcttccaccactacttctcctaagcctcattcttccaatgttccttcggtccttcgccggcacgagcagctacttcattctaatctttccttgaatgcttcatgttcttctgatgcttctacagattccttccatagtagagcatcaacagggaggttgactcggtcgtatagtacagggagtaggaggaagcagtatctttccaggactagaagtgttgcttctgatggagggttggattctctgcctggtgattctcagcagaagaagagatgttcatgggtgacacctaatacaggtatgttttattccttggattcaaattatgaagtgtttgactttgtagattatttgtagagctggtaatatgaactttgtacatatggcattggatttagttataatgatatgcattgattgagctataccaaattacaagttgtgtgtacttgtaagtttgattcatcataagcaagtaactaaattccatcatatatgactaccataccatccattgcatttttggtctcaccttggctaaatgggttttgatctagtgggggtaatgtcccaagttggattttagtgaatgcatatataaatgtggtggaaatttaatttgattagcactctgcttagggttcaggctttgtgtgtaattaaagcttattaataggttggttttctttctttctttcttttcttttccttttcaaggatgaactaagaatcaggagaaaagactgaagaaagttgtttagtaaatcaagttggaaaaagaaaagaaaaaaagcttggtcatattcataagtagaaattaaatatgagtttaaactggctatatcaatctcaattcaagttgtgatcatcccctctcattgtttattaattttctttttctttttgttgaaattaatgaattaatttgacacattgaaaattagttatgcaatgtagagatatgttatcttaatgctagttagaatctatgacacctccccctactttggatcgctgagatgaattgggtgttttaacaagcctttccttgaagctgtctaattttctaactgagttttcgtttgttcgttacagagccatgttatgttgatttccacgatgaagaatggggggttccggtacacaatgataagtatgtgctgataatttcttcacatctgtattgatgaaaccagtctatcctaaccgctaaattaacagtctgtttgcttcgtcttcttgatcacatgcaggaaattatttgagctgcttgttctttcaggtgcattggccgagcttacgtggcctgccatattaagcaaaaggcacatttttaggtattgttttattcatataaatagttaataagattcatctttaacagattacttttaaaggatatgtagtaaaagatattggtccatgtagtgaatggacctgtctctctcttagttacctctgacaaacttcattttgcagagaagtttttgcagattttgatccagttgctgtctcaaagttgaacgagaagaagatattagcagctggaagcactgcaagctccctcttgtcagagctaaaattacgagctattatagaaaacgcccgacaaatatctaaggtagacattttcttctgatgttatcataaatttgagtttcttaaaatgctatgtatgagacatctctgcaggctctataaatagttggttgctcatatattcagtgaaatacaaaatgtgtggttaggattggggaaaaagaaagtcaaaatcttgcgagattgatcggtgtgtcatttatgtggaatcatcttatgcattgatcttgataaagaataaccctttattggcatatttttttaaccttatattgactagggaccacatatgcttgcagttgtctctacactactagaaatttaatgacatgaaatagatgcttaatgatcacttgatcaggtaggttaggtaaagaaagtagttgagaatggtggtcctgcatttttataactcagcacaaccgaatactaccgctcatagatgtaaactttattattgtatggcacttgacttgcttgtgttatttggctagttttggatctcatagacttggcttgcttgcaattattaaacactgtataatggttttttgaaccagacaagtccataatggatggcatcttgtttcggtagaatcagcaatggaactaactttttacaggttttgctaattgtcatcaggtcatagatgagtttggatcctttgacaattacatttggagctttgtgggcaacaaacctatagttagcaggttccgttaccagcgccaggttccagctaaaacaccaaaagccgacgtgataagtaaagatctagtgagacggggcttcagaagtgtaggacaaacagtcatatattccttcatgcaagtcgcgggaatcactaatgaccatctcgttagttgcttcagatttcaggagtgcgtaaatgcagcagaagcaaaggacgaaaagggtaccaagaatgagcctgaagagaagaaaatggagaatggaaccaccgattcggaactatgcattgccattggtaaactaagtttcaacacagaatgataaaaagaaataaaacaacaacaacaacaaacaaaacaccacatgaaaggttgaaattttcttggtgacttggtttggtggcaaatggagctatttggttcaatcattagtatgcttcaaaagctacttctatcttagtactatacaaggtagtagtagcaaagttgattgattgtgtataaaaaaaaaatcaaaacttcatgaattcttaaaagcttataagcaccatggattgatttctctacagaattagatttacttaggggtggcttattgtgtctagagcttttaaagcttaaatgtactattttttgtacagttaaaaacatgtttaaaaaccaactagactctcttattatgtcatgttctgtaatcaagatatgagaaatgaaatttttgttgtgcaaaaccaaccaaccaaccaaccatcaccgtctgatctatgaataatgcattgtgatgatgaccctcttacagttgtgagatggggccctgatgtctagaaagagaagagttaataagcagaggtgtgatgtgatattgcctgatgtctagaaagagaagagttaataagcagaggtgtgatgtgatattgtgataggttactcacactgattggtcaatttggtttttaatatggaaaagaagattgataattacaatttcctattacaatattttagttaatttttactttcgaaattccacgtcgaaatattttttttttcatagcgttattcgttatagttacagtattatctttataaatttttgaaa

SEQ ID NO: 79008 - DNA, 7417 bp, Cannabis sativa
ttttgtaaaaaaatagcaaaagttggtatactatgtaaatttcccaaataatattgacatagatttcgtatggtgtacttgaattttattagtgtctttttgtaattctaataattaattagataatactaaagaaaattcctaagtatatatcttgattttttaaaaacaaaattttaaaaaattagaaaataaaaaacatcaaaatgtagttttcaattttcaaaaatattttttttttgtttaacatattatattttacatttttgttcatatatccggaccttagacccggactatggaacttagagtccagacctcagaccccaaaccccgtccccggacttcggacccagacttggagttggaccctgaaccccgaaattgggtccggcttcgagttcgagtctgagtctgattctgggtctgggttcgggccgggatctgcgtctggttccggggtccagtctgtagttggataggttaatgtcatggtatggtgtagatgctaagtaaaaataaaaatgaagtccctacgtactttaaaaattttccaaatgtatatgcaatgcatatgtaataaccattttctctttttctatctcttgtgtggtgcctatgctataatgctatatgaatgtatatgccgatcgaaagatatatacttatatttattttaatggcacatagttaattggaatcctatttcaatatttatgggttctccggccatttgatcattattcatcttccttattcgatcaccccctacctctctacctacctagctaatattatacatagctttgttatatatatatatatatatatttaatactttcattttaattcacacacatatatataatatagagatagagatcgaatcacatggtgcatggtgtttggatataaaggggaaaaaaacttggcttagcatcttaattgcttcattcctcaccatcatcataagctttataatgagattaatatacataaaagaaaaagaaaattaggtttcattttgagaatattgtcccacatgaattaaatgtaaaagtattgagccatatataagaatatgggcaactccattcattaccaattggttttgagatggaatcccatgattctcaacatggtattagagccatatccctagcgggctttcgatcaacacccgagagatccagatggtgcaaagatgcctgagatccaaacaaaaataagtgagcaaatggaaccccgtgattctcaacaatttctccctccaaaatttataactattaaatgttgctttttttttttttctgtccaggcctgttagcttttttggatctaggtgcaatttagtcgggattgtatattgttactaccattcgatttttgctactgcaattagtcttgtctctgtgacttctttttgagtattttagccttgtttgtgtgaaatggttttgaatatgttttagtcttgtatatgtaatatgattttgttttgttttgtttcattgttagctcttctttgctctttaatagtttgtcattaaattgttggtcatttgcgactgaaatagttgctacttattaattagtacataccttacataatagttaagtgctcaaactacgagattgaacctgttttaacagtttctgttgttgtgtcttttgagaagtcgatgatatagaatataggtattcttaaagttaactatgtaattttttttatttgattttattttaatttgtgaatcaaacaatttaagaattaacttttttgattctaatccaacaaaaaaaaaaaaataccgattaaattgtatgttattattctaatatattattcataaaaaacatacaataatatatattgtcatatcgaatttcggcgatacgaatgttgaaaacaacagtcctagaataacctatctatttatttatttatttattttacaaaaaggaataataatataaatataatattatgatctataaagaataatgatgcattttgtaatactaggaaaggcaccacccccctctaatttattacttttcaacttttttttcttttagagttaaaattctttaatagacaactcataaattcaccttataagggttctagggaatattattagcccaactttattaattttcttagccccctcttttactttgtgatcatatgtggttatatatatatattcgtaattactaattatatatattattatataatttatagagagactttataaagtgatatatattcttctaccaacaatatatagtgcatgaatatcttctttctatctccgtatattataataatcaacacaacttgactataaattatcaattcattttttttatacatatatattgtgaaaaattttataatatacctccttaaagggtcatcgatgcacaaatatttattttggtatttaaaaaaaaaaattaaattttttttttatgatcatgtacgttgttataattatttaatataggacatcatgtaaaattttaagaaattgaaaaaaaatttaatacgccgaaaaaatagttcaaatagtgtgttgcatgcgtgcttattttgttttatacgcgtgtgaaatagatggtttgaatactattttttatattgtaaattattttgaattttacaaatattttaaattgctataatgtatacgaatataaaaaaattaaaataaaaaattcttctaaataacaaatcagataaataatatatcagtatatttcttttaaaagaatacgaagctcatatatatatagtattaataattatgggtacatgatttggattaatggggaaggaataaatgaatatattataattataggttaattaatttgtttgtccggtgatgaatcgaaatggaatatagatttgaaacattttggtgaatttgtacatatgcacacgtgcaaaagaagattatcaatatatgagaatatactttgtgtttagataatttatatttatgtacaatgtattgtcttctcaatatttatatatataaatatattttaattaacttaattattcacaatatacaacaaaatgatgaaacttagagcttattagatgaagacacgcatatacatatatacacgtttatatattatgtatagatgtcactatcctagaaaacacactgaattaatagttatatagtgaaatgtaaccaatatatatgtcttatctttcaatttttttatttttttttatttttttttaacttggtttcatcaatgattatttttggttcaccagccagagaatgattattattatccctagtaattattctacggatgaccattaataattactactaataataatatagtacagtgtatagaattggaattaattagttatttatatggtgggaaacaccctaatcttccactacatatcacagtatatcctatttataatatttaattaattatatatataggatgaaaatgattcattattagtagcgtaaattaattaatactaataatatttaggaatattaatacaaaatatcccaaagtttcattgaccttagtattattaattgtatataaatatgatgaattaataattaagtgtttttctttgtactagaattaataaggaaagtgaatgatataatgagtcaataaacatatataaagaagaaagaatatataaaagggaaagtagtagtaagactaagagttaattattagaataatattataaatacatttaattaattaattaattaaatcaaagattaaaaaaataaaaggtaattaagtggggtctgagtcccaccatagtgggttgggaatggaagactacttcacatgatctcttcttcttactattattgatattctcttctcttctcttctcttctatatatatacatctattttcttctcctcatattggtaattgagaatgccaattaagtagtactacttaacaattaacacacattcatttcttatcaatcttactatttatatctatacatatatataaatttataaactccaaaaatgtcggactctactcttactagtactacacctacaactgatcttcaacttacttctacttcttcatcacaatctctacaccagctttcttgtttgtacccaatcactttaaaggtatgtatattttttgctttttctttattaattcatgtaattctgaggtattaatttctagtttatgttcgtcgtacagtcaattagattgtttatgaattagatatgtatgctattaaagttagatggtgaattggtttaaagaaaaatcaaactcaaatggttgttgaagcattattcctagttcgtgtttgtcatacagccaatcaatcaagttgttcataaattagatttgcatgcatttaggcttaaagaaaaatgaaactcaaattgtttatgaggtattccttttttgtgtttatcatacagtcaataattaagatgttgataaattagatgtgcatgcagttaagttatcaaactcaaattagatgtactcatgaattagatgtgcatgaattaagttaaggagaaatcaaactgaaattgtatgttcgtgtgtgtatgcagtttgaagaggttgtgtacaaagtaaagttagagaacagagatggtggtaagaaacacatagagaaaagcattcttaatgggataacagggatggtatgtccaggtgagatactagccatgttgggtccatcagggagtggaaaaacaacccttttaacggcactcggcggccgtctttcggggaagacattatcaggaaaaatcacatacaattcacaaccattctcaggctcaatcaaaagaagaacaggttttgtagcacaagatgatgtgttgtaccctcacttaacagtaacagagactctgcttttcactgctctgcttagacttcccatgagtttatcaacccaagaaaaatcccaacatgttgatcgtgtgatttctgaactgggtttgaaccggtgccggaatagcatgattggtggaccacttttgagaggtatttcaggtggtgaaaagaaaagggttagtataggacaagaaatgttgattaatccaagtttgttgcttttggatgagcccacttcgggtttggactccaccacggctcaatggattctaacaactttgaaaaggctggctagtgggggccggactgtggtcaccaccattcaccagccttctagtagactttaccatatgtttgacaaagtcattcttttatctgagggttcacctatctacaatggacctgcaaacactgctcttcattatttctcaaccattggtttctctacttccatcactctcaaccctgctgacctcttgttagatctagccaacggtacttacttaattcactcactcactctttcatttttaccatttcaacatttttgtaattgttttctatatttgtaattttatagctttaaaaatgtatttttgtaaataaaaattttaggttgtaatattgtaaataaaacataaaaaatagaatttttgaaaattgttgttaactaatttaatttgattttgtgcaggaatagccccggattctaaacatgcaactgaacatagtgagaatatggaacaagagaagaagaaagtgaaggaagctttgatttcagcatatgataataacatatcgcctaatttaaaggctcaatttattataactacttctgataacacaaaagatcataatcataataacaataataatggaagtgaatacaataacaagaagaagaaaatggcagctaatagagatcaatggtacacaagctggtggcatcaattcaaggttttacttcaaagaggtttaaaagaaagaagacatgagacttttaacaagctaaggattttccaagttataagtgttgctattcttggtggactcctctggtggcgcactccaatgtcccacatcgaagacagagtaagaaatcaacttagatttaaccatagtccatataacataaagctaaagactaattgatatattttttaaatgtatgtgcagattgctttgctattcttcttctctgtattttggggtttttacccattatacaatgcagtgttcacattcccacaagagagaacaatgttaataaaagaaagatcatcaggaatgtatcgtctctcatcatactttttagccaaaacagtgggagatctcccacttgaattggctctaccaacagcctttgttttcataatttactggatgggaggactcaaacccgacccctttacatttatactatccctacttgtagtactctacaacgtccttgtttctcagagtctggggttggcaataggagcaattctaatggacataaaacaagcaacaaccttagcttcggtcacaacacttgtgttcctcatagctggtggttactacgtgcaacaaatcccggctttcatagtgtggctcaagtatttgagctacagctattattgttacaagcttttgttgggggttcagtataaggaaggcgaaatgtatgagtgttctaaaggggtttggtgtccggtggaagagtttcctgctattaaatctatgggactcgccaatttgtggatggatgtgttggttttggctctcatgttggttggttataggtttcttgcttatttggccttacaacgagtgcgtttgaggtaaaaatagcccattataatctcattctgcttgttgctgatggtggtgatcgatggtgatggtgatggtgatggtgatggtgatagtggtggtgttggtgatagtctccaactccattaattgagttttgtcaaacaaattattattattattagtaataatgtgataatgataatgaggatgaggatgaggatgtgatgatcataattataatgttataaacgcgaattaatattttaggtcagttattatagttaattaatttttgaggctttaatattattattattaaattggactattactattacattatactttacgtactctttatataactttctacttgaataggtctctttaatttctctgattttaactttaattagtgacatacatgtgataaaatatatactcttaattattataaaagaaaaatataaatataatagatggatgagagtagattagatcagaatattgtattttgatctgagaaaaaggaaattataaacgaaaaacaatgaaagagaaccacacttatatgtaagaggcaccatagtctatcaccatattaatatggtacatacattgcgattagttagcgattttttatattatttttatataaaatctaatattaaataaggacagagtgttggaacc

SEQ ID NO: 79009 - DNA, 3923 bp, Cannabis sativa
tggtgtacatgtgtgtctaattggcataggcggaaataatatatatgatgatttcacatttcattttgaaaattaaagagaaaaaaagctctttggaaatcactgttattgaactaaagaagtctacttcttctaaacatgaagtccaagaattcttactgtcagcaacagaagcataggaatcaacaaattgaaattacctattaagtatgaaattccaagatcagttacactggtgttggacatttgtagctcttttaaactggtaagccctgaaattagacaagaaaaaaaagataaaaaacactgccgaatcagcagtgtagttctgccattttaaacaatggaaaaaaaaaaaagcatacggacaaggtcaattttattatgtcacaaatacctgagagagcttggaggtctgaatctactatgcatttgcagcatctgatgttaagagacctgagcttcaataaccctgtgaagtgaaagtaattataatgatcataaacgaatcaaaagggagaaagtagctcaatgttatccttctgttgacaatattttatcctctacccttaaaagagtttaagaaatcgcaaagctctgtcctattttccttgcttatttcataaactacgccctatttaaaccagtgtatatggacctgtgaattaagcaattaaggaaaatggacaagatatggtatgaccccaaacttcagcttgagttgttaagaaaccataacataatttgtaaatcctaaagaatagatacgacaaaaagatacatagttcaataacaaaaatatgaagtttaaataaataagttaagtagcattcagcacaaacctttaagatgaataaatccaccatgaatgtcaggacatctctccaaatccagcttttccaagttaactaaactcgagaaggcacgcatgccttcagcagttactgcggtgctctttttaaaactcaaagaggtcaattttgagaatcctacagaacaaggttattgcatgcattcgttaggaactgtttaagttaatcctttttaatatatatatataaaaaaaaaataaataactttaagtaagagatggggggcactagacatggaggtgataagacatagttgaaattgtaaatggagaaagaaatatagaatcttaccaccaatgtgattaagcccatattctgaaaagttatgacagcaattcaaagtcaactcttggaggtctgtgcattgtttgagagaagccaatccagtataagtcacattagaaccagagagatcaagggtaagtaaagatgatccttgtgaagagacaacatccatccaactatccttcacaccaggatattcatccaaacaaatatcctgccaatataaggtgaaaaaccaagttaataagcacctttactctcacaataatgattaacaaaaagccattactacattaatcaactcatcctaaggaaatatcacctgaagagcacagtctctgaaagcttcgacggaaacatcggtaagacaattggaacataccaaatcattaaatattagctgactaacatctctaggcagcattgaaaatgaactgtgcatgtcaatgtcctgttacaatgagccagaataagataaggcagataaaatcgtatgcttttctacttgaaaaagacatagtaataaagtagacaatgacctgacgtattttttgtacgcatagttccaataaagatggacaattgtctcctcctgtctgaccatctacaacaggtctagaaaatgaagttgtcagccattttgaactgctactcttacaatatctagacgacacttcatgaggcacggtatcttccatgactggttggtctctcttccttgaacaaattcctcccataattcaacaatatgataaaatgttattaataaatgttatgaaatgtgaagatgcatgacattacggcccatcccagaacaaaatacagcccatgtcaacaccctccatcctaaatgacagaaaaagacaagaaattataagatatttggaaattttggaggagcatgaatgatcaacacaaatggctaagtaaaaacatgtacaaagaaaactaaactactaatcacacaaaagtgtaaaagaccgatacaaaaatccagactaagaccaaaaaaaaaaaaaaaatcaaagccaataagataaaaggagtcttataatacttaccaatacacacagaccaacaaggaaaatacccgattctttatctaaagcaaatagagactcagaaagctaagctgatgataagagaaatcgaaaaatacaccatcaaatagtcaaaaagattctttataagaaagaaatcaaacgcaaatccataaaataatattgtgttataataaaaaacactgtaaaactaaaagcaacgaataataataataaaggtattatcatcaacataatatctgccaataaataacatatgagtctgaatttgatagtgatcatcaaaaaaaaaaatgaagaaatcccacaattcccgttcccttactatttgaattttcatccatattttctcagcaaacgaacagattctaagacaacttttacacacttactcaagaaacaataaacataaaaccaaaagataaaaacagagctctcaccaccaccgggccgtagttgagacggagagagatagagagatggggttgaggttggatagtaagtagagtaggagagagagagagagagaggagaaagagagaggggaagaatagtgaaagagtgaggagttttctttctcttcatctctgtttcagagtgacgagttaacctgattgtgacacgtggcgcatagaccgggcctacgtcaacagagtgcaattactttattgattaaataattatgaaaatttgtgtattgaatgtaaaataagtagtaataataataatgaaaattgctaaaggctagtgtctaatattattatttttaatatttggtgtaatttaatattgagttttatttattttattttaataaatattataaaaaattagttattaattatataatatttcgtcgagatgttcgacattatgaatatctcgtagcaatactcaataataataaaggaaatcactcatatattatttttttaatttttatttttttaattttacagtttagattgatacgtgattattcgtgtattctcctttaaaaaaaattactttaaaatataaaaataataaaatccttaataataataaattatttaaataatattttatattataaattattctaaatttactaaaaatatacaaatgacatatattattatataaaaattaaaaccaaaactatctcaatatttcaattttgaacaaatattttttactgcaccataaaaatatctaacaataattattagtgtttacacgtctcttcatccaaattcaaatcccctcctccaatatcaaaaataaaataaataataattattataattctgaataaaatacctaataattataattattatcattaataagaagaatagattgagtagtactaatgggtcccacaacagacatccatttcagccgcctactttccggcgccaaaagttgttttatccattgccacttgcattgccatttggctatgccgaacggcaaaaaaacttcgtatatgtgacaaactttatactagtggggtttattttccaaaaatataaaaattaatgataaaaaaaattagaataaatcatattcaatataatccatttaatccaaacttgtcaatttcgatgaattggtcttttttatttgtttctttaggatgtgtttggaagtaactatgtaattattaggtaatataattactagggtagtaattacacagtttagtaattacactatattt

SEQ ID NO: 79010 - DNA, 4452 bp, Cannabis sativa
tcaacttggtatcaagagcaggtcgttcatggccactactggagaatcgtcttcttccctctccagcgttccaaccacgatgcttctccctcctctgcgtctggaccggagcaactattttttttggcggtcccaagttctccccgccattagagcacatgatctggaagatatccttcttcgaagaactcctagaccccctccacgcatccctgaaacagagggttccaccaatctggtacgtaatcctgaattcctccgttggatgcgtttagaccaatttctcatttcttggttactttcttccatttctgaatctatgattggacatgttgtcaattgcgagtcttctgctgagatctggacaacactcgaacaactcttcaacacaagatccaaagcacgcatgattcacttaatgtccatgctgcagaacaccaagaaaggatcaatgtccattgatgaatatatgcttaagatgaaaggctttgttgatagccttcgtgcagctggaaactctgtttccgaagatcaacttattctctacattcttgctggtgtaggcagtgagtacgaatccgtggtggttaatctcacctctagagatcagttgagtcttcaagaagttcagtatatgctgcagaaccatgaaatgcgacttgaactcaatcaggccaattcggttcttgatcttaacaatcctatggctaatcttgctcagttcaagaaatcggggtcctctgccaacaataatagacccccccaatcttccaattcgaatcgaggtcgtggacgaggcaactactccaatcgtggacgtggttcaacaaataattcccgagtcatctgccaattgtgtggtcgacctgggcacactgtcatcaagtgttacaggcgctttgatataagctactcaggccctgatgacaatacaatgcctcaacctgagtcccaatctcaggcctacattgcctctgctgctacagttcaagatggagcatggtacatggatagtggagctacgaatcacatgacctctgatccgactcatatgactcacaaaacctcctacaaaggcaaagaaaaggttattgttggtaatggatctaaactccctatcttaaatgttggttctagtgttcttgctgctaatagaccattgcatcttaacaatattttacatgtcccttccattaccaagaatctcattagcatttctaaattcactaaagacaatgatgttaccattgaattttctcctgactattgttctgttaaggatcagataacgaagaagcctctccttcggggcactgttaagcacgggttatatcagcttcatccctcaaagcactctattcaaaggcctcactactctacttcctctactgttagtgctaatgttgttgaatctgtcaatcaagattccatacagcaatgtaataagactcaaagccttgtaaatttgtggcacaaaagacttggccaccccaataaagctgtcatgaataaaattttacatttcttgcaagttcccactgctactccttcattctgcaatgcatgccaatatggaaaattgcaccaaatacattttccctcttctcaaaataagaccacggcaccatttcagattatccatacggatctttggggcccttctccccatctatctgttgaaggatacaaatattacatccatttcttggatgattttacaaagtttacttggatatttcctcttaaggccaaatctgataccactaaaacgtttttacaattcaactcttatgttgaaagacaatttgacactaagatcaaatctgtccaatcagactggggtggtgaatttcgaccccttgctcctatctttgccaagcttggcattgtgtttcgtcacccatgtccccatactcatcagcaacaaggtcgtgctgagagaaagcaccgccatgttactgaaatggggctcactttgcttgcccaagccaaactccctctcaaactttggtgggatgccttcactgctgcaacctatctcattaacaggttgcctattcaaaaacaacattatgtcactccatatgagatgctgttcactcaaaaacctgattatactttcttgaaggttttcgggtgtgcatgcttcccattactccggccatatcaaacccagaagttcaacttcaaaacctccatctgtgtgtttttgggctatagtccttgtcacaaaggctataaatgtcttcacccatcaggccgaatctatattgcccgcagtgtatcttttgatgaacatactttcccatatcaaacacttttttccccacctactcccccagccatacctcctgcccgtggccctacctatataccagtaccctctaccctctcaactgctccaactaccaccaacacaaatgtccctttacagccacagatttcccatacacatacagacatgccaaccacttctcacacccctactgatcacttttcatgctctcatcctcctggttttcccgtgcctatgtatcctccttttcatagtcttccttcttctcctttgtcagctcaggagtctcattccatccatgacattaatcctccccaacatgatgcaccacctactcctcctcttcccataaacaaaatcccaaatgccccatctgtttccactcatcctatgatcacccgttctaaaactggttctctaaagccacgggtattagcagctgaactaaccagaactaacaatttgttttctgagcctcttacttggcagcaggcactaaagaatccacggtggagagcagctatggatgaggaaaatactgctttaatcaagaataaaacatgggttatggttccttacattgatggtatgcaacttgttgacaacaaatgggtatataaggtgaaactgaatatggatggcagtgtggatcgacttaaagctcgtttagttgccaaagggttccaacaaacagctggtatagactattttgacacctttagtccagttgttaaaccatctactattcggatcatgtttactcttgccattacttttggatgggacattcaacaagttgatgtaaacaatgctttcctaaatggggaactcaaggaaactgtttatatgagacaacctaagggttttgaggatccaaattatccaaatcatgtttgcaaactcaataaagctctttatggacttaaacaggcccctagagcttgttatgacaaacttaaacaagctctcatgtcctggggttttcagaattcagtctcagatagttctttgttctttatcaacaaaccttgtcatcaattgttcgtcctggtttatgtggacgatatcttaattactggtgctcattcagaagaaattcaacaagtcatctccaatttacacagcaagtttgccttaaaagctctcggccaggtgaactattttctcgggtttcaggcacatcgaactgagtctgccatctacttgtgtcaatccaagtatgctatggatatacttcacaatactgatatgctcagtgcaaagtcctgccctacaccaatctgcccaggatacaaattatacaacaacaatagtgaacttttctctgatcctactctctacaggagtaccataggggctctccaatatctcactctcactagaccagatctgtcctttgcagttaataagctcagccagttcatgcaatctcctacccttgctcactggtgtgcctgcaaacgtgtcttgcgatatatcaaaggcactgtcaacagaggtcttatttttaaacctgcttctcgactagtgcttgaaggtttttctgatgccgattgggcatgtgatattgttgatagaaaatcggtaactggtttctgtgtgaagcttggtgataatctcatctcatggggctctcgtaaacaaaaggctgtctcaagatcaagcacagaaagtgagtatcgatctctttcaactactgctactgaggttgtttggattgcctcagtcctacatgaaattggagtgactctcccttcgaagcctatgatctggtgcgataatcaaggagctcaaatgcttgcttcaaatcctgtgtttcactctcgcaccaagcatatcgaagtagatgttcattgtgttcgggacttagtcttaaacaacaaacttgatgtttcctacatccctacagatgaacaaccagctgacatctttactaaagcattaacttttcccaagtttaatttcctctgtagcaagctatcactggatttcttcccgtgtagcttgagggggcatattgaggatactaacaacactaacgactaatagttgtttaaggtcattctgttagttagttattgacagttgtacactggttgttatgattttctgttattctcccttagctcttaaagacatatatattggtgtctttc

SEQ ID NO: 79011 - DNA, 2034 bp, Cannabis sativa
gaattcgggcctagggtcgacgtctaggtccggtcccaagtctaggtctggtcctatgtcgggtccaggtttgggtttgggtctaggttcgggttcgggtctcggtctgggttcaagttcaggtcctgggtctgggtttgtgtccaagtccaggtccttggtctagggttcgggttcgggtttgggtcccgggttcaggtctgtcttcggtgtctagctcctaggtcttagaacctaggttcgggttcggggtccgagtccgatcctgggttcgggtccgaggccccacattctggcacccgattttaatatattaaaagaaagaaacttaactcaagactcagacacggacctggactcggactatccccgggttcgggtctgggtctaggtcccaagtccagttctaggttcgagtctagaattaagtttttttttttaatatattaaaacctgattggatcagatccgatctggaaaaaatttaggcggggcgaagtgcatctgatctaaaatccaataagtatccgcatatttcggatcagaagtgatctgtcagatcggagctccgacccgatctaactaaatgaatttttgacatacctatttggagttattgaatcacctctacaattgagaggggatgtgaagaaatgaacctattatatatgcatatttccgttatcgaatgtggcccctctatgaacaggtggctcatttttagtgttatgtcagaattgtggatccttaagacaattttaccgttgctattgtaatgagtgtgtatggaatatttcctttttctgttagcaattactgctagctgtaatccagccataggctcttgttgtatttggcattttggcctttgattataaatggcacctctctggctcaatgttaaatgagctgagattttaaaaatagttaaaacttttctagctatcctgctaactgctacaattgtctcaataaagatggatagagaaaaagtaagttgtttgtgtagtgaatgttgtttaaatgatatagtcaatttttatgttctgcttgctttgtaaagaagtgtggatgtgttatgagggatggatgttctactatcaagatgtaaaagttaaagctttgtttgcgaagtacattctctcactggagatctaagaaaacaagaagcaggaagaggaccaaaacaagtgcactaattttattcttgtcaaatttaatatgtgtgtgtttttcaatatgggtattgaggtgcatgtcactgctgccttagcatatgctccctcccagttgagaaatagtatattaaaagaaaaaaaaaatttatttttgtccatttgtttatatgaaaaatacagtttttcttttcgagggcaatatatgaaaaatactgttgtcaatgttaaattgccatgtcatattccacaagagtaatagttaaaaataaatcttctaaaatatgacttcaccaaccaaaattaattttgtcaaaaataaatttgcaaaataatgtattcgacaacactcaacatgacatgttacgttggtgtcgagttttgtcaggaatattattttgtaaataattctaaaacacgtttgaaaaagtaacacaccatggacataagttattttttgagtaaatttcttgaaagaagaagaaatacacaatatttgatgaggctgatctattctttcatttaacaattacagttgcaaagataactaaagaaagattaaacatctttccactgtggtatatcagccaattatactcacacatttctacttacaattacactaacacatgaaaacatacaaacttagtatggtacagtaagtgccattgattcttggagtaaaataactggcctaatatgactgtttaaaccttagctctatcaaccccttatgagggtgaggccaatagctgtgacaatgattgtggatggaagaccaaacttgagatgagtccagaaagagagtgtgtacttgaaagagggagctcgacgggcttgctcacacacgattagatta

SEQ ID NO: 79012 - DNA, 2421 bp, Cannabis sativa
acaaaagtcgttaaatctaacaatctcaatagttcatgagtaatttttaacggctaaaaaagttcaaaaaatataatttggtacatctcaaattctcagaaaaaaaaaatccaaattttcctatatttatatataaggcacagactaaaagtctaaaaccaaaacttaccaatagctaggaatcaaagatattttccagtaataatggagatactagttatgttgcaacaagtacttctgcacccatttcttttctctctttgcttcctatctcttcttctcttctttatattcacaaccagacaatcatcatcatcaagtggcaaaaaaagcaccttgccaccatcaccaccaagcttaccagtgattggaaaccttcaccagctaggcactcacccgccccggttccttcgagtcctgtccgacaagtatggccctcttatgttcatgcatttgggaagagtcccaactctcatcgtttcatcagctgaaatggttagagagatcactaagaaccatgacatagctttctccaatcgaccacatactgtagctggtaagatcttactttatggctgcaaagacttggccttttctccttatggtgagtattggagactagctaagaaggttagtgttgttgagcttctaagtgtcaaaagggtacaattgtttcagttcgtaagggatgaagaagttgatttattgattaacacaatacgagaaacttgtctttctaagaggtctgtgaacctcagcaatttgcttattgcaacctctaataacataatggcaaggtgtatgcttgggcagagagttgaggatgtaaatggtcatcagaccagatttggagaggtgtctagaaagataatggttgattttatggcctttagtttcggagatttcttcccttttttgaaatgggttgacgttattagaggattgattggtcgtttgactgaaagctttaatgcaatggacagcttctttgataaagtgattgaagaacacaaggcagtaatggaaagcaatgatgattcttgtcaaaatttgaaagatgactttgtggatattcttctcaaagttcagaaagaggaaaagaatctgactatggagcacttgaaagctatcttaatagtaagttttacactctctttctttctcttagtcaaatacacaatgttaatataaattcatttttgcaggacatattcgtgggtggaagtgagactacttcaacagcattagaatggttaatggcagagcttttaagaaatccaagagtaatgaagaaagcccaagaagaagttagaaaagtagtcggaaacaaacaaaagatcgattctaatgatatcaacaaaatgaactacttaaattgtattatcaaagaaaaccaaaggttacatccctcacttcctctgttacttcctcgtgaaacatcagtaagtgtagaagttggaggttaccatattcctgccaaaacaagagtgttcatcaatgcatgggcaattcatagagaccccagtgtatgggaaaatccagaagagttcatccctgagagatttgagaacagcccaattgatctgtttaaaggtcaaggagctcaaggttatgaatttgtggcgtttgggtgtgggagaagggcttgtcctgggatctcatttgccatggctagtatggaatatacagttgctaatcttttgtattggtttgattgggagttgtttggtaataatgggtcctcctcagatttggatatgagtgaagtttatgggcttagtgttacaaagaaaaaagctcttcatgttgttgcaaaaccttattctccttgagatttcttatgtgagattatgatcatttagtatgcttctatgtagttttgggtgaataaagtgtgaaaggaaactaaagtgttttctacaaaataaaatgtatcaaagtttggtgtaatatttggctatgtttatgtttttttaaacaaactttgatcataaggatgtattagatttagtcccacattgctaatggggcaaacttattcacttattgttattgtttagaaataaaattagggtttattcttgggaaataaaataaaaaaaaagaaaaagaaattagggtttatttaggtttttttaatttttatttttttaaaattgttttttaatttttaaagaaaaagaaaattttttatttttaaaataattaattttttatttttttaaatatttatttacgtgaaccaataaaattgtgtcacgtgtacattgtgtatacgtagacatttcaccttgacatttaacagtcaaaaatagatagaaggggcaaataactccacaaaaatattaggcaccctttagcatttctctttccttatacaataaaaataagaaatgctcctacaataaagataaaaatgat

SEQ ID NO: 79013 - DNA, 5025 bp, Cannabis sativa
aattttacccctatcacttaaatcaaaattttacattttcccacaaacctacacatccatctacaaagaacataaatctattatgtttaaaattatctcttaattatgtgagtgtgaggataatttgagtacaatactcataaaaataggtataattgaatttaattttatttagaagtaaatttgattcatgtttaaaaaaagtgagtatttttcaatttctcccaaaattgaaatcctttttttttttttgaaaaatttacatggtatactaatttttaccaattttttacaaaaatactgtgagacggtattttttatttttctactgtattttttttataagtttcatactgcagtatacagtgtaaagttttcattggtattctactggtattttttagttgttgtactgttgttttgagttgttctgttttgtgttctactggtgttttataaaaacatagtatttttaaaaacttttacgtgacagtatttttgtaaaagctaacccaaattttaatatttttgtaatttttttttttaggttttttgggttttggagtgggtgattccgggtataaatgtgcacctggcaaaggacctttttgtaaaggaaaatttataagattctttctcgtaaatattacgctaacagaacccaaccaaaaataactttacaatttcatccctatcactatcaatggcagaatctaactaatttcattttcaggtcattttccaacctcttcaaaccaaattaacaatctttacactcaatcttcttctccaactatttggagatgaaatgccatatctcatcaaaataattaaataaataaataaattactccatgttgattacactttagtgtttatcttcaagaacgaagaaggcagagaccagtctttcacaccaaaacgcgttcgttcaaattctcttttccattccgcgtacgtatcaaaatctgataatcaaaactgggtcgatggaaagtttccattttgtttcgaagaggtggtacagtcttcttctgttctccatttcggctttcacaattcagcttcgattttctcaactgtatgagatttttttttctttctttctgctatttggtttaatgggttcaagtgtttgagagaagtataatctatttattcaggaaaattttgtgaataaaaatctattctctggtgggagaacatggattccatggagtcttgttctgatcatctttatcctctaacaagtttacagattgggtaagtgactattcatattcattttctgtattcagctaagagtataccattcatatgagttcatccatgttttactgcttttgtttttttcatttctttgtacctgagtttgcatattacaatggctaattaggatttttttcttaagacatgccaaatcgtgcctccgaacttgaaaagttcttccgaagattgttgagttaagagttttcatctaatttcattcaattttactaacatggacggaatacatatacatttacagtcaccacgttaggcgtctgttagtaaaattaaacgaaatttaaggaaaatttttaaatacaacaatcttaataacttgtgggaatttttaatagtctgaaaaattcaaaaggcacgatctagtacatgtcaaattagaaagaaaaaatcttaattaaccttatctaaacgagtcaattatgttttggaacagaaatgtcaatttctttctttttgtttttgtgggtagtggggaattcgattcgtgatgttgaattttggtttctaacactttgatcaccaaaatactagttgcccggaagatattttatgaaatatgccaaagacaacttctttgtccttacttgttgtttgtggtgtctaatcatattttggaccacatgagctcgtgtttgtaaaatgatttctggtcttgaaaccacacctcaaggcatttttctcacattgtttcttttgcctttagggatatcaatacaaatctttcaagggaattcttgtatttcgcctctgttagtcataagttttttatccttgttgataatcaatcatggaggaaggccaagcattcaacatcaacccgcctcaaggcgttggtgaccaccaaagtgaggttttaggacaattgtgttaatgtttgattgtgatattttcactatcatgttaattaaaatcatttaacttgaactttttccttaattacagtacagaacttcaccatttagaaatactagaccattactaaggagctcaagtttccattcaagctcttctggccatgaaacgaatcgcttgtttaagtggtttcccacttttgacattgctagttggagagacaagactccattttccatcaaaaatttgtataaggaattgcatggttttattgtgtttgaagtttcatgggaagatgttaggggaatcaattatttgaatcagcttcaggtataaacaagtctattgagaaagttactttgacaatggttactgtgatttaagatacaaaggaaacaacagtcctcatgtaattattaaattagttaaggaaagttgaatccttgacatgatcatctcaactgtaattgagttagtaaacattatctttgaataaaccagttacatattatcttgaaagaaggtaaaatagtcttaaattgttatcgattgtgtttggcttgtttaattatacaatgtgttgccataacagacagatggatccatggctttcgaagtaaaatcgttgactaaatgggaattcaacagcattgatcaagcattgagttgtatctcatcatggttctcagggactcaacccgaaacacagatattgaggaacaatctaattcttttgcgaggaaaatttcctcatcattcgacgaagaaagttgcatcacaggctgatgaggtcttttctgaagacatattcttcgatgccagtgactctgctcttgatgaaaacgacacaatggatatggataagcagcagctacaagaaccgaaaccgtcaggaaacacagaacaaaatggggaagtggattgttatagcaatagtggcagagaaccaatggtatatgaggacattcttttgctatgcaggttcaaaaataaagatcttccatttaaactaaagcaagtaatcacctcagatttgaagcttcttacattacttgagtcaggtctccccacttgggttatctttcttcagtcatatccactattttgtgcactttatcgtccctggatgagacctttgtttagaactatctatatactaatctcacttgtaacagtgataattggattttatgatctctataagaatgtccccctattaaaggctactatctctcacctttgtggtccttttttcaactggattgaatcatgggagatgctttctagagtcaaatatctggggacaatgttgttcctccagaatttcgagaaggctgtgaagatgtttcttatgacaacacgaggagttaaactgctagtttcggaagtctcagattttctgatgtacccaattgaagtaatggctgatttcttactgccactatggagatttgcagctgatacaacggaagcattgtacaatactggattggttacaattgagttcttgaatagcgaagttggtctcttagtcgaggatttgatcacacccttggaagatctctattcatatgtattgagttcaggtacaaacattacacagaattttctctagcttatatcagaattttccttttatctgattgtatcctttgtctgcagccacactagttcacccaatcttaaagtccttgtgggatttatgcctcttttctatacaaagttttcttacattggcaagttacttgggtgctctattttgtgaaatatatgaagttattgagagttccttcatggtggttgtaaacaccatgactcagctcataaatgttgttcgtataaagcctcagccgtctgagttctcactttggcattctctttggaaagatctattctcaaaggttcctctctttgatgcatcttctattgataaactcttttttggataaatggttctctctttgattctgcattgatgtgatgtgtaggtatttcgctctatccgaagtattataagcgttctatctgcattcgttgcatcctgcaataggcatagactaaggtaacctgtgtggccaaattgtgctttcagatacttgaagtaaataccatatagactctcatctaagaaattgcatattgttggttgtgtatgtgcagcatctacaattacctaagagttatacttcgaaagctttccaaccgccttggtttttcctccgctaactgctcctgttgccgatcacctcaatcgaacattcatgttaaggtaatctatgaaagtttaatgccagccctttcaattagcttagaataatactgactgaaacttaattaaacataaaggaagaactataaacaaattagtaatcatattatattgaaatgcaggttgaacttgatgttaaggaatgtaaacattgcaaatgaatttttgtagagcaagacaaggctggcaaggtctcctttatatatataggggaatgtgtttggcatttttgatgtgatttaagtttggtttggttggatcaatagggtataattcagtttgtaaatatatcagctctttctattatgaaatgaaatgtgactatttgtatattgagattcataaattgatgttatacgaattcaagtccattgtgctttaggtaaaaatggggatttttgcgcaagtcccatattgtccaaaggcctttgttttaagagatcatttagttgaagacttaagcctattaaagaagctaaggatcaatgaaattgaaacctgtacaggtcaggtacatcagattatagtgttctgactttgtatcagtcaaacctttgtttttgttccttattatagcatagctgataatatataatatggggtttgttttcagatat

SEQ ID NO: 79014 - DNA, 3782 bp, Cannabis sativa
aaaaaatgttctaaaaaactccgaaaaatgtggctactgcgaaaactagaaacagtacacctcccaaatagccaacctgattaaggacaagaatttagtcacattttaatcttgaaaacaagaatgttttgtatgttttcatgtgaggggaagattgtggctcttaccaatttttcggaaatgtagttggcgagaaatgcccctcctatgattgcaataactgtagcgagtaggtgtccggctatggccccacttgccacgccccacggagactacagaagaaaggaaacaattattggtatgggaaaatcgacactcaaatccagaactcgttattaagaactaaatccaacctgtgcggcaccaagagcgattgttgccagcattgaacgatctccccattcctagaataaccccacattgtaaagttaaagtatcatctttgaggaacaatactactcatctatgcaaaaatagtagccttgaaagaaatcttgttgcatataaggaatgagatatgcttacagcaaagaatacaaggctgaatgacttccaaataatttccagcggattggagagtcgctttgatgcctgagacacatttataattgagaggaattaagaacataatcgacagaaaaagtagattcgaaaaaatgcttctaggcccgagcataaccttttctttcacaagctcctcagcttcggcatactcatcaagttcaggactactgttgtcaccgctcttggtactactcgatggaaggtcccatgcatcttttaatgctttaataccgaagaaaagtagaagagttacagctgcatattctccaattggcaaggctgttggaatgacagaaaatcgagaatggatgtcaaataagctgtgaaagaaacaataagcgggtatagatgcaggctaactactaagaacttacttgtttgaaactgagctggtacagaatgaaataatcgcccaatgacaaccgagagaactgtcattagtgaaagagcacccattgaacccaacaaaacctgatcaatgttacataatgtgtaagagtaagtagtttctaaagaatgaacatttatctatttatgcattgtgaaatgacacatgatactttttattttaagtacacaggattaaatcgttgaataaagaaattagcatacttttatgagtttaagattttagtaggagaatccataccagccctttctcatattgcatggccaagagtgcagcaataaagaatgtctaccgaaaaaagaaaagaaaacggttaagatttaactcatcaaaaggaaactagaaaacaaacagtatctcatggtagtcttacttaccttgtccccaatttcagacacaaatatcaatgagaatgcagcggtgaaacccgactttgcaattgctgctaaaattgatgacggtcctcctttcacaaaggcaatgagtgaaaataacaaaccacaaccgaccagcacaaaagcaatagcgacgggataaggaagttggttctgtggcttttgactgtgaaatgatcaaaaagttggcatatgagtttccctaagacgaatttatgaacaagtaaacgagctagaatcaaaacgaaaacaataggcagactcacatgtataaaatacactataggactgaacagactttatatttatcatcactaattcttagaaaagtttctgtgagttttagacattgaaatttataggaacaactcacatttcaggtgcattgtcactagaggaacctgtggtaaatagtttcttgctctcattatcctcccttccatcatatccccccgatccaatgctggcgttagatgcttgaactcgaaccgagccacttaaagaactcgagagctctctacatcttactattataacaagttaaagacagtaaattaatgcaaagtcccatttcaacataatttgcttctaagaatcaaccttcatcaaaataaaggatcacatagaatgatacaatgcaactcaaccataacctttgtcctaactatctggcaccaatcaaacttgtgtgaagtagctcaatgaactgtaattcagcaaatttaagctcaaattacctctaaattcttcaaaacccatataggaaagtaaaattaatcaataaaatgcacactatctacttaagcaaacaagattaacttacattcagccaatttggttaaatcaaatctaaattcttcaaaatccagatagacaaaaaaacaaaaaaaaaaaaacatttcaatccaacttatccaaaacccaaaatctcagaaatcccaccaagcaaaatgcttgctttataatgaaaataagctcattaattcaaaattacaataagaatttaaattgagtgaggataacttacaagaagtaaaaatggcgtttttagaaagagtggcacaacatggtagagtgtccaccacagctaacaagggaagctttgttcttgatacaattggtctatgactatgaggagccaccaatttctgcattctgctccttcttcttcttctttactcttcttctatggagtgtgtttttttattttcacaaattgagctcctccatcaaatattccaaaatcccaccaaaaaaatatgatcttttttctattgattttgttatttgaaggaatcccaaaacgaaaaagggaacaagtttggatttttttattttttgtatgagagagtttggatatgggaagtgtcgtagcttagaattagagtagtaatgaattaatttttgggtgtttttctggtagtttcttcgatctgagggtggggctttgactgtctgccacgtgtcatctggagataaaacggaactccaacctcttctctagtctctctaattatttgtataattatagtaattttgtttgatatagtgattaaaatgaatttatgaatttatgaatttacgatataaatttttacattcagtatagaatttttttcgaaccaaaataactcgtaactgaagaatatgttttaccaaattataagttgctaaattttaattgcaaatcacatgaaataaaactgtcttaaaaaatttagataataaattcaaatcacactcaacatattaaaaatattctttttttttttaattaatagttgttgcaagagataacaaagctagaaaataaaacatcacaatacaaaactaaaaaataaaattatattagaatgagagtataattatagtaattagtattacacaacatactaattatattatatgttaaatataatacatgttcaaaatcttatgaggtgatagttaaaaattacacaaaataatatttaaaaggaaatgtacgtattttagtaatcgcacattgtaaaccaattcttatagtaatatgagaatttaagagtgtaatgtaattacaaaagagatcacttagtggagattttttctttagtttttgtctttttaacaatcctgaattatatttcttttcaagaaaaaactatgtaattaatttaagatacaccaaattcacttttcaaacgcgcataaaaaacaaagaaatcacaatgctttcaagatctcttattaaaaaataatatctcataggacttttttcaattttaactaaaaaaataataatattataaaaatatttttaggtcgccaacagggccggccctgaaataaagtgggccatagggaaaaaaaaaaaattgggcccttatgttagaaaaatatggtatttttcaaaatcggtaaaaaaaatgtataat

SEQ ID NO: 79015 - DNA, 1745 bp, Cannabis sativa
gagagaatttctaacggccaaaaaagttcagagggcacgatttagtacatgtcaaaattcgagagaaaaattactaattagcctttaattaatttcggtatcaaaaaatacatggcagaatattttttttatagtagtgtttgttatacttataaaattattaaataatttatagtaccaaaaataaatttgaagtttttgaacacaatattaagaattataaattattcgaaaatttaaaaaaaaaattttaaaaataatattgtaactctaacgaatgctgttaaattgaaaaaaaaaatattacaatatatgattttgaaagtagagattgactgaaaaaaattatactagaaagttgtaattatcacttcctaaagtatttttctttaatttttaaatttattcagaataatttttaaatatggtttaacactttcacttgtatattttagacgcccataaatcaaagcttgcacaaacttaaaaaatattaatatattttacaaaagactaataaatatatttatataataatatgtataatatcatacatttgttcacaaaaaatggataatcatatatatgtaattttttttgtcggacatacacatataaattatatatataatatgtaataaaattatataatatgtatgaaattataaattttcgattttagacaccactaactaattaaaagtaacaatgttcaaaagctgtggtgataggcttagcctaatgattcaatacttcttctcatagaaaggagatcttaaattcaaatccccctccccattattaaaaaaaaaaaaaagcaatgctcaaaagctaatattaaccaaattaaaatttaaggataaaatatatataatgaagaaattttagttcttattcaattagatcatttatagaggaaattcattcaaccatcaattggctctcttcttcttgtcttgcatattttgaaatagcctccttcataggagagatttcaaaatttctcctctcttcctcaaagattttaatcatcatcttatttttagaaattgctcacactaatcatgtgtggtacccatgaccatgtggaagactgtaataaaatttaattacatattcagataaaagaagatctgtattcatcatttgataatactttactaaaaaaagaatcaaatgtttaagtggttgaatgaaaagagtaattattctgctgtgtcgttgtaagtatactcaaacataagatatttatattccaatttagaaaaatatggtctagattattaattaataatcaatatatatacatactaataaataaaatcctagtaaaataagttccaacaattattccctagctgtcagagtctcgtgtttagtgaatagaaagattgagtaagttgtgtaatttaacatcaacagaaggaaattaaaatctttatttaatgtatgattttggatacatgagggatggctaatcgaaaaatgccaaaatctacgcttggttttgaattgatcaatacatgggaaacgatataggttgtccatcctttcacctccatattccaagtggggtcctaaatgatacagtgagttttgaaaaatgagaaagaacactgaacagattttgttaaagaactcacatataaaagattgaagtgaaagagtaagggtgggagacaaaattacagactctatgcaaaagaccgatgcaaagtgtccattaagaagggtaacaaaagata

SEQ ID NO: 79016 - DNA, 2264 bp, Cannabis sativa
aggagcgatcttccattcccacaacacatcctgcaagccctccattcctacattaacctattggagtcattggatgctgttaatgtggcttcagatgcagttaacaagattgaaaagttcttacttcaaccgaaaatcgagagttcagtgctcgggcgccttagagccccggacaaaatgcccctttggaagacgctattcgcctcagctggctacacacccgtgacatttagtaacttcaccgaaacacaggccgaatgtgtagtgaaaagaactcctgtgaggggatttcatgtggataagcgccaagcttcgctttctctttactggcagcgtagggaattgatctcggtttcggcttggagatgctgatgaaacaagatttattattaccaattggaatgatgaacagagttgcaaacaccagagaggttccaaacttattctactcttgatatttaagtcaaaataaattgtttttaaggaaaatgaaaactctgttcttcgcaacctttgttatgacatcttcaatctttgtgaaaattgtcatgattattattattattatcatcatctgtctatctatttattatcttcaatctatgttgttttgcatattattggtaatattatttcatatgttgatattgttatggtgagaagaagaagaagaagaaaaagatgatgatgatgcattgttttgatttctcacatagtggattcaaattcctatatttgcactagagaagtagttttgtttagggttttaaaagctgttttcaggcttctgaagcttcaaaaacacttgtgttacaaccgtaatcagtgagtttcactagctttctcgaagcttggccaaacatggctgtagtttacttaggaaaattgaagttgttccctcttattttggccacgaatgatcttattattagttaaggttaccttgttttgttcccagaaagtagaagctcaaccaaactggacgttattttacttagaaaaattgaagttgttcccatcttatttgtagttaaggttgccttattttgttatctgaaagtagaagctcggccaaacaggacggtattatacgtaggaaaattgaagttgttccttgttattattttggccatgaatgttgttattattagttaaggttgccttgttttgttcctagctaatatattatctctatagtcaaaagttgataccatccaccaatgtagacaaatgttttgccacatgcctaatagaaaccccacaaacacaacacaacaacatgagtagtagatatcttcttattatgtttttgaggttttttatttgttgttgttttgttttaaagtattgatgatttgattgaagagtttaattttgcatgttttttttttcaatgtgtagaagccaaaaacatcaattaacttggttgattaaccttattattataataatctccttttcatgtggtaaatttgtaaactcacatacatattatatacatataatagattaagaaaaagacagaaaagagtagatgatgacactataaaaataaactaaactaaactagttaagttccaataatgaaaaactctataacatggtatagtagaaatgtgtcatattttgtctgaaaattctctttctttctttgcatgtataacaccaaacacgtaacgcgtcattctcatatttgtttaaaaagcaagatttatttttaattaaaaactttaaagtgtgaactaaacaaagaaatatgttttcatttacattaatatttaattaattaaatttataatatgtgtatagatacagctctacaaatacttgtcatgtagctcattgaatttgataaaaaaaaatactattttttttattattatttctctaattgctttctactttgtagacatctactaatcaatccacatggcccatgttttattcaacctccacttgattactttattttattttatttatttttaatatcattttttaagcttttaattaaaattattaattaattaacctattttcttcttattattatcattgcattctcataagaggttaatataaagaagataaaattatcacataaatatatgggataattttataaatatataaaacaaaaaaaaaattaagtttttttttgttttttgtgttttcatattaccagtttatgtaaattttcttaaaaaataggacacaactacaatagtaaattatacattttcacaacattcattcagttttat

SEQ ID NO: 79017 - DNA, 7899 bp, Cannabis sativa
gtgtattaccttttaatataataaaaaatacctagcataaaatttagtatacgtgcttcgcacgtaactttttactagtatatatatatatttctatagtcttcctcgtacgtacattataaagtttttatattatgtgattaaaaaatgtttatatatatgaatatattttaagttgtgacctgtgagataatacctgtaccagttgattacatatctattggaagaagaattggattcacaagtaaatgggtttgtggaatatttcaatccatccaatattaattagtgcccatttttcgtataaatattaccaatattcaaatcctaataaaaataaaaaccattgaataagaaccattaattataatattttatatggtatatatattgacttgggattgagaaataaataacaataaaaaagattcgattcagaatatgttggtgttcattatttggtgcatcaaaacaaaatatgatatcaattacatcacatgaatacaaaatacaaatgtaaaaacaatgaaaataaataagaaatcattacacaagttgtgaaaaatatcaccaatttgctgatattgatattgacatgaaatatttgaatcctcccacttgtttgtattattcttcttttgtattatgttcatacttactctaaatctaatctcctatatagatgagtattgttacaagacatttatagtatatacttaatactacgatgaagtatcactctataattagttagtgattttttataatatttattaaaataaaataagtgaaactcaatgttaaattacaccaataaaaaatattacactttatatataagagagttaaacaccataaataccctttaacatttctcttattacatatatattactaccttcaattttttaagttcagtaatcaaatatattaaaatttcaaatcatcaaatcataatttcaaagactttcttcaatgtaaaatttaaagaactttttacataaattaccaaaaatttgagaaaaaagttacataaatacgttaatatatattatacaccgagaaatttgatattttaacaagaatcatgaggttcaatctcaaaattaattaatgatgagtgtagtaatccatgttcttatatatatctcaatacttttacatttaatccatgtggggcaatattctccaataagttttaacaatacaaaaaaaatcttattaaaattttaccatcataacatatatactatattatattgaattgtctttaaaaaataatctaatatacacatatgttacatatatttgtcattatataaaaaataaaaataaaaataaattgaaatcattaatttctatgtattacaactaaatttcctatatgacacataacattcaccatatttatataagtattatataaattcaccatattcaactaaatttatataagtattatgtaataagtttttgtgtatattccacacacaaaaaaattgtgatagtttctctcataaataagtggttttttttttggtagcctttggttttctgaaaaacaaatgatcaaatatttgattgactgaaatgttaagctgttgttggcaacatggcatggccttctggcttttagccattgattaccagagatttatcatagggcccattaataagtaaacccactccacagagcccattttcattactcaatctgggccaaattgggcctcgaaagttggtccgtattcattataaagccttaccactgttctttccagtttcaacggtaaataacgatcagttgaagtcatcatcattatcctgcacacccgcgcaatctagcactactgcattgacactgctaacttacaccaatcttcttcttcttcttcttcttcttcctccagtaacaaactccaacctcacttgcattgcaaacactgccttatccattaactatggagtcttacctcttagacacctgttcatggggatattctttaacgtccaccacctattcgacaaaattccgcaatgacagttctcacattccaatcccacaaattcgatgccttcatgtattatcgaaacgcagctcctcttcttcaagggaaatgcataagaattccgataaggacctgtctcggattttgcgaactgatgcagctattaaaaacattgagagaaaagcgaattccaagaagtataacaaattgtggcctaaagctgttttggaggcactagacgaggctattagtaacaatttttgggagactgcactaaaggttggaacttttttttctttattaaccatttatttacttttcttgagctctttactgaacaaaatccaaaacccagtgcgtaattggttctgttttataaatttaagtatgcaaagcagctttttgaaactacccttttgatatttttacttagttatccaaaatttgatgttaaaaatgcttactttgagtattatgaacgatttaagtgtgaaaagattgagcctttggttataaagtgccctgctttgctgctgagcttgagaaaatgcatgaacaaaaacaaaacaaaaggcgaaactagtaagcaagggaactttatgaaactacccttttgttattttttcttagttgtctaaaatttgatgccaataatgctttatgaacgatttatgtgtgaaaagattgagctttggttataaaatgccctgctttgctgctaagcttgagaaaatgcattaacaaaaacaaaacaaaaggaaaaactagtacgaagaaaccatgattttcagtcatttcttttgagacacatcaaaacaatttattgggttttgtagatttttggacttaagtgtgaaaagattgaactttgattataaaatgccctgtttttctgctgagcttgagaaaatgcattaacaaaagcgaacacaaaagggcaaactgaataagaagaaaacatgatttttggtgataatatcctttgagacacataagaacaatcaatcgggttttgtagatttttggactactacgtatgcaacactggtatgagccgagattccaaacctacacgaaactcttggtgatgcttggcaggtgtaagcaacctcagcaagccagcttgttgttcgagatcatgtcctctgatggtttgcagcctacgcttggtgtctacaccgcccttgttggtgcgtatggccaaagtggtctcctggacgaggcattttctgctatggctgatatgaaatcagtctctgattgtgtaccagatgtatatacatatactattcttatcaactgctgcattaaacaccggcgtcttgatctgattcaacgtgttcttgatgaaatgtcgtattttgggatcgaatgtagtactgtcacatacaatactcttattcatggatatggtaaggttgagatgtttgaacagatggagagcacattaactgatatgattgaaagtgggaacacccttccggatgttttcacattgaattctattcttggggcttatggaaactatggccagattagtaagatggaacaatggtacgatgagtttcagcttatggggattagaccagatgttaagaccttcaacatcttgataaaatcatatgggaaagcgggcatgtacgataagatgagctcggttattgagtacatggacaaaaggtttttctctcccaatgttgttaccttcaacatagttatcgatgtatttggaaaagcaggtgatgtttcgatgatggatgattactttaagcaaatgaaacatagaggattgaagcctaactctatcacatactgctctcttgtgaatgcttatagtaaagccgggcttatagagaaagttgattctatttttatgcaagttgcaaactctgatgctacactggacacaccctttttcaactgtgttatcaatgcctatggccaagttggcgatgtcaatatgatacatgaattgcttttggctatgaaggagaggaattgttaccctgacaatatcacttatgccactgtgatccaaatctacaaggctcaaggcatgaatgatgctgctcaagctatggagagtaagatgattaacccgaaggagcattcagataacttgaaaggactcatatgttaaaccgattctaatcactaatttactagtcatttgccacaatgggccatgcatacatggccaatgcattttaaatgagctggacttggtgccatattacaaaggctcaaaagaaactataaaaggatggcttgacttctgagtttgggcttcatggaaactattattctgttacttcctgtgaagtcttaaagtgaatgagttcaatttggtttggttattggactccaactctgtgaccatggaatagattttcaagtcaaacatgggtattggttcactaagtgacaagctcagcccacaccaactatgcaaccaatgatgcagatggcaatatagttggaagtccctatctgaggatggtttgctaagatcttttaccctttaaagctttctttattctgtttcaatttactgacaaaagttaattaactatgaactttgtccaaaagtatgttttcagtcatagctcaaattatgtttctcctatttcgagagttagacacatgatgggggttggccccgaaagactaaagcaagaatcttctaattgatccatcaaaaactaacacatataaaagaagctcgatcttagaaaaatgagcatacactctgtaatgttctatactgaattgtagtatattaaattcttttagttatttgtggcgaaactctcttatgttatgattttttacacttaactcctttatctaaatagttatttacttttttttttttacaaatttgagatgctagttgaatatcactgttacatactaactagtatatacagtcacaggtatacacagtggtcatcacgttagtatttaacagtgatagttatttaactgacgtcttaaatttgtaaggaaatatgcactgttatgccaaaaaaaataaaacaagaacgaatttactgattaataatttgcaactaaacaataaaaagttaaagtatataaaaattaaacattcaattgttcttacaaaaacaaactctgcacctcattattaacagtctcaatcatggacaattaattattattgaattggaaattaagagtacacactcacaatatcaattatattaacctcttgagttaatcaatgttcaatcgatcaatggatagatcgattaattgattaattgatgtagtgcactcatgtattttatgattacaagttggatctaatgtctcatattcactacgaaactcaaaattgaacatattaacccctttgtagactccatcatccatgttgcgaatgaggactttcccatcgtacaaaatatcacgttgagtataagagaatggaacatcacacattccttgagtggccacaagagtgacttttactttagtcttactaggaactttagctgtgtaaatagcctcagctaaagtttctgttgttgttgtttcctcccaatgatgcttataactatagtcaacactaaactcaatccccttttcagcaatgaatggaataaaatcaacatccaaggttgttttactacctaatttgagtgaatggctggatccaaaattactagagcttgttttttggtaggaaaatttaaggcttacttcattctcttcattctcatagttatcggccgatgcatagcccttttgaacaacattgaggttgtagactttggcttcgtctttgtggaattcgacgcggcttatgctctttgagatgatgttttccactacttctagcttcacttcatttgtaatggttggtgcatgagcgttaaggcaatcgaaaaagacatcactcgaaacactctgacaaaagtttgagttcttcaaagcacgtagcgctatgatgttgtcagcaagtttgataggccaaaatagcgtatccttgtcttgtcctgtgctgtcacgtgattctgataagatccatgaagtcagagaagtcatccagtacattccacttgaaatgttctttatgcgaacataaccatcaccagaagtagagatctcattacttatcctcacatctccaatgtctttgggaatgttgtattgtagagtctgataatccatgatcttactagaacatagataattatgattatctttccccggaaccttgaaggcaacatgtattgttttgggaaacaaaacaagtgattcccaatccaagattttgaacacattgtatttgaaggtgctaatctctcctaagcacaagccataatcctcagcagggtagtattcattaggaggagaaatacatacatataagccaattgaggggtgaagaaattgaaagtattcttcttcttcttcttgtttgattggcttgaacatagtacttgtgggcccatcttcttccataggctctagagctgtagcctcaattgacatatcagactcatctacactcaagtatttgttgttgtgacaacacttgatgtgcaccaattcaccatttttctctgctgtcactacctcgaattttatgtatcgacttgtaatatcatctccaagaaaatttagaaaagtatcgggcacaccctttttcttactctcttctttacttactcttttcaagtatttgcctaagtctttagatttgataaccacaaaccttggcaatgtagaagaagacattattgttattaacttgatacataaagaaaagagtatgtctttatatatagacacaaaattatatgcatattaataaagttatttacaactcatcatgtataataataaagtgtactaaagtttaaccaattattattattattattgtgttataagcaatttatttattcactataaaaattatacacagttacccaaaaggcagagaagactttgtattattatttatttaagtagatctaaaagaaaatgcatgagctgacaatgccatattatttacattattatatatatagattatgtaaataatatgtccttaaaattttttacactactaaattgtaccatctttaatataatatttgtttttttttggctgagaaaaacaacttcattaagccaaaaataacaatttggtgagcacatggagactcacctcccaaaaccgaaagacaccattacaattatgagacaaaccccacctaacgagagcatgggcagcaacattaacagaacgagaaatccacaaaacagaacagctaaagccttctaactcactatgaattttattgaaagaaaaacagacattccatcacagacatcgacctgtcgacagagaactcaccaattgccaattatcagaatagaaatccacacccaaatcagcaaaaggccgagccatctccccttggaaggaagaggaaactttcaccttcttagctccaaaacactttacagagccttcccgatcaaagagaacacctgctactgcaccaacatcattagcagatgcaaagtccacgtgctcaccaattattgtaatgtggtcctcttatcacaatttgttccatattatcgtgaaattagtgatgtgacaaatttaaaggatagcgtggtagaaaaaaatttatgtaaaagagaattacacttttgctagctagagtttcttttagaggatgtttgagtgagtgagacgttataggtgtggttcagatattctaaagttgaaaataggaaagaaaaatactgctaattaagtcgaagaataagggcttccaaaaaattagagaattgacatttcattttattatcattcattttacaacaaaattgagcagactaa

SEQ ID NO: 79018 - DNA, 1538 bp, Cannabis sativa
tcccacatcaacatccttcattaagaatttcacacagtactcagttatattattccacatcctttagtcataatcatttaccaaggtgaaaaaatacattcaaatagtattttatcatatagtattaagctgatatacgtaatactatatgataaaatatttttccaaccctttaaaatactctattttaacaaaaataataatattacggaactgaagagagttcagaatagagatttgtgtgaaaagacatactctgctttcaatatgatacaacgttaaataaacttggtatgaatatatgaatgaaaatgagagtaacaataggaatagaatcaaatttaaaatacacaaaaaaaaattaatataattttggatattatattttgcaaaattactgatgggatctttttttttataaaatgataaattggaccgtatatttttcaaaaaatttgaagaatgatcttttcttctatttcaaaatggcataatcaattattattctaaggaaatgatggagaaattattctattaaaatgacattcaaactttgaaatacaaccactaaaagaatggaataaaaattgtttcttctctattctattttattttattaccttcaatcaaatactagtttaggtgatgtttactttattataataagaatggtaatgtgattgaataaaaataacaataatagcattgccatatatttggtttctctataataaacattcttatttgagctttgaggggatattataatttatatcttgaagcgctaatatttgtttaataattttagaaaacaatattaagattttattttttttatattttttaaatcattttattaaatcttatcgttctatgtattttgttttcctttttatatgaatctcaagattacactcgttattttggttaaataatgttaaggaaatgataagttttatttgtacctaacaatttataaatacactttattttaataaattttattttatataaaatatatatttttaattatattaattccttttttttaaaaaaaaatctactaattcatattcataatatatttattaaattaaaataaaaaaatatgtgaaattttattacaaaaataaaagaaatatatgaaaataaaatttaagtaaatattgaaattgacacaaaatagtgtaaatatagtggtgtaaatagagttttcccagcaaaatgcaaaccctaaaaaatttaaaatggagtaggtagccgctgtggaaacacagaagagtactctctgtattttcatttatctttttggtaaaaggagaggagaagacgaagcctcataaccgctggagtgcaactgagaacagaagagagataaacttttccccaaggagttacacattcaactaagaaaaagaaaagataaacaatatatgtaaaggggagagatcgtaaaagacacaagaaatgttggtcaaggccagtagattctgaaatgactcggagaatcaaagttgcaaagaagaaagatatagagt

SEQ ID NO: 79019 - DNA, 4364 bp, Cannabis sativa
atattattttggaattgttaattttaatttagtgcataactgtgcatgtgttttagccatcaagttatgattgcttgtaataaaaatgatacagacataaagtgggagagagagatttgtgaccctggactggagagaggcaggctagctaggatgttatatatatatatttatatatatatatttaattttaatcttttttttttttttaaataaaatatcttcttacattacgagcctaactatgaaaacacaaaacattctggcatgaaatgatgacacgtattgtatgagggcctatggaattatacatggtcgctcactcgtccactctgtctctcttgcttggcctttttgtcttacttcctctcttttcatccacagcagaaaaggaaaccgcaatactctttctctctacacatgaatattttattttttattttaaataataactatttcatattgaggtagccttccttttaagtcgtatattctttaggctctctctctatatattgggttgtcctttactacttagtaccaaagccatttccacaaagtataattcactaccttgtattctttagacatggaggggaagctgttaatatcaaggtttaagtctgtttgtgtattttgtgggagtagtactgggaagagagattgttatagagatgcagccattgaactgggggaagagctggtactgttttttttcctcttcttttttctttatactgatatttcaactcttttgacgattggggtttgactgtttttgttataggtatcaaaaaggttggaccttgtctatggtggaggcagtattggtctaatgggtttggtttctcaggttgttcatcgtgcaggaggaagtgttctcgggtatatacatatatatatattgttactatattcaagtgtggctctttttgagtattttgtgactccatcttatttgttctctttttgtcacaggatcattcccagaactctaatgtgtaaagaggtcagtactcagctgggttttccattttttttttgtaatttgtgggttttcatttcttttagagtgtagttagaaaagcttgttacttcttttattatgggtaaaaatgtgtttatgtatttggagcctcagataacaggcgagacagttggtgaagttaggccagtagccgacatgcatcaaaggaaagcagaaatggcccgccattctgattgttttattgccttgccaggtcccatatttctctctttctctcatttttcccttttattaattctaatggagttgtaactaatctttgtttttctttttttccttcaggtgggtatggaacactagaagagttgctcgaagtgatcacctgggctcaacttggcatccatgacaagccagtaagatcagcaaaatattagttttttttccttttcacttttgtaaaactgttaaggtttttatatgtgtgaaatattcaggtaggtctgctcaatgtggatggctactacgactctcttctcacttttattgacaaagcagtggatgatggtttcattaagccttcacagcgccacatcatagtctctgcccccaatgccaaagagcttgttcagaaactggaggtgggtcatcctctttttggccattattttaagatatcccgttctttatttttttttaattatttggggggtttttgtatttgatgagattgctctgctgttgttgtggtcaggagtacgtgcctgtgcatgatggagtcatagccaaggcaaggtgggaaggtgaacaacagcagcagcagcagcagataggtttcaagcccgcttctttgcagactgagatcgcactatgaaagatcaaaactatataaacaaaaacaaaagaaagttcgggaaaaaggttgtttaggctatttgcttttcgtctaatattttgggtcatagagatcaaccaaccaataccataatggtatgtggtaaaagcacaatagttgacacatggctaatcttttgatatttgttaatataaattataatatatatgatatgggcctacaactctttatgttgaatcttttcatctttttcttttgaaccctttcaattattatcatgtacaaagattatatagtcataaagaaaacaagaagaaggatccaaaaaagaaaaatcagtaaaaagcagctttattctctccatttaattgctctagggtatgcatgctctactgttagtgttataatttctactgtctctctctctctctatcttatcttttctgccagtttttaaggtactgtgatgatttatgaattgcatcacatttagggtcattggaatggtgggggaatgagtttaaaaggatataccccacatgagggtgaggcttttatgagaatgatagtgtaataccagtaccattaccattgccatactcagctcagctcagctcagctgcagggactgatgatttttcttttgtattcaacactgttaataaagccattgtactgtagagttagactggaaaagttggaaaagtgagggcagaaggcatgatgatgggactggaaaaaaaaaaaagaaaaagaaaaaacaaataaaattgagccaatccgcaacctaactaaaaatgtacacactatgcttttttctggatttgtcaccttccaacggtcagcttcaagtgtttatatcaatttgtagcaatcaaaactttgaaattttttttgggttctattcctaatttgttcatgatttttgttttagaatttaaaccaaatatcataattgttcaatgttcgcatcgcttaatgataaattgagttgcaaagatctcaagtttgaaatataaattaacaaaacaaataataaatacataaagtcttaaaatgtttctaatataaaaatttgctttttaaaagggaaaaaaaaaaatcaaataggactcgtttttttacaaaaatggatgtgtagttttgtgttttggtctaattttgataatattttgcaaaataataatagttttatgggactagttgtcgagagtcagcaaaaactcttgagtgactagttccataaagtcatttggcttgagatgactacttaaaacaaccaacaatactcatttttcataccatttaaaattttggaattctaaattttttaagaaaactagtcaaatttttcggaacctaaagtacaaaatatacttaaaaaaatgatttatttttgttagttaccttttcaaaatatgatgttataaagagaggtatacacaaaaagtaaataattgatgggcaattgggtcattgtgttgtgatatttattttattttattgttatgtttagttgcatgattttaatgtgcctggtccaagaaagctaaggaatggttttggcatgggataccaaaacagggaaaagacaatatgtctctagccattattatgtgttgtaggacagtgtggtagtaagcacacaacagttgggggacccttttcttaagttggctcagtttgttggctgctttttgttgtgtgtgttgatgtttagtgtttgtttggtccatttctcatggcaattggcatttacaaacattaagcccccatatggtgtggtgtggatggataaccacatcaatattcctacctcaaataggtagtggttctaacagaacaacaggatcatagtggtcagtattcgcaagtaatccattctaccatgtttaatggcccatttcacccctctctctaccagttgaaatttcccatggcctaacttcaattcagcctcatggtccacttgacattgacacacagcacaaaaataattgagcaatttatattattattattattatttgcaaaaataaaaagtcatatatatacttttctttaaatatacgttctctctcaaatctagttccattctttttgtttagtcacataaacaatagtttataatagttaagacgaggggtgaggaggactgttggttttgaactacaataaaaagaaataaagttggtttcaaactacaataaaaagtaagtgctactactgtccatatattcacctgacttgcttttattatcttccttactcattttattcattaaattaaataattcagaaattaataaataatataagatgataggatgattttagtgttgaggtggaatggtgtatattatagtcaaaattaggatttaaatacttaaataatcttttcaatacttaaatactctaaattattcataatttttttttaagtattatttagttgaaggtaataaaataaaatagagtgacaaaaaaataatttccatgtcaattttttatttggttacatat

SEQ ID NO: 79020 - DNA, 5831 bp, Cannabis sativa
  modified_base (5617)..(5620): a, c, t, g, unknown or other
ttacataaaaatattgcataaaatacaatttaatataatactataccatacaatacggtgtaatacgacgtaccaaaccaacctttagtggacttgtttgacaaggctatgaaagcttgtccatagcctaaatgttacttttctatgagtgttggatgaatttaaaaacttaacaccaacttacaaccccatattaatttaataactcataaatttaacagaaacgtttattcagaaaaacaccatacctttcaaggcatctcctgtctcatttccatagaaaatgccattgatacagcaccttctaaagatcatcttattttctgttagcgtaccagttttgtcagtcaaaatgtactcaacctggcccaagtcctcactgattgctgtactgccacattatataaacctcatatacatattttcaaaataaataaaataaggaagcattgacaattgctccaatatgaattacgcttactttgttgcatgggctcgagtaacagtctcatggtcaatcattttatcatcccaatcaataaattttgcatataagctcttcacaaggtcaagagatacctgccaaagatataacagtttacatgagagactatcaaagccttcacacagaaaaatgctaacttttgttaacaaaattcccacgccttttattcttacaatgatttatgaaccaaagtttctcacacattttatacataaggataccttaattgatatggggatcatgattgaacagagaagttcaaaacgaagtggaatgaccagcagttcataccatggaccttcctcgggatactcaacataccattgctgcaaatggtataaatgagaataaagttaaattttgaaagtaaaaggatatactgaaaaggaaaaggcaaaggagaaaataaaaatctcctcatcattaataaggtgattccttcttcttcttcttctttttttttttttttcggtactgcggaatcagagatataataccccgcagtcaagtcaagtttttaggggaagaaaaaaagacttgccttccttgcttccgtatccttccatacattaccagctacaccaagaaccataacaacgacaatttgaaaaacaaatatagctccagtcaacttgtcaatcatagcatccatagctgtaagctttggttcaggtatccccttactcatacccaacttggtttcattgcctgataagaaaaaaaataattcactatgtaaacttgctgagataacatttagctacatgtatataatgatattctaatattacagcaccaaaccctctggacactttcagaactaaaattggtcagattgcagagaaggtaagaaaaattgtatcactgaagcaattaaccacatgacaacctttaaaaagagaagcatattaacaacagatatatcgttcattcatttattatcattcaaaattctgataagttataaccaaacaaataaactaaccaaaaaccctttcatttcatttcaattcatttttaatccatcataaatattggtgatcaccaccatttattcttgttgacatggcatccaattttatgcctaattagtaattactctttcaacaccatatcatatacctcatttgttggagtttcataaaaatcccactttcactttcaccccaaagactcaacattttcataaaaatcccactttcactttcacctcaagaaaaagacattctttattactgcaatgaccagccaattaattacaagtaagaaaatattaaattataagacaaacaccatcaagtgaccatgtcatagaatcaataaacagagattacacacattatgttttcaaatggtttcaaatgcttattatcagataaaaacatattgttttatctgatttccttaatgaatgaagattgggataattagtatattctcatctcttagctagtttactcatatgtataatcaataatttaacaggtctctcaggtctaaaaggtataagatgaattatgataagaccctgactacaatggtacaagaacagtagctcaaacaagaacaatagcagagaaatagagagagctttaaaaagagaggcatatatatatatatttataatatttcccttggaataatgatgttgatatttgatatgaaagttatcaacttcactcatgattatacaaattttaatgtttttttaatcatattgctctaaaacaaaataaatatgtaactgcgtgaacagagaagtatgcactaagatatagccttgaagactaaaataaaggaacttgcctgtataaacagctactccacatgcccattctgtattccgcaagtaacatgactgaagaattgtgttcttaatggttaatgggcacacatcgttatcaataaaaggtggaaacaaccgtaagtttgcatcaaatcttctgatgtccttgtcaggaacagggcactcaatcacaccctgaagagagaaaatgagatgcatcatcacttattagagtgaaataaagcctgataaaaatatttgtggaaagcctaccttgattttgtgcaaaagttcaagatcaatccccatgcaagctgtgggaatgaccctggtcttcagatcagtttcaccatctagagcagaagtctggaggaagttacatcatcaagttctagatatgtttaagcagacgtaaaggtcaaaaggaaaagcattgcaggattacatataaataccacccttgcgataatgatacaagacatgattataaatggaaatttagtatactatactatttttgcttcttcagaaattgaataatcttctaacttctaagcatgcaagcaacatcaaacgaggtcagagaaatgaaaccccaagggtgtaggggtagaggtagaaacacactaggccaataacctagctaaggtccattatgcaaaaataactttctcagtttcactaaagaattggtttgtttccaaattctattgccccacagggtgtacgttaacagcatcactatcgtgtcgcttattgcaccaaaattggtcagttatttgtcaaggattttatatttacctcaacatagcacattccttgcggatcagatgtcccaatcaaaaccagatcacatggcacttcatcattctctcttaaccatactatattacccacatgaatatcctgtgcttgaacctaaaagtggatacaactagtcagtttgtcacaacaaaagaaatgcaatcaaagaaaaggaaagagaatagatttctatacatgtttctttatgccctccctaacaacccaaacttctttctcatttgctttcttgtctgaaagaaatctatggtaatcatcccatgcctcttttgttgcagagacagcaaaaatgaaaataagtggaccccatgtactggcaggatttactggagtaataagagaccataactgaaggcacgctattagcagaaagtactggttcatgaagcggctgaaaacatagtatttgatagtgagaggcaggacaaaagagaataagaatgtttgtgcagtagaaagttatcacatagaagtacatgtcgttggatagagataaaacataaatttgaaatgcaatgccaaatataagattcgaaccctttcttttgaaagtaacaataatagaattaaaaacaatgaaggtttggcagaataaaatcaacagaaacaaaaacaaggtctaggctagagcataaaatctaaagtaaatgttttctaaaattcttcaagattaaagcctatgattaaatatatcgtgttccttaacaacaaattcaaataaaaaaaaaagggaacagaaaaaccagtaaccaagacatagatacatactacatgtttagcataaatttcatttagccaagaaaaacaggaatggtatataaagtatattataataacaatccaaatcgactgaattaccgcaaccaatactatatcaagaaattgaaaacatcaaatcataaatcacctgaactgttcccataaattcttcggcaggaagttgaacaaattatattttgtgtttgaaatgcgattggcacaatacagatcatgcgaagattcatcatcattgatatagacgtaacgcttcattgctgaattagaagcatgtaaccatgctcagctacttgttcgaagttagcaacaacgatactaacagtgcttagaatcctgttacaaaaaacactgcataaagctcatcccaatttatttattttttcctcaaaaaatacagttatttgcattgaatcttgggctaaattggcactgcttatagagaacaccaaaagtcccaaaaggaagagcaccatcatttcacaacaactatatatcatcaaacacattgaccgatcaaaacagaacgcataggtaaaagaattcataaaatattgggaactatgcccaatctacaaagaactcaaataagggcaacgcagcatatgtttaaaaaagcatacagacctattagcaacaaaaatcacataacccagaagacaaacacaaatccaagtttaatacgctgttcccataatcgcatcaaacagccagaaaccattaaagaaaaaacagatttcttgcgtcttctgaattttcggaagacaaaaaaataacagatcactagaacgaatttaagagaaatgatcattacttaatcgatttttaaggagtaaatgattgagacgcgaacttgaaatgggagtaagatcgtacctggatttacagctctgccgttcaaaccaagttcatcgtcgttggtcctactggttcggggtcacctccctctctatgaaccttcgctagtctgatgaaggagacgcaatgttaatttgtgcgcgccttcagtggtaatattgtgcggatgcgatttcttgcgccacgtagtttctaggctgacgtgtccaacagcacaatggtctggatccacacctattttgggctaggcttgcccttacaagctttcatttataagtggatattattggggcccacatcctctatcctctggctggtcacttaaaggttatttagccattaatttatcatttttttttaatattatataattcaaatgtaaacctaaggattctttttttttattattattaaattagtgtcgaaatgcattagataaagaaacataattagacctcacggtcattacaaagtaggttctccggcaaggaggagaccggaatacagccaaacctctggtgggtaaaagcccacttaaccacattatgggcaacatagttacaacgtttactaacattcataaagttacaactaataaaagaaagagtggatctcatacaaaaggagacaaagttctcaagtgtccaatgggactccttcccattgagagcattgatagctagtatagagtcactctcaataataataaactttaaacctaagtcaaatgccacaaaaatggttgaacaacaagtcgccgcctctccgcataaagcatccaaaaagtccaactgagacgtgtggatccgaatcaccttgcccaagtggttcctagcaataatagttgtgcacatgcttgccaatcccactcnnnnattacaattcagtttgatccaatcctcagggagtggattccagctttccgtcaaaataggagtcgagcatggcaccagagaagtatgtaattttacaaaagaagtatgaataaggtcaatacattttaaaacatccgggtgatttttattgtgtattttttcatttcgcgccctccagatggtatcaaccacaatcgaagcataaagaaaa

SEQ ID NO: 79021 - DNA, 5868 bp, Cannabis sativa
tgcttgagagggaggtatgatttttgtgacagatttcactttgtactgggagagcccagatctctcaaacaccagttgtatctcttttccatcactcaaattcaactcatgtccatttctttctgcttttcttttttttttgtgtaagcctatgtgcatgttaaaatcctatcaacttggaatcaaatctaggttttgagtatggtcatgatagttgtagggcgaatgggtttgacttggttgcgcatacataggctgttatgtttgagttcgacaagaggggatgtaaattttttgaaaatcataaatctactcgtggagttagtcttaaaaaccagtttcccttcaattaaatttaattactctccactcctatcgcaccttttcttgtgttcttgctgtttagttttatcagaatagaggataagctgtacataatgtgtgagtaaatgcattgcaaaaagaaattgaactgtcatcgtacagccaacaaatctaacttttgggatccaaggcagcccacgtagacctggttaatataacttgaatgcatagtcatcattgtactaacaaataagttaaaatattaccaaaacattattaaaacctgaatgacaaaaattgtccatgcatcaaaatatcaagatgtgaagaaaaaagcctagaagaatacacatgccagaaagagcatatgtacatacaataataatatataagacaaaactttaccagcatcgtaccacttccatctgctactttacacccagacattagaaatggttctttagagtccttatgaacctgaaacagaaaacagttcagctttgatacagacatatgtttagggcacaaacactctacaggaaaacagacacaaggctcacaattttgctttctccagtcatactggattcatctattgcaagtgaatgaccagtgattagaataccatcagcaggaacctatcatacaaaacaaaacacacatattgcatttcagaaaaaattaaaagaaacttaaatagaaatggtaattaaaaataaaagagtacgacaggatatgaatacggagaacatacttggttgccgatgttaagaggtattacgtcaccaaccacaagatcataaattgaaacatcaattctcctgccgcctcgaatgacctgttgtaatgtatcttaaataaatatcaaatccatacatagatcccaaaagcattggagaaaggcatggcactcatttgcagcataagaactcacctgcaaatgtatgtttctcttctcctcattcaaattttgaaactgaagtgactgtctgtaatcacttatagctgcaatagaaataataaagtacaaagagtaaaatcaatagagtgagaatagatttcttccactaaaagtataaaataattacataaaaatataaggattaaatgaagcaaaaaattgagcttgtcagcttcctgataacaacctatcatgcacagagaaacaaatatcactaatttactatataccagagtgttatttccttttggctaatgtttagctctatttctacaatattatcctatcacagaaacatttttcccaagaagtcatttaatacctgtaacaacaataacaagaagaacagcaaatgcaatgcttcctccatcataccatccttcctttataccctacatataaaattaacggaggtttcagaaacaaaaacagaacaaaataaggcagcagaaaaaattaagcaaacaaattttacaagaaagaaaaaagtaaagcttaaaagggatggaaaccttagaaaagaattctatccgttcaccaaaaataataataaataaataaaacactacgaattctacttgcagctaagaatactcacctctgtctttattcccaaagccagtgaagccactgcagctaccattaatatgatcaaagtaagatcttgccatgcctcccacagaaacatctaaaagagaaataaaaagttaaaattatcgactactgaccaaaaagagaataaaatgacctctttcagaagcaagattagcaaaattttaatgttgcacaaaaattacccaaaaactcctgccttttttccgtggatatgtgtttgacccaaatgcattccttctttttagcaggtcttcatcatccccatcaatccccttctctacatttgttttaattaattctgctaccccattaacctgatttaaaattacatgaagagaacgaaaaaaaaaacatagggttggacgatatcacataacaaatgacaatacacaatgataattctttaatttacagttacccctccatattgttgcaatgtaggtaaactatgatcccttgtcattgcagcaagttgctcttgtccaatatcaaaatcaccaccatctgaagatggtttttttacatcgcctaaggaaaacaaaacaatcacaatcacaactgtgaaaaataggagaattgaaaaaccatcactgacaaggagcaacaaacccatataaaaaccttaactggaaaggagcaatagactcatataacaaccaatagcatcaatcatggaaggagcataaattatatataagtctcgcacaacaagcataagcagacaatcatcaaaattaatgcaattaatgaacatttgcacgggctgccaaaataaattagttcacgtctaattgtcctaaactacatagtaagattagcctcttcaacagctgaacgtgagaaactattcttttgatagagaattacgaaagaacatacagatggacttacctcatggcttttttattattattattatttataaaaaagaagtgccctagggcatggataacagattgacaacaaaggctatccatccagatagggtattgacaaactcacacggatcatactcaagagatattacaatctttattgtctatgctaataacatgatcttcaatagagatgatacgactgcaattgggacaatgaagaagcttacagcagaatttgatataaaagacacagatacttctccagaatggaactagctaaacacagattgggtagatcgatgtcatgtaaaatctggaatgttgagttgatatcaaaaacaaatacgaatcaaatgtaaaattaggacttaaaaggaacaatcacaaaacatctagctaagaaggttataccagtgcctagtggggaagctcatctaactttctcgcactaaattaaacaagacatatttcaacttctattgtcagaaatgcgagtcaagtgaccatttctaaaaatatacacataatacatttataatacataaggatagtagtgcagaagatttataaacactggttgctagaagtccagtactgttgaagcagagttttggacagcaacaaataatgtttgtgagttattgtagttaaagaagttaagaagagcttggtttttccaacaggcagctaatgaaactctattgttctgtgaggataacaaagctctaaacgagttcatcatgaaaagagaaagcatgttgattgttgaagttgatagatagacattgtattaaagaaaatattgaaaagtgaaccttctgcattctctatgttatagaaatagtagacaatatgggaagttaatccagcttaagaggagtttggacagaagggacagttccagaaaactaagatttttccttttgtagttttttttttcctcttttaagaagataacataatctatttattggttgtatgtcctttgttaccagagttgaaggcttggttcctattctattaattcggcagtgtcaagaacaaatcgacacctgcatctgataatcacactcattcaattcttcagaaaatttgaaactcatcgacaaattcagtgacatagtaaaaaaactattccacacaaagcacagtttcctcgcattaaagcaatgaacacacttaagaaacgaatccatactgtgactcaattgacaagaagaatccaagtataatataaaacatataaatacaaagtgtaaatgggggggagggaagtaccattagtttctggttctgcatcagctcctgctttgaaaaggtatgcagcctaatacaaaagaatcagtaattagacaaataaaacagataagatagcaaaatcatcattaaccaagtacttgtgaaaatatgagttactcgaatttgttgtgcatgagctcttatcttcctcagtatttgcttcttctcttcttcctttttcaaatctagtgtataccggaacctacgagaagcattcagcacaagcgccgcttgctaaacaaaatttaagattaggtgaaggaaaaacacaaatctcaaaaagcaaaaagatacaatgaagatgaagttgaaacgaataatgaatgaatgaagaagataccctccatcggcggagacgatcgacagaagcatttttagtgctggtaatgtcgaatgcaccgtagggagaggaggattcatcgtcgtccaactcggccgagtgactacctccggcctctacatcttcattggcccgccggtacggcgaccccttcaagttactcatcggagatactaccgaaaactctgtcgcaggagagatggcacagttaaggtttcctttcaaatcatgctcattcaactattcactactttctcactgatcgacttctcttactcattctctctcgacacaaaaaactttttagggttgcaaaagaaaaaggaaaagaaataaccaatcactctctctctctccctccctctctctctcttctctcttcattttatttttatatatctttaaaaagagtagatattttgaaagagcaaaatcttactgtttttttctttttcattttatttttttatctttaaaaagagtagataagacagtataagagttgcttaagaacaaattagatagcacagtcaagattacagagaacagaaataaattaagaaagtcaatatgagttttgtacttgacttactagaagactaggtggaagaaaggcttccttcgtctcgtctgcttcttcaattcaatccctgcagaaaaagttagcagagtttactgaatatgttaaaatttaaattataaataaataataatatgattaacaaagattaataataattaaataaaattagatacttaggaaggcagtaaggtaaagtgatattgtaaaaaatatattatgcagaaaagaataaaaaaatttgccatattctctcgaatactttttttgaaagacggttttggtcggtttcagatactaaatctgtaaattcttttctttacagagttgataatggttatcatttcctgttattattttaatatatttgaatgattattattttaatttatttgaatgatttgtccaatattcatgtggacagttgtagagtcactagactcacatggaatgactcatatcatctgtacacacacaataagaaacggttcgaacactttttttgtttattaaagtgctaccgcttattatgggttagttttcttttctttcctttcatattcacagcaaagcaaaacatttattttaattaaagtaaagacgtttaactgaacccaccatctatagtatatatacgttaccataataatataccctaactttagaaattattgagaatataatttaaccaagaatatatccatcttttcctaaaaagatttttaattaatgtaaataaaactcactatatggaagaaatatttggcatctttttttctttctatataaaaaaaaatgataacgtgctttggggacaaagtgattgctgatttgtgaagcaaacgagtgaggtgagtagaagcatcaccaa

SEQ ID NO: 79022 - DNA, 1450 bp, Cannabis sativa
agtggttttggagacagcatctttcttttttttatttggtgctgttacaactctcaaaaaatgcagaacaagaaattgcagaaaagaggtgtattttgctattttgaaggctcttgccttttaatatttgagaggctaaaaaaatattcttgagtcctaaaaaaatatgatattttcaaaatcagtaaaaacaatataagcttttacgaaaaaataaatttggactcctgaactagataccaagagatttgtttgaggctttattacctaaagtttgtatatatatgatttgaattagctttagaatttgagtgcaacttaattgtaccatatcttttgtactgcttggaatagctagtgttgagtgggcaacaaaatattttactgaaatataaatatatatattaatcaaaagaaatttcccatatatttgtatgtaaatattaataataatgtacagatcattatttaagtgtatagtgatcattgtaaatattattagtgtgcatgtcgtgaagaaatatagagaggaaagaagggcagataatggtgtaaatgcttatacataaataaatgaatgagacagagagtggttgagctcaccatgttctaacaaaaaatggccattaaatttggataatttataaatatatattgtttgttgatctctctagcgaatcaaaaccacataaaaaggatatattgttgaggaatgtttttcattttataaatattatatatttgaacatgaaaatcatatatttatgtaaatatatatttatatatatatattgattgacatagactgcatagcaattattattcataccagataacaaataataaaaatgaccttgatcataatagacctagcttgagaccccatgaaaacttataaatgatgctctctcacaagatgctcgatcaaatcatttatgagcaatcaatgctggaaggttaggaaggtatacgtacatacacatatacacatatatttgtatctttatacatatatatgcatgcgatgtatcttaatttaatttcttattatatattgctttttatttcatactacaacatcaacatatatcatatatgaatagtaaaccttcataaacacatttgggagaggggcgatataagtaaatatttttgcataatgcaaatatataattcagttaaaaataattgagtattctataacatttattcgaattattaaatagtataatatatatagaaaaataaatatgaaaatcttaatgcaaatatgtactattgatctcttaacaagaaaattgttcactatttagggtgctttctttataatttttgttacactactacaaaaacactctttagaggcggtttttaagccatttaggcgtcggttttcgcgaaattcgctaccaacgctgatcagggcgacgctaaagggtttatatgaacc

SEQ ID NO: 79023 - DNA, 5281 bp, Cannabis sativa
tcgtctttttactgagagcaatgttccacatgctcttcagtctattgtgatagcgaatattgctgtttaacgaattaattttgttcaaaaaaaatactccataaaaatacaatcgttagtgtgatgcaattaaaagtttaaaataactaaaacaacattgctaagtaataaaatagaacaaaatatcatgaaaataaatacacaaaataatcaagtgttacaaattcaaccaaaaaaatccactaaaaaatataattaatacatattttaatttttaatattttttgttatatgaataattttttggtatacaataaatataattgaatttaatcagtttttaattaaattttaagattgacatccaatgactgattcaatctaattataattcaatttttaacctccaatctagtatctaatttttataattagattagattagatcagttcaatttaattaggttagattaaaggttgtctaccccataggcggacctaggggtgttgagggagggctaaagcccaccctcaaatttgaaaatatattaatatagaattgttactttcatatatagtagttaaatagaaaaattagttcaggtattttaaatttacatgggtgaccatgttttgaattttcttgctcctttttttctaggtgtatttacattttatttcttaaataatacaaatgaagaataaagttcaaaataagatcaaatttatgaccactaaaataggaagatgctcttaaatcatcatttcacttaaatttagctggttattaattgttttagattatattaaatgtataactaaacccaccttaaaattcaattttaagtccgcccctggtctacccttaacttttcatcttttgagtacaaatataactcccgtgtccccacatctaataaaagataaaaatattttatccataacactataatcgcaattttaaaaaaaataaatttgtgtcgataacttggtatctccgtttaattgtaacggtaacggatgaaagagagaatgaaaaagatgatccgagtgggcccaccgcgtgtgacagcgttacaggtaattttggcggtaagaagggattttccctcgcaaatttcaaaacacggcgcctaaacccatcttcttcttcttcttcttcttgaaaatctccgcatctcatttctccattctctcccaatctctctaccatggatagcgacgacgaaattctccctttttcctcccccgagggagtttctcctccagtccgcgaaagaaagttgaagcgcttgaagaaagcaattagggtttcagatccccaaatcgagcagcagtctgatgttggatcttttatggcggaagctaattcatcccactgtgaaaacttaagctttgaagtaggggatgagttcttggtgtctagttcgggatcggaggatcttgatgagggaaatgatcttgattctggatttactggtttgggtactgaggataatggtttgggggctaagagggttttggattttgggaactttagcgtgggatctggtgaagatggtgtagatcgaagcaataagactggagatggcagtggcgatgatgcttctgttgaggaaccggagaagattcagcttgattctgaatgtattgtggaagagaaggacaagaagaagaggaagaagaaagatgatagcggtgagggtaacgagactgatatcaaacgaatgtcggagaaggtaagactttgtcaaattctgagtttgaatttgcaatgagttttctcgtatgcttattcttcctgcgcttatcaatctgcagaaaagaagagaacatctaaaacaactccacgctgaatctcagaggctgttgcgaggtatgaacacttaactgaatcttcattctatctagtgcataaacctcttacactcagctatctggttaaactattgtacttacttgtaaattgcacttttttttttccttgataagaaactagaaacgcaaagtttaaatcagcaccacttgttcagaagcctatatcttcaattttggagaagattcgacaaagaaagttagaagttgcgagaaagtgagtattccatatctgattttgaatttataggttcactaagtttataatgctgcgaagtgactcttgagtttaccattttttggcttggtgacagatctgctagtattagaggtacgtctttcattgacgatagtgacagtttatcaggggatgattttgtacacccaagtacagaagtaatcgtgttagatgctagagaaggagatagagctccagcaactatagatgaggggaaagttgcaggtgggattgaagcagagggcagtatccatgggctgcagaaggatgaatctaatcatagcattgctaacacccgagtaacagtttcagctcagatggtatgttactggatgttgacttaaaaaacatttctggctatttatttaatggatggaaacagtagatatccggttctggcaatttcaacttgttttacatgggtttttgaattcaggttatgaatgaggaatcaaagcaatcacaatcctttcgtgctcctaatgatgatactcaggttatctttcactttctaacttaattgtttgaaaatgttctacattccagttagtttgtattacaactaataacttgtttatttgattttgtaggatttgttttctgattcccaaacaagtgactctaaaaatgagacaccaagcagtcctttggaagaagcttttgtaccttcagtactcgcaatgaacttgaagtttgactctgcccctccagatgatgtgtaagcatttataattctatctcatccttggaaatgtgctgtagcatttttttgatctcctattctgttgtttaatttatgctatctacaatactaataattgcttgcttcagttattgcaattggtgtatgctaatatttggatatgtttatagtttattaagtttgtcaatattacacgcacatacaaaagtcaattataagaatgcacaattttgggtttttttttctattgcaaacctgtaaacacagcacttgcagttttttataaacaacatttcccgcaattaaatttagatgtcatttttctttgtagtacttctgatgaagaagaggttgacgatgacaaagagaatgttaatccccacccatctgaatcagctggtttgacttcatctccaactgatgatcctgtcaaagcttttgttgatgatgaagctgaagaagaggatgacagtgacaatgacctgttacgattcaaagataatgatgaagatgaagatgatgaagatcttgaagatcttaaagatatgatagcaacaggatatgaagaacagccaattgataatgaaagacgcaatgaacttcaccagaagtggcttgagcaccaggatgcaactggtacggaaaatcttctacagaagttgaattatggttcaaaccttagaggaccatctttaattgaagagaaagaagatatggaagatgaggagtctggtgatgatgatgatgaagcatcggaagagttgactccatcaaatcttgtgaagatgaatttaaagaaagtaaagcaaatgattcctcaaatgtttacagacagcaacgatgcatacttatcatctgatgatgatgaaacagaaaagaggcacgccaaacggtgtttgcttgagaaagctgtgagttatttgatgtgattgtttccatgcatacttgaaactttcctatttattgcagtcatgctttcgattcaaagctttcatcttattttattataaagactaaaaatagattgtgtgaaacaggagcagcaggttactttcttgtcaccagcagaagatgaaagttctagagaagttttttgtcgaataaagaagctgaatcttgtgcctgatattaagaggagagctaaaacaaatagtaagatactttatatgcagactaatgaagatatgcagtatttcacagactgatcttcttcttattattatttcttatcctaattgttgtgttttgcagcacattttgatatgtctcacatgggagtaaacaggagcctttcatcaagggtatgtagttttctctaatttatgaaatcaagctatgggatgaaaggtttattaatatattatatttaaatatgctaaaaggaatgtattagatcgtcaaattttagcgatgggggtgacataagatttcagtaacaagtgatcattgtaaagttactctgttagatgctgctaagttataacactgtgtttgcttgtcacagtcatctttccttagccgaggagtatcaagtaatttgccatcatccaagaagcaaggatcaacaacagctcgctcttttatctttgaacgagatgatagcaatagtagaagcgcactcacagcatcggaggatgcttcagaaatggtaagttttttcaagaagtgtaggtggttatacatatttgtcatggtaccattaaattataaaaggggtcagtcattgtatgcattcttaatcttgcatgtccataactttttattggtttaattttcatataggacaagcaaattcagagagagaatcgaccaaaggtaacatcctttaagattagcaactcccaagtaaagataaccaaaagctcatcatctgtaaagaagcaagatacttcattgttggatatattaaagcgaacttctatgacatcgaagcgatacaaaactgatagtgtggtcacccgaaccgattctatgttagcctcattcaagttggtgaagaagccggtgaagacaaatgaagatcgcaatttgtagctgaccattttaaaatgctgtactacatattctactgattcatatgaactcattaaatctttatgcgattcacattaattggttgcattattgttgttggatgaatttaggcaacaaggaaaccataaacactatgtgagtatccgtttaaagtagcaagtactcaagaaatcacaataataataactgagacaagaggagtggttggacaaagcttgtttgtctacgctagcgttaagaagtttgtcattagctttatttcgtggttatacaaagtgtttatatatatatatatatattaaattaaatgttttttattgcaattaaactattcaaccctaaatcgaatgcactgaccaacaatgtttgtctgaaattcctttgaattggattgatgcacctctttaaagagaataccatgaaaaatttga

SEQ ID NO: 79024 - DNA, 999 bp, Cannabis sativa
aaaatttccaattagagtacaactttctttgattaatcatataataggaactgaatttcattatgtagattgtgggacatttgataatctcctttcattttttttttttgttctatatacaaatgattcaaacaacgtattgaatactccaatggctggcttagaagaaagaacaaagaagagagggagaaaataaatgggagagaccatccacaaggtcagacgtacgaccgctctaatggaactggaaggaagaccatagtgaatcgaacaactatcacggttgattaaatccaaaaagttaaagctacttatttgtttagagtagtataatttgattcagtgtttttttaaagaagaaaaataaaatctactattttgggcatccttaccaattatagttgtttctttttgggtatgttgattattttggccatgttttcctttggatatatttgttgattgagtttagattttggtcactgatatgttccttttctaatataaaaaaatgatttaaagttactttgtattatgtcatagtgatagtgttcgaaatataattccatagacgcgacccaatagaggctagaggggcaatccccccttaaaaaaaaattcagaaatattttggttagttataacggatatttataattaaaggtgataaatataaacaatattaatttttatatgttggttaagttattttacacctattataaaagttaagtaatcaaatcctagtataagtatctttatttttaatatttagtttactttttgtcctcctaaaaaaaagtttgtcctccgttcaattttaattctgatggatatatagagaggcggatcacatagaaacgatgttaaatcatcttccgaaaaaaaaaatcgagaaaaatgaatatttagggtgtgttcggtaaccattataaaaatggttttttgtttttttaatcaaaaatttaaaaatataaataaaaattgtgtttggtaact

SEQ ID NO: 79025 - DNA, 5431 bp, Cannabis sativa
agcaatacatttatttaactaatctccttaaaaaataatttcattccacctaaattggattagattaattcatttaaattgaattcctaaaacaaaacctagtagctccatccttttcccttaaatcgtattcaatatcaattaataatttgattggattggattttgaaatctaaccgtatcgaatcagatgatgattttctaaattcaattactaattgaattggatcagatgagaagaaaaaagttggatcaaacagccctaattcaaattcctattattttacgattagtaatagcaactcatcaaacgcctgctaaccatcctaaatcatgcaagcttacacgcagtgcatttcttacctcaaagccaattaaacaactatcaattcctaagaaaaaacaacaacaatcaatcaatcaatagaagatctaatttttaaagcttactttatatgtacataatcgtaatcgtgtaagtttatagacgtggtgacttttctgaagacattctgtaaatatatatttgccttggttataaaattaaattttgttgagaaacgtagatgcttcaaagcactaaaacccattacatattcacaatttcttaagcaaaaccgttttaaatttaatggtagaatgaagaaagcttctagtttagaagtttatgcatatgtataaaatggctatttcgattaacttgacaaacatttccaattccacagcagagatagctcccatctcactttttttttttatgaaaacagagctcccatctcactttatcttaagcttgtgctaaaataaaactttcgaaaagataatcaataacgcgttttaggcaatcggattccctaaataatcatttatattgtttcgacactgaccactaagaatgcacgttaaccaaatcaattagtgaaagagaaaacagaccaagccatgattaaaaatatttaaagtatttcacttcttggttgggcatttgaaacacaagccaaattagaacttgaatgaataggaatgaaggtgagaaaagaatatgtagaattagattaaaattttaatctcacattttgtgtcttccaaagaagtcattctgctaaaatgatagaaatccatacatttcaatgcttctattcggaatggaattgacaatacaatggattgcatttcaattattattaattccattaataaaacccaaccaaacaaatccaaatgaattttgacgaataatttatacagattacttgatagaagtctctcgtagaatgtcgttacataaaagtccaattgggccttatcaataaaaaaaaaacagtctatggaagcaagcaagtactcctaaaatgataagcagctaaaagtgtgaggctaaatctgcttcttattcttattcttaattcatatgttaagtacataaccactttaatgattctaatatattagcacaactatagatagtagataccagaacggagaaaataaagctgaaatttgttcttatgaatagagacattccatcaaaataaaggttctaaaaatttctcttgtttaatgcatctactacaccctatttcatgtcattgccatgtaaatcttcaatactccttaagtgcatattaaggagagtcgatattgttgaagtgggaaaaaacacactcgattgataaagacacacaagcatagagtaaggaattcaacaattcagactacgaagccaaaacatatacactgagcagagcatcataacttaaacaataaacatgttgcctttaatatagaaaccaaaaatccaccatattaagaaacaaaaattgcaacaagagaagtaaattcaaagcttaaaaaaagctttaaccaaaatcaacatatcataggaaaaacaaaaccatacttaatttcaatccctttaacaagtaatggctaactaaaatctctctccaccatgatcaaacaaagaacaagaactaacaagtttttaatctccctttcttctaaaggagcacccctcagtgagtctagcacgcccacctgtaggctggcacaatacggtctggcaattgccacacaccaccacagtttgtgagtggctgaaaacagttgttctgcatatttcaaaacataaatcataagagcaaaattcagcacaaacccactaaagattacatactgaacaatacattcaaaacagagatttttctccaaggacttacatattgaagcagccttgacatttcacatcctgtaggataaaaaaaagaaccacaataaagttagcaaacccagatacaagtcaaacatgtataaaagaactctaattatgcaaaagatttaatttttattaccatgaagaacgaattaggggactgaacaaggcgcttgagcttgtgctttttcttctcaagctccgccggtgggtttagcaaatcaatgtcgttttggagaacctaaaatacatatacacatacaaataagatgttttataagatattagagccggaagaaccaaaaaaaaccaaatcaaatcatccaaaattcaaaacaaagcataataagtaatcgatcgaagaaaacgaatggaataggaataggattaatcaattatgtaaaataaactgaaaaacaaagagaagaagttcgaaattgacgttaccatgttgaaagccgaaggaagctttgggcaacacaagcaaaccctagaaaggcgagagacaattgagtcgagaaggttggagagagtgtaatccctagcagtagcgatgaataaatactagacgaaggtgagatatgtgggccgttggatctgatctggacccgtatattgaaccagggttttaagcacacctcggccctttctcataaatattaatattcacttctaacaccttaagttttctcaaattacaatgtcaccctaaaataacatataattacactaacgccttctttttttcttttttttttttgaaaaacatcttacttaaatgtatgaaaataagtttgtcttattagttacagtgatgttcgctaatcgtgttaaggtgtcaatagttgcgttttctttccttgaaatttgtgtgatggcgtatcctttgaattgtggcaagagatcttagattttgcttaggtataccatcatcttttctcctcaaaccatgtattttccctaaacattattaacgactcatcccgagtcactacaaatgtccaggtattcaacatgtacttcttgagcaagtttgagtctaactatgagtgtctcatactcgacttcattattagatgatgtgaatataaatttaactgctccgtgcaaatgttgctctcgaggtgtaatgagagcaattcctatcccagacagttgattagtggatgacttatccacgtgtagtttctagacttgttttcctcagttttttttctctagaagaggatctttttctttattaggctcaggactaatttctgaatccatatcttcattacccgtacattccattacaaaatttgctaaagcttgactttttatcactgtcctcagttgataagtaatttcatattgttctaacttaattgcccatttgagtagtcgaccagaagcatcgggcttttgtaggacttcctaaagtgggtggttggtacatgctctgataagatgagcttggaagtatggccttagttttttttaggctaagagcaagaaataagtcaagttttccattagcgttatcaactttcaacatcgattaacttattgctgacatagtagataagatattgagtgttgttttcttttttgattagcatgacacttgcagcaaatttagttactgcaaggtatatcctcaattctcctctgttcaaaagttttgataagtttgaaggttgtgcgacctgctcttttattctaaactttaatttgctattctcgtctttactattcttttgaacttttcttatatcattcaaaataaattgcttagataaaaataggtttaatattcgttatgattaattacttttaatatatgtgggacgatatcggtctcttgactactattattacttgtcgatttatacacttgtaagcgtatcatataaatttcgtaaaaaaaaaaaaaaaattggcatcgttgtcgaggattaaaaagcttaaattttaattaatatagtgaagaagatattaaatttcaatcaaagtttttattcatttatttatttttattaataatgttgtttttaattgtttgttgtgaaggtacatgcacaaatcttatagttcacctctctcaccttttgattctaaaattgaaataacattgaagccagtcagaaaagtcctacgagctagaaagatggctgataacagagtcaacaacaataacaataacgccgctaatggtgccaatcttgtggcaacccggaccttgagagactagtttaggccggttgtcaatgatgatttcttgagtgtgagaagacagcaagtgaatgtaaacagctttgaattaaaacctgcactagtcagtatggtgcaacaaaattaatactctgatttgcctcatgaagatccaaacattcacttgtctactttgttggaaatttatgacacaataaagataaaatgagttccaccagacataatcaaactcaagctatttttattctatttgagagaacaggctcgttcatggtatcaatctttgcctcttaatgcacttacgtgggaagagaccactcaaaatttcctcactaaattttttccaccttccaagacttctaaattaagggaggaaataactcaatccagatagtcaaaaatggagcaactttatgaggcatatgatagattcaagaagatgcttagaaagtatcctcaacatggcataatagattggtttcttatccaacttttctacaataggcttaataatcaaacgatgtcacacattgatgctgcatctggtggtacaattctatccaagacataaggatgagctatgacttatttgagaatatgaaaatgaatagttgttaatggcaaaatggaaggtcaactgttaaaaaggcaataaggttaattgaagttgatcagatgacgttactaacggcgtaaatttctatgttgatcaatcaaattaaagggcttacaaaaagtaaagtggtacaaagtcaacaatcagtaaacatggcacaagccttggggtctaatcaagttagggatgaacaatgtcaatatatcaatcgaagctataattttagacccaacaataatttgcctaactactatcatcctagtcttcgaaatcatgaaaaattttctaatgataataacaagaatgtacttaatccacctgaagagcccaaccaataaatggggattcaaccttctctatcactagaagatttattgaaaatttattgt

SEQ ID NO: 79026 - DNA, 1051 bp, Cannabis sativa
tttctttttttctttctgtgtttaattcagaatccagatccatatgccgctacatatgcgagaagcatggagataaagggaacaaggagttgtacggaacaaacccattagctaaagcctcgatagatcagtggttagaagcggaagctcaaagctttaacccaccgagctcaactctggtgtttcagcttgcgttcgcccctttgatgaagatcaaacaaaacccttctgcgatcaaggagaacgaagataagttggctaaggttctacaggtttacgataagagactcggggagagtcgtttcttgggtggggatgaattttctctggctgatctttctcacttgccaaacacccaatacttaatcagcgcggctaaggataagatggaggacctttttacttccaacgacaatgtgggcagatggtgggctgagatttcaagtagagactcgtggaaggaggtggttcggatgcagaacaacactcccaattgattcccttctcttctcctttctcattcaaaaccttcgtcgttttcaaattttattctcctttcaataaatttttatgtgtaccgtaacagtattccaaggtttaaaacattactttctttttttttttgttgacaatgaacaatttcaaggtttaaaacattataattattattatgcagattttatgtgtacgaggactaatgtaccagatctatcagaattctacagttaaatgtgtgcgaaaatattaatagaatgaatgaccttttagaagtacgagttgcaccaaaaaaaaaaaaaaatgctaaggcacctccacttcataaaaagaaaaggattaaaacattattattgtgtggattttattatatgccttaatcatcatttaaaaggttctttatataatagtattgtagtattttttttaggaggattagaagggatttgaattgggaaatttcatattttggccctaataaaatactccatatcaaaatttagactccttaattttttgaacaaattgatttcactaatttaaaaaagttcctaaa

SEQ ID NO: 79027 - DNA, 4052 bp, Cannabis sativa
aacatgtcagttttgtgttagccatatcaactcgaagacgactcgtttattgaacaggttagacgagccaacccgaactcgacccaaactcatttaaagcaaaacacaaactttcatacgaatttcaagtcgtattatcgtgtttgactcgttttgctggcccacgccctaaccattggtgccctttttctatgcaagtgtatgccattcatcaattatcttatttaataaatttataattcatcgtttttctttttttaatgaacataattcatcaaatataacattaaaattttcaataaattagtaaagaaataaagaccgttcctttatttgtgtggttggtttgctccgatgatcatagaaacaaatgggtgaccaagtcagagattggtctcttctccccgacgaaatctgggcaatcgtcggccgatacatccacaactccatcgaccttctccgattccgaagtgtctgcacttcatggcgaaatctcatccctccatcccacaattccactcctcttctccgtttcaactttcctttccctccttacccatcactcgtcgaaaccttcgtctccgaaaccacagtctaccgcatcaacctccccactctccacaacccatcaacttcttcttcttcttcttctttcgttaagggttggttgatcaagattgaagagtttgaaagaggaaagtttcgacttttagactcactctcatgtcgtcgaatcaaggatatcacttcaggttgtgaaaatctcttcgatatatctcaattgagtttgacaaagctaactacggcttatgcccttaaatacgttaagggttcttcttcttcagtacttggtgtgaacaaagtggttctttctcccaatgactgctcaatctttgtaatttacgataatgggaaactgggttttgctcagaaaggtgaggaggatattacccttgttgattatcggattttggattacaatgatctcactctttttagaggtcaaccttatgtcgttgaccgatggggtacggtttcttggattgattcttcattgagagttgttcaatactcacctcctttgtttggatttggtgatagaaaacatttggttgtgtcaaaaagtgagctttttgtggttgataggtactttgatgagaagagtaatacttctactactccatacccagatgagaacagtattaatgttgttgaagaaggtggtgtgaacttcaacttgtttaggcgccaccctaaccgtcgtggtagacacgatttcaatcatcccaaaacagtggatttcaaggtgtttaagcttgatgaagaatgggggaaatggattgaggttaagagtttgggaaatgatgtgtcttttgttttgacttatgactgttgtttctctatttcagcttctgagtttgaagggtttagagagaattgcatttactttactgaacaatttgatatggatttagctcttagaaagttaggtagacttggtggatgtgttttcagcttagaggatcataccattgatgatcttcccaccacacctggctactcccaaatcttttggccaccacctattccaacaaggctttgcacaccccaaatgtgagtactaattactaaggtttttgaatgatgttggtgatgactagtagtgtttgttatgtttacttatgtctatggtttttttgaatcattccaatttggttgattgaatcattccaactgaggagcttttgaattagtgttttctccaacatgattttatcttagaatctgaacaaaaagtattaggcagttttgcatagtttatggaacccatgtacttgtatattattatgaatattttacatagatatcaatgatttttttgcatagtgaggcagttttgtttgcagctaaagactattacttgtcaaaccatgtgtgaggaaagagttattagatgttatttatcatgttcttattggttgtataatatcatataattgacaggtgaagaggagtcaaataaggaaggcttgaaatttggagagaatctgtttcttccatcaatgacttcacaattatatatgtatataatctagctgtagtagggggtctgttcttgattgtaatgatgttatttgattttgattgaatgaatatgagcaattgggagagactggcccatgtacatgttatatatgaccccataagaaatgtgttggaagaaggaggttatgtatgatttgtattggacaactccaagaagataggagggattttcctcgaacacacttggtaattttctcatgtagtactatgatttggtttacttcttataatacattttctttgggatcattgctataattgcactatgatatttttgtaaatccatttgaattattactttagttcttgcaattaatcttttaatttaattcaaaaaaatagttataaacatagtttaataaaaacccaatatatatttttcttataaaagtgatgggaatattttttttttttttttttgtaaagtttaaataaaatgcagtttcaaaatttaaacttttgactagtataacctatttttctgccaacagataagataacactttcaaagactacgaccgataaaactaggtaacacccataaagagcaccaatcaaatttgtacaaatattgtatcaaaaataattaatggaaaacaaaatcaaatacgcaagagtaagataagagaaaaaaataaaagtcaacattaacaataataataataatcacttgactatctaaaaccaaagcactctgttttgatttgtgttacaataaagatttaagctttgagagaaaacagagcaaaatattaaacaaataataatgaacatatcacagtggtctgatcttcccaaagaactcttggagataatagatagttatctcaacaccaaaacagaccataacagattcagatcagtttgcaaatcatggagatcctctcttcttccataccaaaacacagtcgttttaccacccaaagttccatacttgggaccaccccatctcagaaaaacctctcttctactaacccatttcacagtctaccatctttctccaccacagatcaaatccatggcttcttctttattatggggttggataataaaggtcatggaaaatcaacaactgggtcatcatcatcttattaatcctctctccccaatcaaagttcaacctttgcctgactcgttccccaactcactcaactcattacaattccgagtcactgagttgaccaggtcatactctttacaatgctctaatctcaactacaaagtggttttggacccaaatcatgattgcccatctatcatgattgtagcaactggggttttatggcacttgaaattaggacaagataggtggacagccatagatgactcggtctctcaactctcttatgaagatgttattttctataaaggaaagttctttgctgttgatgagtttggaagaactgtagtgattgattcagctttaaaaatcactgagattgcttctaagatttcatgtggtaataatggtgataggaagagtttggttgagttgaatggtgagttgattttggttgatagaacaagtgttgttgggtttgaaaaattcaagctttactttctcaatcaagatcagaaaagatggattgagttttatagcttaggtgatcaaatattgttcttgggtgaagattgttcatacattatatctgctaagtgttttggtgggtgtagaggaaattgcataatctatagtgatccacagttcaaagtttacaacttggatgacaggactttagtaccggtgaatcaacacccagaatacactaacatcttcagcccgcctgaccgtcctcctccaccgccacgccgaacaagacgaagctcaattgtgagttgtcttaggcctttgtaataatcaatgtataattctgtctttcttatgttgttttgaatttctttgttacatattcattaagctaattaggacttttgtttcttttttt

SEQ ID NO: 79028 - DNA, 4139 bp, Cannabis sativa
tttagggatgattgctgtaaaattatttcggtcaactttgtaattaaatgccctctatgtaattataaatagtggcaaacaagctcaaaaaaaggaaggaaaaaaactcatatgaaagagcccctgaaaaaatactcaaaaatctgaataagattgactcgtggactatgcagaattttaacagcaaaatcacgtaaaaaaccctgtgttcatattctttattttgataactttaattttttctgtgtgaaatcaatattgtgagactcaaattcggttaacgaaaatctgcgttaacactttctacacctcaaaccaacacagagacataaaagagttttaccttcggggtttagagggtcttgcaaaaagatgacttgcctctgtttattagtataatctggcatatttggaacaccaggaatagctctatttttaattatcatgtcactaacagcagcaaaactgaaggttttgtcaccaggtttttgcagaattacaatgacgctcagctcaccaatgttatcgttagcaaccctcccatcagaaaaatacaggctgaaactcgaactcaagatcaagctactctctttcccactaacagcttatgtctgatggttgatgtagcgctgaatcaaaacatgatgaaaacgggactcggagctgtcattaaacagggtccccattgcattgtagcagctcattcaacctctaaattgggagcctcaacacccctttttgctgaggctcaggctctttttgaaggcttagtttggtgcgaaaattctcaagctcacccatcttagtgtttttagactaccaacaactcatcaccaaagttaatagcaactagcaggacaattcagctctttcgagcctggtggttttaatctggcagtccctctgaactttccctaatgcctccctcaagtacattcctagattgatgaacatcgaagcgcataagtatgcaagggatgctcttaggcgtgatgaggactgattctggagaattcttttgttttctccttttctctgtatttgttgcaactattgtgtttgttttcttttcctttgttgtagcagttcactcaaaaaaaaaactttgtcatcaggaaagaagggtccctgaaacctcataggcctctatcccttccttcttggatggtgtttagcatgtatgaaactcagaaaaaggtctgaagctctggttagcagtgagcttcgctctgatcgttaactcccccagctgcgatagatcttccgaacctccctttatcgcagcccaacacgactttgacgttggctcaacttatctagcctttcagaaattacaaagaaatgaacattagagaggaataaatggaaaaatatttgctgaataaacaagaaaaaagagatgataacaattaaaaaaattaattgggtgttaatttttttttattgggtgtcagattttttttaaaaaaaaatgaatttttgataacctagaaacaaatacatcttatacaattttgacttttaaaagtcatataaatcaataactaaaaaaaggatgtatagtatacgaacaaaatacaagagtcactaccatagatttattctataatattaactgttactatacatctttcacataattgataatggttacaactcaatgccatattttataattttgtacttatttggtacaaagaattagcaaaattataaaatattaaatattgaatagcctaacctttcgaactgctgctgaatccatgggcaggcaagagacaacctagagaactgaaacatcttaacagccagaggaaaagaaagcaaaagcgactcccgtagtagcggcgagcaaaatgggagcagcctaaaccgcgaaaatagagttatggaagagcaatacaagcacgcaccgcgtaaaaaactgtttagttcattaattagttaataaagagagttgctaccaactattttacacaaggaattaagtgttacaaaatgaacttcgctgctatttttcttttttatttttgagaatttagtgaacttatttatgagatttcataagaccatctcaaatgggatataaattttgtgttaaatttagcttaataaatgaattaatgttatatttagtctaaattttacaatcatgttcttatacataagggtaaaataaaccttattttaataagacactgtaaaaaatcaacaaaattattaaatttttatttaaaaaatataaaaattatattaaaaatataaataaaaacacataaatttattaattacgttaggaagtggcaagtgtataaataaaaaagtaatatttattgtggtgtaaaatttaattcatggtgacgttatattattttgtgttaaatttattaaactacattatacactattattaaagtttaattttataatcatggattaaaaatacatatatataaaatttatggcacatgctctaataaataaattaagcaatcattgaaagttttgagtggtaataaagagtgttaaataagatttaaaagttcatagattagattcattcaatagttgatttgatagcaatcaaattttctaattattacctctatatcattttcaccttttatcttttatcttaaaatcatttgaaagtggatccatcaagttattacttagtttacaattttgatacgattgattacaccaaatataaactttagttagcaagattgattagcccctattttgctctcaattcaattctaccaaccaagatttttataattgtgagaaaaaaaaaattggatgggaaccaacctcacattgagcgaatgcctaagaagaaagaaactttggtgttttcctcactagtcaatcaatacctaattacaagagtaactcgtcaatagtttctaatacattaatgacatttcaaaatgacatgatctttacaatcattaaattagaaaagttacttaacagaagacttaaagaatggattggatggacgatttgattgtacttgatctacttcaggagccttcttctcttgaatgtttattgattttgcaaaagggttaaatggacgtgtaggctgtacttgttccaattccccagcctttttcaattctcctgtactattattaataggatttccttttgccgcagttttcacctcttctattttcttttcctttccagtatcatccaactttacagcttggtttgcttctggtttcccctcttcagctctggatccttgtaattttgctttcgttgtgaatagtggagctgataattttgggggtgataacagacaatcagattccagagggttacttctttcagaagaaaatgaagtctttgaaaatgcaacgtctttggcggacacacggcgagttgagctagggaatatgttatgcatggtccctttactttcattaatcaacctctcctgttacaacaatgcaacgaggaatcataagaaaaagagataacaacaatgtagacttttcaatctagtttgttctgcttctaccattaatggccctcatttgaagtcaggtactaacctccaatatgctgttgaaccgttcagccagatttggtagcttcaaaacagtaaccagcttaattgcacccctcactgacttctcaagcaacaaaagcttaacaagttcagtagcccgctcaagcttatcacctgtaataataatcataagaaaacaaatgcaactaatcagatgtctattctggtacaggatctaactttacacacaggaaaagaggctgaccattgcagcaggaggcgatgagcctcaaaatgcatttatcttgagctgcttctacattaaaagcttcatcatcaagtaatgtggtgtccaaaccagatgtagacaagtcttctatttgcttttgaatctgtaatttaaatatgtgaagcaaataacgtcagtaagaacatcttattagcttccaaagcaagtgtaaagtaaagtaacaattatccagactagaaaacaggcagttctttcctcaatcagtaatgaaactcaacaacccttacgcgcaaagccaatagttcattatatagcagtaaaaagaaatataatacgagatctggggttgggactaaaacc

SEQ ID NO: 79029 - DNA, 9493 bp, Cannabis sativa
ggaatgatttttcagttgaagttgatcgatcaaaactcggaagaagtagagtttgctagaagtgctttgttctccaaacattcagagatggagggtaaaaatacttgtgtattgccaattggggtattttctctttctttttatcttttggtctctaatattggggtatttgtttttgcaggctggcctaagtatcacaacttccagttctttaaattagagattgagaatattttcttgatagattggtttggtggtcctaaacctctcactatagatgagtaccttcatcccaaaatgtgagtaaaatcatgtttgggatacccttttatatgattaattattcacctttggttggaaagtagagagtgtttatgttcattgtactaataatggtttttcttcttatcaggaaagagattgcctttggtctgtgaattgttctcaacttttgtattctcattctggcttgtgtggttgtgatttgtgattaggatgaaaaataatgtaaataatcatgtaatattgtttacttttcatacaacaaacagtgctttcatctccataacttgacaaaattggtatgaagatgatcatttgttgtggaaagaaatgattgttgttgtttatatatattccttcctatgaaattgtacactgttgtttttcatacagacctacgacatgtcgtttctcgtgaattgtcctctcctcgacgtcgtttcacgttaatttctaaagtaattattccaaaccaaaaatatctaataaaattgttcaaaaaaataaacaataaaatgttggttttcataatgtgtgtgcgcttttttagttcatttttttttttatttcatttcataattgtatatgttgtatttaattaaaataatttataaatttttaaaaaatttaaatagttttcctacaattatatataaaaagaattgaggttaagttttttttttttttttttcatatgcttacacaaataaaaaatgtaccaaaaccaattagaaggtgtactatgaattaagaaaaaaaatgtttttttttaaaagaaacttgcattgataaaagaaaattagattttacggtcactacaaaaaatatttagtggaatagtagagagataaataactatactgattgtgggtaaagacttaatttgtcacattatgagctgtaaaattacaagttctaaaagtattaaaaaaaaacaaccaacaaaataaagataagttattttacaaaacaaaaggtagttcacaattttccatctagaatccttactgttgatggtattgatcactaccctagagtcgctctccacaataataaacttgcaacctttatcctttgtcatttctaaagccaagcaacaagcagctgtctcgccacactgagcatcaaaaaattccaaccttgccatgttcacccaagtcacttcactttggtggtttccagcgataactgcaatacacatgttttctatatctactttgacatcacagttcaacttgagttaatcttaaggaggaggacattgttcatgcaataagatcagagtaggagtaaggataagagaaccttgtgagagtaatgaatggagtcaatctattatgaatttgataaattttcttatttttgataaatttcaaaaggtttgtaacaaagtaatttacttatttttgataaatttcacatgagtcagggacaaacaacaaaataatttattatgaacctatttttttttaataagtgaacctggttatttattttttttttatggttaatctgaaactatttttagaaattttattttacttttttacaacctaccaaaccaaaattatatcttctccctttcaaaaaataaaataaaattatatcttttctcactctcattctcactctcacggtacaccggcaccggcaccggcaccgtcgactccattacgcatgggagagcaatctggtcacggcagctcagagacacgcacggcagagttgtcttctccatctcctgttcccaacaaataattgagcatttgagcaacatcttctttgtctctaattgattggttcaacttttgtatcttccacaactcgaacatcttctctgtgattattattatgcacatcacataaatgtgcttctctgatttttgtttctaaattttcttattttgcttttctatctcttgctctgtaggataatcagtcccaactaaaatggtgggattcctaatcgaatctctttagaaagaaaacagtccctcgtcatcttctctgctcactcacaccattgtcgacactcatctcttgccaccgtcgtcattgttgtcttttgtcctggtatgttctttatctccctgccatacagtttttcttacttctttatctttctctttgatgaattgtttgagcaaaagagatttaatttcttttattttctttagaaattttacttggatcgattcctgtttttaaaatttgagggtttcaatcctttgttgcaatatttatacgttttagattgaatttattgtaggtttacttgattaccgagataattcaaatgatgataaaataatcttttgagtaatttagataacataatttgatagagggtttcaaattttttcttatgcaaatcacatgtttgagaaaatgcatcaaagaaagcttttatcacttttttttttactcatttactttatagattggttaaacttgacaaagttaattaaaatgtttttgtacttaaaacttcataccaaaataagtagaaaaaaataatgcatttgtgttgaagtgaggagatgagagaaacagttactggaagtaaagatagtagggaaacagttattggaatttttacttatttgaagtaacatgatcacatcctccaacaattttttagcaagaaaattatttactgaactgccttttcataaccattgtgttctaagtactgaatttatggcacttataatagaaacactatgaaattctgagatttgggtttgaaagtttttgagatgtttaaatttagttgattgttacgttaatttattgcttccactttgaatatattaggatgataagaaagataatagtatactaaaatcagaaggaaaaaaatacatcggagctagattgaacgactttacccaaccaggacaagttaatagtatgttttttcttatctgggcaggttacttgctataattcgaccaaactgattgatttagtgttgtaccacgtgagtagcattccctccctcatttgttgaaacccgaattccatgacagtgtactgaaaaatgtcagcccctctaactcaagctcaactactcaccccaactctaccgccaaaacacccaactcaccacccatttacactcttcttctcctcaccgctgattctcactacccgccagagttggacctcacacaaattcattatccgaaactccagctccaaatccgaaacccaaaccatactacctaagtccgccatccaaagaattgccgagaagcttagaggtcttggcttcacagaagaagttccgagtcttgaactcgaacatgtcgcgaagtcttctgctggtgaaattttcttaccgttgccaaaacggttggccaatcatcgtgttggtcacacaatcgacactagttggagcacgccgcacaatccggttccagaaccgggaaccggtacaggcattaagaggtttcatgaactgagggaccaagtgaggcaggagaagaagaacaatgagtcaacgaagaagatgagggagcccacggttccgacgttggcagagctaaccttgacgagggcagagcttaggaggttaacgagattagggattgagttgaaaaagaagctgaaggtagggaaggctgggattacagaaggcattgtgaatgggattcatgagcggtggagacgatcggaggtcgtgaaaatcttttgtgaggatatttgcaggatgaatatgaagagaacccatgaattattggaggttagtccccctctttttttttttcttcaaaattatggttttgcaatgccataatcttaggtttcataattgagaaggattttgttattttggggttcaattttgcatttttaaagcataaaaactttacgtatcggtaatcatatttcagttgtcagtttacaatagtgtagcatcaatcattttagtttgatgccgatgtttcagaaaaaaactggaggtttggtcgtttggaggtctggaagtaagatagttttatacagagggacaaattataagtatccctattttcttagcaataaaatttcgagtgaggaggcctctcatggtgcattaaccaattcacttagtgaagatgatgaatcaaatgagcctagttctagcgtggatggagtaatttctattgaagaggcctctcatggtgcattaagcgattcactaagtgacgatgacgaacaaaatgagacttgggcttcttctagtgtggatggagtagatgctcagcttcccacaaataaaaataaaatggctaaacctgctttagtacaaggtgttggattacagaatagagtgcgatttcagctgcctggagaggcacaaatggctgaagaagctgaccgcatgttagatggattgggtccccgtttttccgattggtggggatatgacccccagccggtggatgctgatcttcttcctgctgttgttcctggatacaggaaaccttttcgccttcttccgtatggtgtgcagcctaaactcacagatgatgaaatgaccacgttgaggagacttgctcggccattgccgtgccattttgcattgggtgagttggattctaatgccatagctttagttgataccgtcaacatttatatagttacttccatgtcttttcagggagaaataggaaacatcagggattggcagcttctatcatcaagctttgggaaaaatgtgaagttgccaagattgctgttaaaagaggggtacagaacactaacagtgaactcatggcagaagagttaaaggtgaccaatagttcaaaataatgtttagattttttgttgttttgagttgtagcacctcaatcttattaaactagcaaatcctggaggaaaagaaaagaaacatagtagtattaaaaatagaatatcagcttcttttcacttgttcatgttagtaggaagaatcttatccaaatgtatatatgctaacttcttatgtgaactgctttttgttgcagagtttgactggaggaactctaattgcacgggatagagaatttatagtcttgtatagagggaaggattttctaccacctgcagtttcttctgcaatagaagaacggaggaaatatgtaatgcagggaaagaaactgagggcagagcacagcacagcagttacatctgcacaagatgaacttgagaccacaccaagtggtccaaatgaacatagtgtgattcgtgaacagcgaaagctaacatttactgaggactctgtcagaaaaactagtcttaaattgtctgtggtatggtcttttgggtattacacttgattaatgcatatctcttttgggctacatatgtattaatctcttgaacacacaggccttggaaaagaaagcgaaagcagagcaacttctagctgagctggagaaggcagagttgtgccaaactcctgaagcagataaagagggtataactgaagaagaaagatatatgctgaggaagattggtttgagaatgaatgccttcctactaatgggtgagtcaatatgatgaagtggctccagtctagtcgaggttcaaatattgcttgctttagagttaattatattgaacatcaagcctttatcataatgatagctttcctcaaagagggtccaataatcatttttcgcacatactcaggtaggcggggtgtttttgatggaacaattgaaaacatgcatcttcattggaaatatagggaactagtgaaggttataagtaatgagagaagcttggaagctgttcaccaagtagcgcggaccttagaggctgaaagcggtgggatattagtagcagtggaaagggtgagtaaaggctatgcaataattgtgtatcggggaaaaaattatgagcggcctgccactttgaggcctaagacacttatgaataagaaaacggcaatgaaacgctctattgaggcacaacgtcgtgaggtaagtcatcacattttgtatgcttatttgaaaagtagatgcctcctatagctcttagtagtcttccaagatatctacttcaccttttgttgattttacctgatttgatcatgcagtcgctgaaactccatgttttgagaatcaataaacatatagatgacttaaagcttagaatggtgagttctatcactatcttttctttttaaattttcctctctttttgctcagtaccttctgtacataaacttttgaaacccaggttaaagagaaggaagtcaatgacatggactcgattgttgaatcagattcaagtaatgtggtgaggcactcatctttcagttgatttatgcctgtttgaaccatataatgtttctggttggaaaaaacttaattttatgatatattttaggtcctggatagggtgaatgagatagactcagctgacagtttgatggttgatgctgaagggaagcatggttttgtctctcttcccacaacttctggggaaggtattgttgcggtaagatatatatcacatttcattttaccgttaagaatttcttagtagacatttagattactaggcttaaactggggaattctatcactttctttatttttctgcttgctgttttagaattttttttctcccttttgcttaagtatctttgtgcttttatatttaggaaaatgaagtcattaaaaagaagtcagtcggtgattcagattcaagtagctcggtgaggcactcatatttttgttaacttatgcttgtttgaaccagttaatgttcctggtaggaataaatttacaactgatatgatataggttcgagataaggtgaatgagaccgaatcagctgaaagtttgaggtttgatgttgaagtcaaacatgattctatctcttttccaacaacaaaagtggaagagattgttggggtaagagaatactttagcttatagataaatgattttgaatcagaaaaaaaattatttaacctgtttcaatttggttttgtcttcacatctgataaatttgtactgatatcgaggagtgttatgtttaaattgatatctttgatttccattgtgacgattcattttatgtggatttcagtccaagggaatgagccacactcctgatgctgatgccttgcaacattgtagttctgataccaaagcaatagattcatttacagacaaaaatgaactggaaccatcagttccaaataaggtagaaaatggattgaatgagatgccctctacagctatacaactttccaacagagagaggcttcttctccggaagcaagcccttaagatgaaaaaacgccctgtgattgctgtaggtaaatagttctagctcagtcattgcttttctgctctcccttgttacaaattttgctattgattcatacaagggttgacttataagagctcatcacatatcaatatttttatcagggaagagcaacattataacaggcgttgttaaaacaatcaagactcactttcaaaagcacccacttgctattgtgaatgtgaaaggcagagcaaaaggaacttcagtacaggaagtcattttcatgcttgaggtctgaactcttaactcctagtgatcatatttttcctaaaagaaaacatgctaatctttattctattgacaaactcatcccccgaagagaaaaaaggctaacaagatatgggattttctgttactttcagcaagcaacaggcgcagttctagtctctcaagagcctagcaaaatcatactttaccgaggttggggcgcagggggcagttacgatcaatctggtaagaagaactggaatgatgcaaatgcaaggagaaaacttggaactcagcttggtgtgtctcctgaactcttggcagcaatcaaaacagagtgtggatttgagtctcaaaacagggaagacgactcaactctatagcattcattttaacacaagtaaaaattggtttgttgctgcttataacttcggtatgcccattttcgccgttgaaacacaattgcctggactacatactgttctctatctctttcaggtactatccttgaggttacaaaatacaaaatacaaaatacaatgttcatacttgtatcagtaaatataattatttagactaagattaatacttaattgtatgttaccaatgaggatgagatgagaatggccatatactaatgcattggttattcataagctggagtcgatcaaattacataaatttaacgtaattaaatatacctttacaaccaataaaaactaccctttgtagagtcgattgttatgtgtatttttcctttatttttaggagaagaagaagataagcaataatgggagataaagaaaacgaatttcataacttggggaattgagctttttgcattcttgtggtctgggccagtggcctttgccacgtcttcatcagtgttattaccaattctgtcatagcctgtttttttttatcaaagcattaataattaataataataaataaaaaagaaaaataagttgcaggcttgacgacaagatagaatgaatcaaaaagtgtaagaaactccaagtcaaaaacacaaatcgaggaatttacatataagagagaatgtttaataacaagtatatcatctatcattatcataaacaatacaaacaccaatttagagatgggaatttcgggaaaagaagaaaaaaataaaataaatgaaagatacaagaatagaataacttgaaaatattagaaaagtttagtcaataaatgcatcaatgcccttttgaatttttgtttgattaaaaggtaagagaaatcttaaaagcaattaaagataaggttaggtttattgtgagtttgctagaaagcagccagccattgacccttgattttgtgcccaaggtaaagtgatcctttttccttctactagctagcacggtcaccaaaaagttacttcttttcattttcacacatatgcatgagacctccaacctccaactttttcaaaatcatcattgttatagttttttctaacaatttaccactacaaatgctacagggaatccaaacttattaagtctccaatattttaaattttgagcattgtcatactattagctacttgtggtgtattattataataaattatatgactcgatacttaattataccaatagcgatattatacattgtaaaatactataaagatcatgagtattttttagtatatttttttatgaat

SEQ ID NO: 79030 - DNA, 2511 bp, Cannabis sativa
attaccgtggtataagcaacgcataacattcttaaaatccaaatcccaaaataacacgtataccctttagaaaatgttgaaagctagcattatacatatggtgttttttgtaattcaacatagagaacacatgtatttacatctgtctaaaacatcttggatagaggtttgttcctagaaaatctagactcttgtgatatttttggttcattgaaatgggcttttgaatggagaagtcatctgaaaagtaataaacagaagtaaattaccatgttcatctaatgccacaataagtgacagatcatctgatggacttgcctcgccaacatgctgatgaggaggaccaaaaggaataattgctccaccttgcaaatacaaagctggtaaatcctacaaggacaacaaaaacaaaaagtgaatatacgaagacaaggaaaatcacaaacaagaaaattaataaatttggtcctacataccgggtgtgaatcatcaaaatcaaaactcaaccagattccttttggtagtgtgaactggatattatctgtttgccggtcaggtacggtactaatcatgaaacacaaagtcaggaaaaaaagtccacaatttaattatcaagaacagtcaaaactttcctgatggacatctctttgaatattatatgaaaggtgtaaaataaaatatcagcaggtataacaggagtttcttccatacacacatccacagggagtaagtgaataaactaattatacaaaagggagaaatgattgtaaggttgaaaaagagaattattgagaaacgacattcaactggacagaaatttcagtttctcgtcttttcaaaaccacatgagatctccaaataaaatcggtacagcatgttatgaggcatctgacattgggtaatattataagaaatattattaatataacatgggaaacaaccaaccatctagaaggcagaattggactgatgcatcaaggaccactttagtctcattataataaatgcatgaagtgcaacaagtttcatgaataaaagtaactttgtagaagcacacaataagatcaacaaagacctgtcacactaaatttctgtgaaaagaaatagaaaccttgaacagactagaagtgggccaagcagaaaagaattctccactttccttacactaggatctttggtatctacacaacaatacacagatgttagccaatattagaaagagaaattttcatccagttccaatgccaattaaacattaaacaaagttagaagttacccgcaaaaaaagtaggactggctactggagtaccaattgtatgtgccatgtagaaaagagtgtatatatgtggaagaaggcgatagcgcctaatcaatgcaagtcggcatacttcttcacactgatgaagggaaatgaatttagttcataatataggtggtgagaaaaattagaaattatttctcaagggaattgctgcataaaagaaaatggcataaaggtcactcccattcattggggaaatgatcccaaaatatctatatgcaatagatacataaattgcgctaatatgtagtaacagacatgcatccacatgattcatttgttggattcttaacaagtatttataatccaattctttttgacttattcccacataaggctgtgacttataaccacttattgatgaagaatacacttaacatgcaacatgccacaccagaaaaataaataaaattgagtcccttctctgtttaaactagactaccattgttgaatgctctacaaatcattatttagctgagatattgtggtacgtattcaataacaaacgagcataagagcgattactatagtctataggttaagactttgaatatcaaacctcactgccaaaagaccatggctcatggtcagtggtgcccatttcggagtgcccacggcagaaagggaacatagcgcctacacccatccaccttgcaaaaagcctaggagttgcatttccagcaaagccaccaatatctggcccagatagaggctgaccactgagtccctaaaaaatcaaaggcacaaataaaccagagtggatgcagtaattggaagaatgtactgcatgttgctgtgatgatatcatgtaaccttcaatctagagatttcttacagttgtaaagattgttggaagacatatgaaactctttagttactgataatattatgtaaccttcaatttagagattatgttattattacgtcaaaaagagatggacaaaacaatgtcaaggctagagatttaaatgttgtgaacgataaaaatatctctacattcaaagtcaattttgtaattctttattattattttgtaagagagacaatactattcaactacaaaaaaggagacaaggtgttcactttggattacaacaacaaccatcatgctttaatttatattcaagaatcctcttaaaccaagtattcataattaaaactaatgaaatttgatactatcattatttcaa

SEQ ID NO: 79031 - DNA, 702 bp, Cannabis sativa
aactcagaaattctccttcactttctctttctctctacatcttcttcttctttcttctcatctactttatattatattatattattttataacattttatatattttaattgtatacactcatacatcatatttatagtttttccaaaataaatatttaatatttattcaaatatatttaatactattaattttcatttatatttactatgtcaaatttctttaccattttattagcagttgaaaaaactaaattgtgataatttccttaaatgaaaattttatttactgcgttgtggcataaggttaataagtaactcggattcacatcccaattgttttttcttttctttttttggattggaagagctggattgagcagcttggttccaacatcaggttgtgatggttgttatggctgcagttgtctattttatttggattaatagaaatttatgtgtttttgagcatagttcttgtactattaagtttgcaaatgacttgattaagcagactattaaagctaaatttagttgcttaggtagaaagaagtcttcccccaaaggaattttacattacaaatgttgtaacgttgtaaatagttggtaatatttttttttctttgaccttattaaggttttgtttgtaatggtgttggttgatttaataaaaatctttctatttttatcaataaataaataaa

SEQ ID NO: 79032 - DNA, 998 bp, Cannabis sativa
gatttgccaaagagtgaattcatttggtgcacgatatgctttgttattgggattgggactgggataaagaaaggcaatgagagtgaggttcattctatgtttcttcagtttagacattatggatcttccatttgagtgtagatttgcctctataaaacttatacgcagaaaggaaaattatttgtctgcctccatttttggtctcatttgtctaaaagtagtcttttcacaggcgaatgcgcaggagaaatttatgagaattaaacacgcctacaacacattgctgagttcagaatcacgtaggaaatatgattatgggaaccgtgattccgattattcctattcatcaactcaaagaagtagagtttcacaagatgaagaagagttctatggccttggtaagaactaattgttaacgtaaacttcaattgtgtataatggcatgccaaccctgtttcaatatgggatttcatctacacatgtcttgcaagtttgcccaaaatcagaaatacagtcaaaaacaaagtttgatgacctgttgtccatacatatcctcattctcatagttaggttttttgtttacaagttcttattaataacaccttcattatgcaggtaattttttgagagatgttcaaataacaataggtagatttgtctacttcacgagggcatcattccattagtcacgacccatgaacttaccttcttttacatctgactgaagatatttgttttgcctttcttatgttgagagtaatttaagtctctctggtgacagaggatttattcaaagatcttcaagaagaatttaggaactgggaagctactgcctccaaaggaaaaccaaaaagtctttgggaggaattagcagtaagaatttttatatatttttactttaacatgaaaaccataggaagttagacacggggtacctcgtatttaacatgtgagtctacactttacaggaaatcggagaagaatttgtggaatttctt

SEQ ID NO: 79033 - DNA, 3970 bp, Cannabis sativa
aaaatcatttccttaattagaaaataacttctatatataaaatattctaatatattaagcctaggtttttttaccttttcttttgtgaaaactacatcacataatttaatagtgtaaaaataccaaaataatttctataataaattggaggttatattttcagatattaaggttttattatatgtattttctgggggatttctttgtcatataagttaagtttaatgttgaagacataaattggctaaacatgctttcacttggtgcgcaatgtttgttacatttgttattttaattttattggttacccctttactttttgcattcacctcatctcagcaaccttaatgttgaagcatgttgttacttttgcttaaaattatttttagaatatcctttttttttcatcactgaatttgcaaaatttataatcactaacaatgctttttttattgtccgtgttttctgattcgttgcagctaattatagatgttaagaaagtcttaaacattttgacccacactaacttatgcacgtatcctttttcccttagttaccaatgattattttttgttggtccaaatccaaatagcagtctgaagaccacttttcataatgattttttgtgaccttttgataactatgtttaattttgttggtaaaaatgttatttattttaaatttttaaatgaagggttcaaggatggagaaagggcttgctgtggaacaggggaatttagaggagtgtttagttgtggaggaaaaagaattgtgaaggattatcaactttgtcagaatcctaatcaccacattttctgggactcttaccatctcactgaaattgcttacaaacaatttgcccatgaaatgtggacaggcccacgcactgtagttgggccttacactatgaaagacctctttcaggcccactaaacaatgtgtcttctactaattctccatgttattaacttattattttcaaatttaattataatatagaaaatatataaaataaatcctaagctatattattttcaaaaaaaaaaaaaaaaaatcctacgttatatttcgtccataaataaaatattgtgttttttttttatttaagcatttatatattaaacaatgcataacctgaaactcgaatgcatgacctctaacacatatgtgttaagagaagttagttaaagattagttatctttctgttatggttctgttacttggttgtaactctcttgtaactaatttcctcttattgctttagctggtttattgcttattgctcagtatataaaccttcactggtggcttatctcaataacacagaaattctttcttctgtcttcttctacaatctttacatggtatcagagtttgtctctgtctttcttgatctttctctgttctctctgttactcggagctttcgttcatggctgcaaatcagggttcgtctcaagcaactactccgaataatggttctcttaacaatatgcaccctcctatagccatttgagctaatcttaaatagttaaataaaatatcgcctttagtaatgaataatgagacaacacaatctcagtttgacagttttggtatttaattttaccccattagtatcttaatatttcatattgatggagaaattgaggggttttattttttaatttttttaagtatgcatacttcattagatggaatcatcaattagggtggtgtttggtcataaaataaaaatgaaaaagaaatggtagcggtaattgtaaaagtaatagaatatttttttttattcattttattatagaatcaatatctacaatgagaattattgtatttggtaatggaatgaaaattttattattttgaataaattccgttttattctattagcatgatttttcatttataaaattattattttacaaattaaataaacaaataatatatatttatgtatcaccttctaattatattttcttggatgaaattattaaataaaaaaacaaataataaaattacacataaatatttattagaagtagctatttgtttatttgatattaattaatttaatatcatccatataattttggtcatcacactctatctatataataattacgtccaattagtaaagcacggttagagtatcatttagatcagtagtagtagttactgttaattcccaataaatttataaatattagagtacttatttccatcatccatgttgaaataaggatcaatatcttaataagaatcttagaacaaatgatagctaaaggccatctctattaatgcattttctcattcttataatcaattgggattctctgtagtctattgaaacttaacaacttctcaattattttctcctctaccagagtttcctagaaaaccaacgtttaactctcccttgtgtaccaggttggtcagtacacgttaacgttctatttctttaattaactgtacaattaaaccgtttattttatttatttttacatgcgcgcgaatagaattttggtgaatgacatgatctagttgaagatcacctagattaattatgtgatcttgtaattaataataggattatatattaattattagggactcgttactgttttatttaatttgttgtaaaccttcaaaagttgaaagtttcatatgacgagctttcagagaaatttctatgcttttgaataactaaataaaattagactataagttttagtagaaacatttaattctttatccaagaagtttacggccacgaaacaatttttttttttattaattcaaagataatatagttttttaaaactgacttttgggcatgagaaactgcaactctatataaatgttcatacatgtaaatataggtacaaatctaaataagttgtaagaaattaaaagaagtcattatggcaaaatcaagctttgttatttctgttgtggttacattaattctacttgtaattccaacaaaatgttactatcctcagccattagaagatggaagtggcagcttgtttattttcggagattctttatatgatgctggaattaataactatatcaatactatagttcgggccaattattatccatatggtgaaaccttctttaagtacccatctggtagattttgtgatggccgaattattcctgattttattggtaagttacaaatttataagaaaattattagatagggttataattttctgtttttctatagagatcttttctattttttagttgaaattataattcaattatttatcatataattatactatagcgagtcattttcgaaaattttaaattataattcaatacgggtttttatttattttattcacaaatgcagttaatttttcatatttttaacttgttcagaaactttcgaaattgataagatgtctgttaaaatacatacgtttaatttgtatgcagctgagtatgctaagctacctctcattcaaccctatttgtaccctggaaatcacgactttaaatatggggtgaattttgcatcagcaggatctggtgctctgcctgaaactagacaaggaattgtaagtaaatataaacattttcttttaacaaatatgacatgggagacctgcaataataattcatgtcacaaaattaagggtaatgttctaattattattaatttcattatgtttgatcaggtgatcgatctcaaaactcaacttggttatttcaagaacgttagcaatcagcttaagcagcaaatggggtatgcaaattccaagactctgctttcaaaagcagtttacatcttcagtgttgggagcaatgattacttattccctttcgatactaacaccacagtacttaattcccacactaccgaacagtatgtgggaatggtcataggcaacataactgaagttattcaggtacttaatttatacctatatctttttgaaaacatatgctt

SEQ ID NO: 79034 - DNA, 915 bp, Cannabis sativa
  modified_base (26)..(36): a, c, t, g, unknown or other
  modified_base (65)..(71): a, c, t, g, unknown or other
  modified_base (869)..(889): a, c, t, g, unknown or other
gcataaaagacttagcaaatattgtnnnnnnnnnnntccacgtgtccctgtctggttggtccacnnnnnnngggcgaaatcaggggcaacattaagatttaaaaaactataaaacagtaactattcagtgtattagtaatcaagtagtttcttttctaaagataacgaaaaaatatatacatctcacaatttgaaatgttcatattgaaagtagattataatgatatttttttaagatcatccgtgtaacaacgtgattataaattatttttaaaatttaagagaaaaaagagaaagaatgaaggaaaaatatataaaaagaaaaagagaatattattccaataaaaatgctgtaaaatttttataaacaaaaacaaacggtgaaaaaaatgagtaaagataaaattgtaaatttgatgggataatatgtagcttatgtaaatttctctaacaattagtaattctcatgtggtgattggttggattaataagtttgacattaattttagttttcagtttattttattagatatctattctttattcgctactattggtggtggttcttgcagcactttccgcaatcagcgaatagtgttgctcacattctgacaattctgttactaatttaaaagattgtgtttggacaaatatttgtccataatttttgagttcttttgtaacagcgagtatttttaataaattttttctttatttcaaaaaaaaatatatatatatatatatgtagcttatgtaaattttgctaaaaattagtgtaaaccaaaataacagttttaagatataacacaaggctcttaattaggtcactagaagacctgacctggtgagtaggggtgttcatccgatcnnnnnnnnnnnnnnnnnnnnnaacaacatccaatccgcactaagtgc

SEQ ID NO: 79035 - DNA, 2386 bp, Cannabis sativa
ggtatttttgacaagtgttgctcaagctttgttgtatttgtaatagtttatttatttggtgatagtctaaactgcagaaatcgcattgcaccgtacaattttttgcagtgcgatttctgtggttttttagtttcacggtgcgagtgcagtttgagaaattggaaaactgcatgtgcaggttggtttgaaaaaataatcaaacactacaccacccgcaccacgaacatccctaaatatgtgtctctaagtgattttggaagacttgtcgacaaaactctattacggtgagtagggctatgatttctaggaaactatgaggaatttcttctttccaaaatgtcaccaagagtagggctatgatttctcagaaactatgataagtctaaggttttaagaatagatcagagtgtagatcccctccctatatctagatagtatgcgtatataggcctagagtttcactatttactcctccacaatttgggagaatggttccaaaataccatttctagttccgcatttacatttaataataataaataaaatatatgaaattaaatattttcttcatttgcataggtggttaagcttttgaaagtcttctagaagcttctgtctttaagagataggttgaaaatacgctgagggagcctcacccttgggaaaatacataatggacgagcactaacactaggtgtgagcttaatttgttggccatcttaagttgttttgatgacacttggaagttagtagacatttcttagggtttgagctcaaagtgcccaagaatcccctccttgctaaaccacacgagaactgacactaggaaagtgtcagtgctcatttgagttggagttattttcccaaaaacatctccaaaggggattctgccatgtactatctaaacactaacattagaagaaaccattgatcacattttctcattgtttttcatcttgggcaaccactgacacttgcaaagttccagtagtcgcgtgtcacttctctttggtatttcttatgtaatcattgacactaggtcaatgttagtggtcctgcatcacttttttcccccctcttcttatgccaccttcgactttagggtcaagtctttgatgcatgttgggttaccttccttcaagtgccactaaaacaccaccttgtgttatgatatgtgactaaggacattggaaggaactatttaccacacatctcccttgtttcttatacttgggggaatactgacacctgagaagtgagtagtcgtgtgctaacttcttttgataaggtcacactaggggagtgttagtggtcacgtatgacttcttttccccctttcttgtgcaacattaactttagggttcaagtcttcagtaaatgtgtgatttattttcttcaagtgccatttccctttacaattgtcattaatatgcaaccactgacattatggaagtgtcactgttcgtgtataacactttcctcttccatttgatgatgacatcttgccctttgtattcttttattcccaacaagttaagtattctagcccttttgtaggaattcttatcagattagggtttcaaactctttcttgaactattgaagagacaaatccttggggctaaacattattggtatgagaccactgacacttagtcagggcagtggtaacctttctcatgctatttttcacgtggcacttcgtttcttcttttcccacttggccaaagtcttctctgttgaccttcatatctacaagatacattgattaacatcattaagtacataacaatgatcactgtcaaatgagacagtatacccttggtgacaaatttgactagtgctaagtaaattagcacttactcctccaactaacatcacattttttaatctgggcaacccttcaaaattgagagttcccattccaatgacttttccagctaagccattgctaaaagtgacttccccacactgcataggcctgattttaatcaaaaagtccttgtcacctgtcatgtgtctagagcaaccactgtcaaaacaccacattttctaggcaatacttttattagaaaaatctgcaagacattttttctcaacccatttttgtttcatacctttatgtttcttttgagaattttttaaattaccaaaataatttgttttgtacatattttgcatggtgaacatttaggtctgatatgtttcttcctaccacagaaatgacaaataggtacaattttttttacctgagatcttactctttttaaaattcttggagataggggtgttcatccaatccaatccgcactattttgctcatagtgcatccgatccgcactaagtgcggattttattttttggatccaatctaatccgcacaata

SEQ ID NO: 79036 - DNA, 8922 bp, Cannabis sativa
cacccaaactcaacccaagtaggaagtagatgtcttaaaaaattaaaatataaataaaagaaaagtgttaattataattttttagaaatttttatgtttcaaatcatatattaaaataatttttttatttattttatagtggtattcactatagtaatagcattatttttgtaaatttttgataaatttcgaataacttactatatcagtaatagagtttttgatatttcagttcaccgcacatattcacaaaaatttaaacatattttcaagattgtaaattattcaggatgatattataagcataataaatgtcattgatttttttttttaaaaaaaaatattttaatatgtatttttgagaaaaataaactaaaaaattataatataagattgcctcctcaaaataaaaataaatatcatgacaaggaggaaatgaaaatccaacattccaactcgaaatcactgtgatgtataatattatcaattaacccaatttggaatttcagagtgtttgtgaatgtgaaggtgtagtttaatttaattattaaaaaaataataaaaatattgggaaaagattcaattggattggacgaacttgagttttataagaagatcgatatcaaaggccctcaacgtgagtgaagccattgctttcgatcaaggccgtacagctttctacaacacaacaactgcaaaccccaactactttcctttccgaccacctccgttatccgccggaatctctatctccggcgccatgatcgtctcttttctcagtcattaagctgtatgccacaacacagccattggttcattcctcaggtttgtgccttctcttttctctttctttgaattgagctgattcgattttgctagttttgttcatttttagggtttgatttccattttatcattttattattgataagatattcgagtggctaatggataattttgtagactatgcattgaataattttgagcaatgtataatttggtggaaaaatccttaggattatatcaatagtttgatatttttggatgcaatgcataattgataaatagataaggagttgcttaattaaagcttaccatgaccggccttatgtaatcaactcaatccctatcaatgaactttgatcaagagagggatcaactccattaaggacgtatatcgttaaattagttctgttcgaactcaaattaaataagagagtacatgaaaacaatggatgaagaatatgcttttttttttctttcccttttttccctaaattatttgttttatatatttctctgtttgataaggtttttgtacttacatattcctataactttgatcagctttgaggcgtagccgtgtctaaaacaaagttgtttagtgaagaacgataacggaaaaatggttcacagtgcctacgattcatttcagcttgttactaattgtccaacaaagattgaatccatcgaatcatatggttcgaagctccttctcgggtgctcagatggatcacttcgaatctatgctcctgaatcttccggttcagatcgttctccaacatctgattaccatactcaggtcttagagctgagaaaggagccatacgtactagagagaaatgtggtaggtttctctaagaaacctttggtatcaatggaggtcttggaatcaaaggagctccttttgtccctctcagagtcgattgcatttcacaggcttcaaaatttggagactgttgttgtactaaccaaggctaagggtgcaaatgtgtattcatgggatgatcgcagaggtttcttgtgctttgccaggcaaaagagggtctgtattttcagacatgacggtaattcaataaatgagtttttttatttttattattattatattgcagacaaattgaagataaattttgatgggctttttcagggggacgaggttttgtggaggtgaaggaatttggagttccggacacggtgaaatcgatgtcctggtgtggtgaaaatatatgtttggggattagaagagaatacatgatactcaattctaccaatggggcattgtctgagatttttccttcgggcaggctagctccacctttggtggtctccttgccttctgggcaactccttcttgggaaggtatgttttatatatgtattgattcttgcttatttttattcatatgcattattttgtaaagaaaatggtagaccctaagtaatgagaaaatgacttgtaactgtaaagctgtaagattcattgtgtggtacaagagtttttccttttatgttccctactttttttatggtgcttgtgtttgatgaaacaatatatctcgtaaggttgcaatgaaacctttcccaaaacaatttattttttggtagcaatcagggcttgtaagattattgtttttcaattgccttgctcggttcctcttaatcctatttcagcagaaagaacaagttttgttttttggttaatggtagtttgtttcttcactgtcttaggataacattggagtacttgtggaccaaaatgggaagcttcttcaagaaggcagggtttgttggtcagaggctccctcagttgtcatcattcagaagccatatgctatagctttgttaccaagatttgttgaggtagccttataatgtccccagctgcttctctttcttatttgtacaacaaatttaattcttttatgccatgtacactttgcaggttcgatctcttcggcctccatacccattgatacagactgttgtgcttagaaatgtccgtcgtcttctccgaagcaacaattctgcagttgttgcattagacaattctgtttatggtctcttcccggttcctcttggtgcacaggtatttccaaatttttaaaaattaaaatactaccaggagctttctattttctaaggggagtggttaaaggttttgtattttcatacagattgtacaattaactgcttctggtaattttgaggaagctttggcattgtgtaagctacttccaccagaagatgcaagcctaagagctgctaaagaaggatcaattcatataaggtgaataagtgggctagtgatttttgttaaagtttactgtgtgttttcctgttcttatataattattcacaaggtaatgtacttgtttctgtcatcaattcatatttggttttgtaacatatattccaatagccccttagtaattggggaaaatgaaaaggaaaaaggagagataaaatatgctcctcatctgtttaattatttgtttgaggatttcttttttttactgatattgcagatatgctcattatctttttgataatgggaattatgaggaggccatggagcattttctagcttctcaagtagatataacgtatgttctttcattatattcatcgattgttcttccaaagacatcttctgttcccgagccagagaagttgatggacatgtctttggattcctcacatctgtcaagggcttcatcagatatgtcggatgacatggaaccttatcatgcaccccatctttcagatgatgagagtgtggcactcgagtccaaaaaaatgagccataatactctcatggcactggtgaagtttttgcaaaagaagagatatagcataattgagaaggccactgctgagggaacagaagaggttgttttagatgctgttggagacaattttgcttcttatgattctagtcggtataagaaactaaacaaggtaagccaatatatttgttgtgatcaatttctcattttggtatgtgatgatacaattagatttcagataacattctcttgtgcttggtttccacactttgatagagatacaatcacaagtttgagaaagccttgtgtttctctcttgtgattgtagtattttattgatttaaaaggaaacttacattttttctcttttcattatattatgtattcatgtattttaatggtttggtgaaagtggattcaacacaggtctccaaactacttgtctttactatttattaaaattcaccgtctcacatatttattatccaattttccgtaatgatgattttggcaaattttaagtggtgggactaggaggagatgtgtaatttgggaacaaaagatttctattcattgggaggaagcttgatcactacgaagttttgtctccaaaatcttctcttcttctaattctaatataaattattttgcttagtatttgagtatcactgtttgctatatatattggtattcactgttttttttttgtctacagaaaaagttgacatataaattgattttttttatggctaatgtactattcttctgttccttaggggcgtggtaacattccctttagctctggtgctcgagagatggcagcagtacttgatacagcgttactccaagctctgcttcttactggacaatctcttgcagctttggagttattgaaaggtgttaattactgtgatgtaaaaatatgtgaggagattctccaaaaatgtaaaaactatactgctttattggagctttacaagagcaattcaatgcaccatgaagctctgaaactcttgcatcaattaatagaagattcaaaatctaatgaaagcccagctgaattaacccaaaatttcaagcctgaatctattattgaatatctcaaggtaagtcttctctttggtttcatgccttgtatgtaatcaggagctctgatctattagtataaacttatctatgcaaaggatatgaattactaagtatttatgtatatatattttaagaaatttcattgttggttgccttttgcagcctctctgtgggactgatcccatgcttgtcctagaattttcaatgcttgttctagaaagttgtccaacacagacgattgagctcttcttatcaggcaacattccagcagacttggtaaactcttatttgaagcagcatgctccaaacatgcagggcacatatttggagcttatgctttcaatgaatgaaaatgggatctctggcaacctgcaaaatgaaatggtgaacattacttcgttaattatgaagaaatttcattagctgttagttaagagccataagagttgcaatgctcacaacctcacactattaccaatcaaaacttatggcaggtacacatttatctctcagaagtccttgaatggtattcagatttaaaaactcaacaaatttgggacgagaaaacttactccccaactcgaaagaaattactgtctgcattggagagtatctcaggatataacccagagtatttgttgaaacgtctccctgttaatgctttgtatgaagaacgtgctattttgttaggaaaaatgaatcagcatgagctggccttgtctctgtatgtgcacaaggtagttcctccttttatttgttgttcatgctgtaacctaattacttgacctagtattctaatttgtcttttcccttttgattctaaatttttgatggggctttgtggcctcttttcataacatcttattatattgcatgcaggttaagatcattttatactaacttctgttcatatttcgtagcttcatgtccctgagttggctttatcctactgtgatcgtgtctatgagtcagcacttcatctaccatctgcaaagtcatctggcaatatatacctcactcttctgcaaatttatcttaatcctaagagaacaaccaaaaacttcgaaagtcgtataacaaattttgtatcgcctcagactacaagtattcctaaggttggttctgctccttcatttaaaggcagaggtcgtgcaggtaagaaaattgctgagattgagggggcagaggacattcgagtcaatcatagtagcactgacagtagcaagagtgatggagatacagatgaatttaacgaggaaggaagttctactatcatgcttgatgaggtccttgatttgttgagcaagagatgggatagaatcaatggagctcaggccctcagactcttacctagagaaactaaattgcaggtatcagtcatatgatcacagcacaatacaagctcatagatatgaagaagatgcattctctgttattagtattacagttctctttaggtcttccttttgtttaaacgcttaccctgaaggaaaatgtactattttatgcagaatttacttccattccttggacccctactcaggaaatctagcgaagctcatcgaaacttctctgtgatcaaaagtttgcgacaaagcgaaagcctgcaggtgagttttttcttttgtgggatctcggtttgggaaatgagttttaggtgtcttaatgcttactgccaagtacatggaatgtcctcactcacatctaaatttctagaagaatctgttattccctccatctctaaaatcgattatttccacgtgcaaaataggttaaagacgagctctacaaccagaggaaagcagttgtaaagattaccagtgatagcatgtgctcactctgcaacaagaaaatagggacgagtgtttttgccgtctaccccaatggtaaaacactagtacacttcgtttgcttcagggactcgcagagcatgaaagccgtgggcaaaggattgccactgagaaagagataagtgactgaaacccgttaaaacagaacccatagtattctcttctctttggttttacccaagttttgctttgcactcttctgttctgcctggatagaggccggtttgcacattgtttgggattgaggcttttgagtgattttttcttcctcacataatttttctgtaaagtttgtaatattattaatttattgattgagactcaaaaacgagcaaatattttgtatttattttaacagagtttgggcaagcttgagcatgagctgtgttgtattgtgtaatgattttttcttttattggaattcatatttggtaggagctttttcttttgtcaagtcctgaaaaattattaatcatgagagactaatcttaaatcttaaaaaacttgtaaatataacagtgactctcatgtattaacacttacaaattattattattttcttaaaaaaaaaagtgtaatagttaaatgttaaatctgattatttttattttgaacttgtacgaacctaattttctttcaaaggttaaacgacactcccaactttcgaattattttcctagtaaaattataaacgacagtctttcattacacagagtctatttttgtaaatttacttaactacccctacgacatatatagtagactaaggtagttagattgagctgagcgatgagacagaggtgtttttagatttggagagagaagatgatacgagcggtaatggtgataaacacgcagggcaagcctcgccttgctaaattctacgatgatcaggtcgatttcgatttcgatccacactctctgatttttgtaatttcttttacaatatccactcattaattttttggaattcagcctctggagaaacaacaggagcttatccgcaacatctatggaggtttttctctctgctgtaaattgattttttattttctttcggcgtataatttttctccattgatgtttgctacagttctgtgcagcagggctgaaaatgtaagcaatttcatggaggctggatcatttttcggtccggtaagtcattccgatcttcgaatttatgttgaaattagggttgcatgcagatataattttgacggtgttgactatgatgcgatcaatttattcttttagtggttggattttatttatagtatttattggtttctttgtatacatgtttaggatactcgccttgtatacaagcactttgccactctgtactttgtgtttatatttgatcggtctgaaaatgagcttgccatgcttgatttgatacaaggtgcgtctctgagcctcttcttcctcatattaacatgatattttgacactgttgtttgtggagctgtatgcaagtaaagttctaaagtttgaagatttactaattaatacatacctgctcttaattggttgcaattctgccaacacaatatgattgggcaggtacgcataaacaaaattttaaggataaatgttaagcctaatacatcaaaaaagcaaggctttcttgattatattaagacatgatttccaaaatgtctcacctaagacaattaactgacaatactgtgcctcagaaaaattctgaaaaacaacaacattgttgaaactctcttatttgagttatgttgttaaacatattggagacttagtttcacttttagagatcatgggacatagagctagtgaacattgcaagatttggtagactagtttattttttttgtttatctgagcaatcgcttatgcaattttcagtagccagtagagttggtttatcaaacactgttttctttttaatgtttaattagccgaaactgatatattttattctcgatcttgtgttcttgtttctataatttctgactttcataacttcagtatttgtggaaactttggacaaatgcttcagaaatgtttgtgagcttgacatagtgttgaactacagcaaggttaaaactctctttttttgtcttttcttctattcttaaggacaataattttgtttaataggtgtactccctttttaactgaaactaacctgtgattaatacatgaaaagaaaagaagaagaaaaataagaaatacttaataattgcccagctgagattagatttgaaccccagagaaatacatcacacccaaccatttgagccagatcctattattaatgtatgaccacttataactcaaacttgttagcttttccaaacaaataaaagaccaaattccacattgtgaacattattcttagttgatctgtgatgggatattataagagaaagggtttaatct

SEQ ID NO: 79037 - DNA, 5599 bp, Cannabis sativa
ttatttctgatctttaataataagtaaatctgattatatgaaatgagtttcatttagggcataaaacccaacaaaggcctcacaggctggacaatcatgtcctgtatatttctaatttgatacactcagttattataatgttaaaaatatgctgtgtttaacaaccgattcgtctcgtcgatatttccttatgtgtagtgaggtggatgtctcgctatacattgctcatggttaattcaaataactttacttaaaagcgaatcttgttctcgagactgtgtattctgagataggctagtgtctcgttaatacagatattaatagtctgtgtatccttgtcttgcctaagactatgcagtcagagagttatgaatatacaattattaattctatatttaatgagttgtaccttttgtattaaatgatataattgttattatatctagtggttcatattctacttgattgacacgtgtcaccctctgaagtgcagccaaattttaggtataacagaagttacctggttacttgtacatgttgcaacaaaagaatccaggtaccattgttgacattgtgacaaaggatgacttgttcaagtaatgtttttggtcattggatgcttgtagaagggggtataggttttgttgtcctgtgataagtgttgaagacccattcttgaagacagaatatggtggcacaatgttaattattgtggcgtacaatgtacacaaccaactgctttttatttcttttagaatttttgatagtgagaatcacgactcttagacgtatttcttatagaagttgagggaagcgattggagaggttgaaaatgtagtgttcgtattagataggcatcaaatcattgaacatgttatcgaggttgttttccccaatacatgcactatcaccatgttattatgaatgtgaatgccaagttcaagactaatgcatggcacaagcaaatatgaggtgtagcttactcatagtcgaagacagaatgagataagacattttgataagcttagaaagatagattttgtcatttctgcatatggttagagtatagggtttgaaaagtggactcgtctttattgtccaggtgatcgtacaacataatgacaaacaacgctactgaaagcctcaacaatgtgacaaaagaattcaagaaatattcaataactattttggttgaattcttcaagttcaaattgtagagttggttcactgagcatcttttaaaggtagagtagtgcacaacccctttagaaactacttttaaggataatttggtagcataacataaggatgctagtttcttgaacgtccaatgtaatggtatcaattaattaacattggtaggggtcctaatcgtgaaagatgtggcaatgtcaacttagttgagagaacatgtacatgtggaatttatcaattgctcaaaatcccttgtccccatgcatgcgctgtaacaatgagtcagaatgtgaatgtgtacacacttagctcctcgtattatatgaaagatacatgaaggaagactcacgatgaaataattaatcttgttagcaacaaggataattgggtactcccaaaacacatcaagaacatgagatttgaggtaccaatcgagaagaaactcataggtcgcccaggaagagaaatgtgggaagacaaaagtcgaatcgaccacaacagagtttcatacaaaacccaagtttgaagcttttatattcattagtatcttcattgtttgcattagttgtatattttctgaacttaattttctcttgtatttattagtgtattcatagattttttattattggttttgttgttttttcctcattatactaattttctaggttttttactctcttttcagactttttacgatgattaacgatatttctcaatgtagagtgatgagtttagcgatacatgttttgttagattttataaaactaaatttttatcaatttaacaatgtttctcaatgtatggggatgaatttagtgatgtttgttctatttgaatttttcacatgattttctttatttttaataaatcttagcaattaaatatcaacatgtagcagtgacatgcttcttaaaattagttatataattgaaatacttattaacaactgcctgaaattcatatctcgatattttacgatgttacgtgcgttatgtagcgatgtgttagtatacaaaatagatacagctcaatttgaccattttcacaacatttaacgatgcaacaattgatatgttgcaatttgttctttatttgaattttttaaatgactttcatcattttaacaacttttagcgattaatatatcaacatgtagtgatgtaatacttcttaaaattaattatacgattgaaatatttttaacaacgtttattaattcgtatattaatgtttagcgacatgtatgctttaataatttttaaaaataattccatgagctttaacaacattttgaaataatattaatgatgttttactatttaattagcaatgtatattagtgtacttcaaaaaaatatcaaaaaataactacaccaaagtctaattttttttacaaataactaaatcaagcctattactactcaaactaccaatttaagttctggtaaaagaggttcacaacccatcgatgtttaaacacttgcatgttatcatcaataatcttctccaaagatcatttcatcatcaggtgctcgatgttcccttggcattcatttccagtctatcgttttaatttagtttctatctcctaatgcagtaagtttggtaagagctccatcaatgttttcaaagcaatacccaaaatgttatcgatgtcacaagacatatcattatcatacaccacaatcttccacccttcgatgtccacctcgacatccacacaatgctattgaatctcaaggtgtagggtgaagtaaagaaagttgtggtccttccaacatggcaggagccactcatccatacccctgtagtagtctgagaccatatctagccatgtaaagttcttcctatcacccttgtgggccctttaaacaccaacaaagattgtggagctgaagtgtctggaatcacacctggctgagggtacgagttaggaaagagttgtcatttcttcctcatcaagttgaaacaggcttcaatatgcttcataaaattgaaaaaacccaacaattaataattatgatacattgtcagagtaaattcaagtacttgtgctatcctctacccattcctgtagtagcatcaccttcataaaccaggaatcattaggggtgctggtgtggacattactaggacaattgttcgagatggccccaatgtaaagtgaatagaaatataacattgaccgatctcaatagaactatgtccattagaagaagttacatctttttcttatactctctgtattccttcaaataggttaacttcttcctcttcctcttctgtaagtttgactttgatttaacttagataaacaatatgcctctctcagttgtttaactcatttgcattttttcttcaacgcttaatggtgaagacgaggtgctccatagtcacccagctagcttatgagcttgagttactgaggggcagagcataccaatgcataatagaggagagaggaggctaccaaagcttaagctcacgccaacaccaggatggaggccatcattaaatagagggtgactgactctttggataaagctatagtacgcaaaaagaagctaccaagactgagagagagtgcaaagataaatataaggatatacaatccaatacccttcttcaaataaaggagctagaagaaaacttgaagcaagcgaagctagatgtccaatataaagaatagaaactcaccaccctatctcaagagtatgataaacaatttggaatcataaatgataagattattaatgaaaccactctagagagaaaggtaaagcatcatatggagttgtagcagaaggtagaggaagttgagaaacaggctatccgaagggttgaggagactgcagctaagttgagttcttccaagaaagctcatgaagagtcccaaaagaagattaccgaactggaaggagaaaattcatgactgaaggagaaccttcaacaagtaatccaggagaagcaagagtaggaggccaagaccacaaaagctttggaataggcttttgtgaattcagtacatactatttgatagcataacaagtctgtgatggacctcttggatgctgaagatataaattttcttatgcctaagatccttgcagtggaggaaatgaataaggctaaggaatcaactcagaatacggaagtggtcgatcctagaactacccttcctgtgggtgaaaacttggatgactccactcttttggcttttgatgttcctttcgcaaccaattctacgatctcagagatcttgcctgatgttcaacctgaaggtactaaactgctaaaggattcaacccagtcgtagctgcatctatccactcttatcttgctttaacaacttcatatatatttttttgtcttttgggggataaaggtcacccattttgtgtgtgcggagacaatactttatatccttgttgcagggttttgaagtatgtagtacaatttgattaactctttagatatctgcattttaatccacagagtttgctaagttttaatgcttctaacctcgtgaggttctagttccaaaggcctaaacctttggatttttaattaaacgcttagaattaaatatttttctcgttaacaattcatctgtactccttagaatatggctccaatggcctaaaccttggtatcaacttgttttgaaaaaatattcaaaattgttttcacttaaaggatttttgaaacttaaataaccaattaacttgagttaattaattaatttagaattaaaccttccttggtaagtattatttgctttcaggtgtttctgaacttaaatatttaattaacttgaataaattaatttatttaagtagcctgaatatttttgttgtgttaacctgagttaatcatgaagcctaaacttctattttaagttaacctgaattaattgcataacacattaaattgattccaagtataataaggtggtggcttacttctggtttcttgagattctagtttcgagcgatactccctactcttatacttggttaaattctagattaacttcaaatataataaggtagtggcttacatctggttccttgaggttccaattttcaggtgatactccctactattatacttgtcgtttaatttagttgtatcttgtgaaagaggtatacctttataatgatataatttatgctactccccaagtgattaaaagatgagacttttgatcacttgttacatgatagaactttgaaagactagatatgaaatgaaaacttccttttttaattcagatacttcctgccctaaggtgtacatagaaattaaacactaaaataaaagcaaagaaaaaaaaaggaagttgaccacctccagtttactgatagtatcgaagcaagttgtcatcgttccatgctcttgg

SEQ ID NO: 79038 - DNA, 7045 bp, Cannabis sativa
  modified_base (6829)..(6835): a, c, t, g, unknown or other
tttaaccagcctaacttaccactaaaaaaaaaaaaaaaaaacaatttcattttaccaacctgaactatgaatgctttgaactatgaatcataatataactaagcatgaatagatgatagctttcaatttaagtgattgttttgtcatatgtgattttctagttttgactgtattttctcccactcaaaacacacacacaaaaatgacagcagagatttgggtgtgatattagcaagtactttataacataattatgtttttaaaaaaaaaaaaaatcttgaacaatgtgatgaatttttctacttaatattggcctgaatgtatcatcattacagtccctggctctatataatgcagtaactgtacaatatatttttcttcagtccaatggatacttgtaactagtaaaatgacagaaaagttgataaacatgcattgtgagctctcagtaagagaactagcagaatcccattaaaacaaaagaacgaaaattggattgacaaaagattcatacatggaaaaattgcatggattatctcttcatacttgtgaaactaaaatcagaacttaccagtgatgcagattaagactatacatacaccattttgtttacgagaatatactgctgaagaatcccctgaaataaaaaagaaagaaaagaaaaaaggttggatcaacaaccctagactaattagtctaagcatatataatatttaatatcacatcagaaaaaaattcttaccaaattccagcctctttcttgttttgatctctgcatttgttaaagttgaaacaaaatagctcagttaaatagatcaaatgttttatattgatgcaagctgttctttatcagataagtagagtagtggaatatgatccaaacattttcatttttgatgaaataagaaaggtgatccttaaatgtatgttacctggttattcctaggaatgcatcattaatttcatcagaacttggtctctgagggaatgttgacaagataacatacttctccttcccagaaggttcatccaccctcttgtacagttcgtatcgataaggataagccatcctgaaacgtgaggtttgaaatgagagtatttatggctttttggttagaattttacaaatgacagaaccaaaatcaacagtagtggcataacaaactggctttaaggtatttgagcaaacctgagagcacccataattgggtattgggttcctgcataatagagaagccgaaagacatagcaaatctcaaatgaggcagcatactccaatctcttgtcacggcccattgtcttgagaagcaagtaaaataagtagaaactcagatatcgaaaaaatttgtgtttattgtaacaaacttgttcaaactcattggctccacacttacttgcattattccacttgaaccaggtaaatcctgaatatcaaaaaattcattaatgatttaactgacaagattcactttaagaaaaaaaaaaaggtgttgcgaaatatgaaggtattctgtagcttgggcttgaactaaactgattttggtattctgaagattacactaagttatacttgagatggattgaataaaatatttagtaaaaacacatttgtaaggtaggtttttaatccattagaaaggtattaatacgaattctccaatagcagctcctcctgttttctacttctgttatttttctggcttcttctggaatttttcctttaaggtggcatcagacccttctcaaaggatctctacatgacatggtcatgaatttctcttctgtactctttacattttaaaatttacgaggtcaaaatagcatattgaaatgacaatagatgtatgactctttacagctaataagtttcactaagttgtgtacacatgaattttgatgcatgcaatgctaaaatactcggtcaaatgacaaaatcacacaatgttgcttggtcattagcttatgtacgcaataagatatagaaagacaggtacaaaaccttgagccgaggatttatcagaacaactggccggtccccagcagcagtagtcattgcttgtagatcctgcatgaacaaacacaaaactgttggagacagaggtcgagctacaagagtcaagtacattatccccttgaatagcatcgaaaactttgccattctaacctacttacctcaattatacagtttcctacagcattttgaggagccaccagaataaatatgtcatcttgctcatccacttccttagcacctggacactttcaaatatagaaaactaaggatattcacgaaaatacgaagattcgcaacaagttgagcatacttacaaaccaattttgttggttggtgtatggttattctatattgtgtgtttcaatgacacaacacccagatttatgaaggtagtgaacaaaatttgataattcattattccctcaaatgaatttataaaataaatccatgactcgtttaccgaaagatatttgactataatcaatatgaaagtaaatttaacacatgaaaactgtttgtatatacctatggatccaatattgataaatgttcccattgcaccatattcaccccagtccatgaactctaagatctttctagtaccagcaagctgcaatggcattcctgcaagggcaccttcccccatagacccttggacacaaaccttcaagagaaaattgcatgattgacatactgttttaaagccactaatcaatgatagaagcagcatctagtcagttaccttaacgcgttttccatcatctgcaaaagaaagagcaatgacccgaacaagttccattaaggtacctattcgataaacatcctgtgcaccagcatatcataagatgtgattagttatttacaaattctgaagaagttaaaaaaatttaaaataaaataaaatctcaccatttctgggtttagttctggaatattaatctccacctgtcaaaagatgaaccaagatcttattacaactacagtattcttagtgagtaatacatttaacaagtaaacttatacttagtgagctttctacgtttgtcgtaaggacgttgccacttaataacaaacctttattcgagttcttccatcatttatagctctctgtgtggcttgtaacacatcatcatagaaatattttcttatttctctggaatgaggaatgttattcaatctagtaggaatgcccctccagttatcctgcaaaaagctacataacaataagaaataatataactgaaaatatttatcacaattttccacaagagaaaattaagtaaacaatgaacaaataaaccagaattaactaaacattgtataaccataaacctgacttgtagatggctccttcaagtggttaccacttccaagtgatggtttctctggtgaagacaggaagtaacaagaaaattagaaaaggtagaatatccaccataaaaaaaattatctcctcaaaccaccagaagtccaatacttacttctagtaaaggcaaagatagtatttaaaacaatggttgaaagattctattaaagaaaaaaaggtctatacatgctttcgaagcaattctataacgttgtgctaagaattattctgttaattggttaatgcagcaaaatagaagaacactagctgatattgaatacgagggatttcaagagtcgtgttctctcccacttgggttaatgtggtaacaattgataataacagagaaaatagaagaacactagctgatattgaattcttcacattagctaataacactagaagaacatttgggttacaacctttttaccaaattcttcacaccccaaaaatgaactatttattcaactcttatggtgtactctatatcccagccacactctaacatcacccctttaacaaactctctgccgctaagagaaagtctatcactttgattattgactaaagtttgaaaagctgaagtgaactgatctagaccaaaaattaatagataagctttttgatacattaaaagaaggtttataaaacatctttaaggatttcaaactgatatgttgggggcaaacttgcattataaactttagaaggtaaaatatcttacctaactttgttgtcttttctttatccttctgcactagtgatagcaaagcatctatctctgcaaaaacttcttcttttgaacggtttccattaatctgtttatcagatataatttaaacataaaagttgtttgtgcacatttaaaaatataagataagaaaaaagaagcacataactatatttcagcacctacctacctttttcattatgtctgaataagtcgatgaaattgcttctgcattttgtttgtatatttcaagccgcgactttacctggatagaagttagaaaaccgaatcagaaaagctaaataccaaagaatttatcaagcaaaattacttttatttccatgagatttaagtagactccatcaaagcattatatgtatggtgaattaactatcatttaaagcagcacttaatttgatttatcattctctactcaaccagatatctttgccttaagtaatagtaagttaaaagtttgacacattggaatgcaagtcataacagtacatgttgctcatttgaaagaccctattcaagtatggcctttgtgatgtgaaaccataccttttcctcagtatcatctggacgggtaacaagtctcgcgctaatttcctcactctccggagggaaactcttgagatggtaaattttctttgtcactgggtccagccttcttccaatgcatctgtcgattagagtttcatcaggaacctgaatattaaaaagttacatcttgtaaaattgaacatattggacccttagtttaacatgactatatgagatagtggaaaatatgaaaaaacaagtaaaacccactttcatttatgtatcaaaactttgtcaaaattttaatgctacatatacatatcatacaatattttggcctggtagattccacaaataaaaaccaccctttacaaggaattgcagacaagtgaatttagtttaaaatcatcgcattccataattaggaatcaaacaatagaacacatgtgcacacggataacatacatctaaaacgatataaacatctggcctaatcttcattttctccaaactctgtgcttggttgaaacttcttggatatccatcaagaagccacccttttgttttagtatcttcacgagataatctcgatgttaccatctacatgacaaagaaattcggttgactttatgttgaagaaaaaaaataatacagtaaataatctatgtgatttcaaatgttgatattatacagctgtgacaatctcatcaggaaccagacgaccagaattcatgtactcttttgctttgttcccaatttctgtctcagatgacacttcagctcttagaagatctcctgttgatatgtgtaccaatccaaactgaataacaaagaaacaagtacggaataaccaagaatccaaacatataaaaaatccaaatacttacaatatgtttggtagaggggagaggaggagggagggagagggatagaggaatggatgaattccttgtttggcaaaaaatgaattcccaaatattccattttctcatgtttgattgaatcaataaattaggaactgttttttccagaaaactcaaatttaatataattgtataatattctaagcataaacaaaagaggtgctctgatcaaatttttgaaaaacattttccttcaatttttcctcataaatttttcaatgctaaaaagggttcaaacaagagcttgaaaataacagaattgggttctcgattatatataatttaattggtgacggcctaaaagtctatatccaaaaaccaaaaaaaaaaaaaaacaagcttgaactgaacactttaagattttagatgattagccaacctgatttacaattaactcgcattgggttcctttgcctgatgctggtgcacccgatatcatcactttcaatggctcattgaccgaacagctcacttttaaggactgcccaacgtaaacccaaaaatttaaacagttaaagttacgattttgaagcgttcaaaatgatgagaaaccgtgtaaaagaaaactaaccttggatttggagctagttctgaaatgggtattggtgtagagaaggagagagcaaggcctgtaagatggctgaaaggagagaattgaagaagaagaggaggaggagcaagagtgagaagatagtgaggaaagaggagagagtgagggagttgaagggaccacattggcagaatgaataggagagactgaggaagccaccattgttgagcttatgctctctctacgattgtctctgttttagagagagagagagagagagagagagagcttgaagcaggtgtggtgtggctcattccaacggataaacggacaccacttattctcaagcatacaaaagctctatttcattcttcaattattgatattttgttctagccaaaaaaaaaaaaaaaaagaattattgttatttgtaattataaacttaaataatttttaaattttttttttttttaaattttttcctcacaccattacatattaattttaatacttattttgattttatttttaaaaaataaaattactcatgtatatattttttattttttttaaaaaaatcataaatttttttgttataatatttaaatataatttatttttatttgataagtatattttttaagaatataaattgaaaaaaaaaatttaagaattaatttaattaaaaatataaattttnnnnnnnataaaaattattaaaataaggtgtttttgaaaatttttgaaatataaataaaatttccttaaatcaaaaacgccaattacaattttcaccacgtgacatataccaaagcctctcaactttactattaaaaattgagataaggtcaggaatagttattatatgtcaatcaaatctacttttatattaaatttaattgaaaaagattttttt

SEQ ID NO: 79039 - DNA, 4431 bp, Cannabis sativa
  modified_base (1277)..(1281): a, c, t, g, unknown or other
  modified_base (2898)..(2903): a, c, t, g, unknown or other
tttttcacaggactactgactgtcacaggttgagcgacctatcttgataagggaagttgttgaggaggttgcacgtcctatcatataggtcgttattgggaaaggcaagaggattgccaaagaagggttagaggcgaactctttgaatgacgatgccccatcattcttgatccgggaaggtgcttctccgaatatccaaggtagaattttcataatactttttacttgcctttcattatattcttttataaatatacaccaagtgtttttgtctatacattcatgtctttcaagatagaggccatgctgtagaggaaggctagaagttcttccgagcagaaaagtccaaacaaagtgcagaggaaggatgagaaaacttcttctagcaaaactcttttcaagattccacctctagctcctccgactagcaaagacaatgtgatgataattgatgctacccatcctacaacgactactccgatcccagcccagaagaatgttcgacctcctcctaccctactgagcaagagataaaaaagacaaggagcttgcccctgtttcccctaagatggaaaaggcaaaggaggcaatcacttgttaaaaggaccatgttcaacccgagcagaacaagatgttgaaagggtcagactcaatccccattgaatttttagctactggcctcctaaaggataatactaaggtaattttttgttcttgcttcaaattcaatttgagttatgctatgctggtcttataaatttttcttgttatgtttagatgaatctttagctcggggatctgtattctcgcaccaaggccatggcagtccactactgacaagtatgaattggagaaggtctaaggccaagtctgttagggtttatgccttgaaaagcctataaagacatttttgattactaataaatacttgaacattttgatatatgcatgaatgttaaattattaatatttaattattattgataatttatataaatatctaaaaaaaaattcgtattcatatatgaggctgtgacttgtagttgtacagagaaataagatcatttggctatcaacatattaaagttatggaatctttaattaatggttgctagtatgttcattgatgtccgttcttcagagcaagtaatctcagttcggattactgtagtatgacatctaagtaaaggtattgtatataataaagattatatatgacaaggacagatatgtataaagttgtctttatcaaatatgtcatttactataaagacctnnnnnatatcataacgatgatcaatagtatattgacctaaatcctgagtaattatgaacttatgttcatgttattagtttttttgattcactagttaaagtttctcaaagaaaatgattcttacaacttcttttttgagaatctaataatatagatggctggaaacatgatctataattatgaaatcctgactttcctaacggattgaatgttggttccctttaagtcttaattctgaaactaaaaagttgtgaacaaatttagatgggatctaaattatacttttactaatgaattaatggtactaaaggataaaattgtaattaaatagataaaatggtaatttaacaaaaactaattacgaaccgacataaggagggctaatcactgcaattaattatatcaatggacactgcaatataacttagtaaatataattatataatcactaagagttcaatttcatatttatagtggagtgatcatggaagtaataaatatgattatttggttgatgagactcaataaataatatagtttattggagcttaaaattataggtctatggtacctgaattgccatattaaaacactatcaagggaaaggataaagagatgtataatagtaattatttttttaagaaataatttttttttttagacaatcagctcctttgtattcatttccaaacatgtttacaacctaacaccatttgtatgacaatctatgtgtatatatctatgtataattacaataatacaaaccaattctatctttttttctccatttctttgacaaaattacatcaatcctcaatttcacctcttgtttgattcggtgcactactactgctgtaagactgagatttttgcaccaaaataaataattttttaaatcaattaaataggaaaaagacaaaagttgttaagacaaaatttgtcaagacaagaattattaagacaaaaattatcagggcaaaagataccatccatgtcttcattgagacaaggtagccgcctatcctatcgtagggtataggttttatcttttcgggtgaattgataatttaattaagattaatatttaatttttaatagtggttaaaaatatttcaagttggttgagatattctctcaaaggtagttgagagattctctcatatgaaatatcagttaccgaattcagttataaatatttatttaaataatttgatatatttacttaatggagaattgactactatataaatagaagcctaatttgagaaatcagaagaagctttttacattgtaattttcaaaattgattgggagaaaaggaaaattaattttctctctcaaatagtttttgcttatgtgttgagagttttttaggaacaaattatacactttatcctaaaagcccacactattccttttatgtggtggattgatttggaagattacggtgtgagtttctaatcaacccaaaaaggattcaacttacgagaagttttggagatataccctgatagtcattaagagatactacatatatattcatttcttatcatctgtgttttgatttaatgtttagccatcaagaggtattgccacacagattttttttttcaaaaatactnnnnnnttataaaacaaccgtaaaataataaaatagaataattaaaaaataacagtagaacaacagtgaaaattcaacacagtacacagtttttgaaaaaattctgctccacaataaaaaagaaaaaaagtacaaaatttcaaaaatcactttatttaatcagatacacaaaacacatacacacatacatcactgtgtgtaactttattttactcaatatatattacatattttctaatacgagaggggccaacataaggctagctaaactcaaacgataacaagagatatttatatgaatgagagattgagttttggtggcataatgtgaatccttttccaatttccaactttgttatgagcataaagagaaagctcattcatgataaaatgtttggagggacgttctcgacgactaaagtgacacatattcagtgaacaatttacgcccgttgattttaaatgaggaaaatcatgtggtggcgcctttggaagtcttctcatgatcaaattctttttattagatgctaatccatctaacttcaaaggaatatagatcgctttgccaatatcatcaagcaattcaacctctgaatcaaatcgattcgaagagttgaagaacatttgaaatacttttaagcaagagaggtgcaaaaccctaacatctctaggaagattattattgatgtcatcatcatcatcgtcgtcgttgtcaatcaaaacatgctcaagtaattctttcttctttttatttagtatctcttgcacgtactcgattgcttcttcgatctctacctcgggattgttcttcaagtacactgtaattgagtttggtttgccctcatttttttctttctgtattattatttaagtaaacacacataaataaatcaataatattctaacacactcgatatcttgtttgaaaagtgttgtagtctacaaaattatgcaaaatatattttttaaacaaaatctatttattttcatcgattactctaacttcacttacctcataactttgtatgtcattcaacaaacgacaaataatcataaccaatttagtaacgatggcatactccgttgattgtaattgggatatttttaagcttggctttagaaaatatgaagctggaagaagcaaggtgtgagttgctatagaagtcattccaactttaaaatattcatccatggttggtataatcccacttttactccatttagattcagtaagccatgaaacaattgtttcataccactacacacatgaagataacaaaatattaattaaataaataaaaaaaattgaatgaatatataatttattttttattagagtaatttgcgacaatacttaaatttaactttcggttgtagataaatatttaagtttaatttttgacagtcataatacctaagttatatttatggaatttccgtatcgacttgatcgttaagtgtcaaatcaatagccacgtgacaatctttgattggtctaggtcattaatttttttatttaaaaattaattcaaat

SEQ ID NO: 79040 - DNA, 7627 bp, Cannabis sativa
taacttcaactagtatatatatatatatatttgcaatagaaattaataatacaaatttcttttttcaagatacatttctccttattatccatacaattctccaaacaatagaaaaaacgaaattggcaattttatccctcaaaattaaatgtcatttaaaaacaaaaaaaataaatcaatataaaaataattcatttctcaatataactattgaaaacagtcaccaaacttattataaacggtcaaaagtaaaaaattaacgtgaaactatagtaaataaaatttgtctttatgtgagggatctcacacttcaaatgaaaagtgagggattacataaatccccatgtttattattattattattattatttgtatagattgaaacgacgtcgtgagagaaggatgactgaattccaaaatttgagccctattatgaggcaatgtactatgtaatcttctacgctgcaaatgtagagttgtggactggtttccctcttcttcttaatatctcttcttctgtctgtttaagcagtgagcgcaaccaccacccgccaccgccatgaaagaagaccaaggggagcatgcccaacaagattcttctcccatagacagcagtaccaagcgaaagctcgacgacaacatcctcctcgccaagcagaaagctcaagaaatcgccgcccgactcgtcagtaatgctgagtcaaagcgccctcgactcgacacagatgattccaactcctctgaacctctcccatactctgactctctatcctccaaccctccctttcctggtaatatatttctagggattctttttaaatctcttttactctaatttatttgcacgttaaaaatttagccttatattagattgagcttcatatatttttcttaattactttaactttacccgttcattcaaaataatttttgtggattttgtttttgggttccatgtttggtcgtttgaaatcatttcactctgggatttaccactaaattattgaagtttatgtatgccaaatatgattgaagaatatctttaggggaaaagacaaaaaagaaaaaaaaaatatatagatttcattcatatttattttataatttaggaaggtaatactgttgaagcaataaagcttttaatgatttcagtttgttaaaccgacctaagctgacctttcacaactttggttcagttccttttgttgctcaaacaggacaatatcaggcttctcaaggaccgggcaagaaaataagtattccaaatggcaaggtaatttgtcaccatctagttgctctgctaactcattattatcatgatattgcttagagtttgattctgtggaattctgttacgcaggtggggctcattattgggaaaggaggagaaacaattaaatatctgcaaagtcagtcaggagcaaagattcagattactagggactcggaggctgatccttattctctctcaagagacgtggaattgacggggacatccgaacagattagtagagcagaacaacttattaatgatgtgatatcacaggtatagtaatgctttctgcattgatgttattgtttgatgatcaaaatggtctgctcgctacaatttggttcacaacattgttggaacagacagatacagggaactctgctccatcagcaaatcagggagggaacccagttcagcctggagcaggacagtttatcatgaaagttcctaacaacaaggtacaaagaacctcccatggcttataagctactaatactttttttttttccgaaagatagttcatcgccatttgtcacagcaccatctgctaaaatctggtgtgtcttttattgaagaagtttagagtagtaatcttaatttacattgctgattgttgtaggttgcgttgctcattggcaagggtggcgagactataaggaatatgcaaagcaagtcaggagctcgtattcaggttttgaaattttgaggcaataaacaattgcatagattcttagaccttttagcttcatttgttgttgtggttatttttttccgttaagattgtcagttttctatgttgagaaaaagttaagcagtagttatgtcactggaatgcctcaatatagttggcgaaagtgtcactgtcaaaatggatatgttaatcacttcaaattcactttgttggcacttatgcacacattttggaaattgaattgtctattggggaaggctatgtgtgtcaatgtttctatattacacaatgtggtggttgttgatcatttgtaatcctttcagattgtaccattgcatcttcctcctggggatacctcaacagagagaaatgtgtatatagatggatcagaagaacaaattgattcagctaaagaattggtcaatgaagtaattagtggggtgagtccacaaatgatccattggatacttttatgatatacaacactatttatttcaaataatattttatatttcagtctttttcagtattctgtgacattgagaaaaattatttgtgatatggttaaagatttatatgctaatatcagcagattatgttactcttggtttagctgtttttagtcaaattgctcagcatatggcaagcgtttccatttttgtttgcattgatggacggaaaagcataaaattaatataaaaatttcttttcactaaagcaaattatatttacttattatacctacgctatatatagttgattttgtattataatattactgtttccaatacaaatgaaagagtgcatgaagcagatacatcacacgctcacaaaaaaaaaaacctttagatgcgccattaagttggtttcaatgtttttaattacatatctcacgttagtgataattcctgcagaaacgcttggtgaatcctcctggagcaaataactacatgcagccagcttaccctgctggtggaaattggggtgcacctccagtgcagcaacaacctcagtatgggtatgcacagtctggaagctatgtacaacctcctgcacctgcctcgtactacagtaactatgctacctcagcgccgggttgggatcagtcaaaccagtcaactcaacaacctcagcagagcagtggatatgactattatggacaacaagctcaggttggctctgctccatcaaatcctagttacagctacaatcagaatccacacgggagccatggttatgaccagagctactcacagcagccgtcaaactatgaccaaaatgtctcaagtcaggtcccgatttctgatcagcctaatccatatgtgagctcagcatatggaccacctcctgtggcatcaaactatgatggaacatcttcttctcaaactgctcacccaggaccaacatataatcctcagactggttactggtcttacccaggcaacacaagccaacagccagtttatgatcaaagttattaccaggcttacggaggtcagctagtttctgatgctggccacccaggctatggcgaggcaggatatactcaattagccccaacacaagcaagttatgtgcaaccaactaattcccctggtcagggaggacagaaacttgagcaacaatcccaggaacagctagcaacaaatggatttgcacactcatcaatccatggagctcaaagagaaggtgatggaaattcagatggagttggctcagctcctactgcacaggaaagtaccgatgctcaaacatagttggtggtggttaagaatgttctctaatgtagtgcttcatttgtgatttacttttggtaatactctcatataccttgcgtaaattgattgccttggccattatcccaaatcaggcagaagaggtaatggatgatttttaaccgatcaaaccatctttggaggtagtactctgaagattgaatttgatacttcttttgagctttcatccactttttctcttatttttaacagattatattaggtctatgaaaacttgaatgatgaatgcatctttaatgcaactggtacctttttgtatgcctagactttcttattagaaaagcaaatgctaattttcatttaaggctgttggactagaagcagtgaaactatgactttcaaaactcttgcgcatgcacactaaataagagattgaacaaacaagtagtgcattttgaatattttttttcattctaatcttcatcacaataattattgtgggcaattgtttctcccataaaagattgctctatgcgttttttttttcttcatatcataatatttttctgaaattggtaactgggaggtagacacaaaaaaagaaaaacaataccaaatacagattgctgtttaacttatgatacatttttgagtaacagtaacacaattttaggtttacttatgccacaagtagaagtgggaaataatagaacacataaatgccccatagacgtggcagaacagtgacttaaaaaaaatagtaacagcctgttactaacaggagaagcaggtcaatagtaaaagaaaccgcaagcagaaagacagttggaaggcaggagtctcacttagttcgacattgcaaacctaagactccttcagtacaatgaaagtactgaaaacctttaagcctttccacatatctgaagacgagacatataagatgcagtaaaaattttaggggcaagcgttggaagcctagtttctcacagtcacattgcataaacaatctctccgctgctgtcgatgtctagttcaggatctgtgtccaaatcatcatccatgtcgtcgtcaatgtccagactaccagtaaggtactggtcgaggctgttggcaccagctgcgggtaatgtggcctcagaaatgatctgcattatttcatcaatactttgcattggttgatcggcttcatcgaactggttgttcgtattctcatctatgagatctgctggaagattcttcagaaaccactcgtggtttctgatctcaggaatggttatcctctgttgcaaagtaacatccaacgaaacttgaattagaaggaccatctcctatttgagagttaaaatagaataaggagagcaacctatttctcctttgaaatcaaccaatctttatctttcattattttctatgagaggtgacaaagatcagtaaaagaaatcctaccatgcattaccaggagtcataccatttcaaaattccaagtgaatttgggaatacagaaagaaacctaaggagacaaataaccaatattactcgagcaatatataaacaactacacaattactacgctgacctttgcagggtcagctacaaaaatccttgagatcagatgacgacattctggagatatatgaacatagtcaggtactgagtactgaacattcaagattcgctgcacaaacatatctcagttcaggtgaaggaaagtagtaaagttaagaattacatttataacttttgagcacttaaacttacatgtattgtcttgcggaaatttttaggctcctctgggtcctcaaaagggtatgcacccaccaacatgacatataaagtcaccccacaagaccatacatcagcaatctggttgggatgatgaaaacaaacaatgccaaaacattataatcaccatttaacgaaggtcaagtccatagtattcagagaaacagagggaggcctttataagagtagagtaatataacacaccctttgggggcatagccatactacttattgaatcattttattcagcaaatgaaaattccaatgcaggaactcctacacccatcaaatgtccatttttctaggttatccaaactaaagtagaaaagaaagctgactactagtttaaaaaaataaataaatatcagattcaatctgattgtgtagccaggagcctgtgggacaatcttttgaggcccgttttctgaaggtatcaacaagagccaagtgcttgagatcatggcaagaaaatgcacaagaaacttagaaaggatgagtaattttaaaacttactctagtcttccaatccaaatgcctttaaaaaaataatactcttcaaatagggaatgctcccaacagatcaaaaataaaattaccttgccatcatattctttcttaagtaacacttcaggcgcaatgtacgcaggggtaccaacagttgattttggttgtgaatgcagcactgaggactgagaaaccaaaatagaatctgattagatgtcattgactattagtacaaaccaacattaacagagaatcacaatgttaatgaacaaatattacacgcagaaagaagtaggtagttccatgaaattgcttctaaccagaaggaaatagcatcaacaagaaaaatgtatttcaccatgcatgagcatagtcacccttaccaccttataatgttttacttgaaaatgttctttcaagcataaactgcaaagacttaagtaaatacatagctctagtgaacattacagtaaaatataattaattaatacctttgagtatccaaagtcacaaatcttcaaacgtggagctgggcttccatccaacaaagtgttctccaatttcagatcacgatggcatacttgcttaattgtaagagcaacataggacaagtcatcttctgggtggattgataactcaagaaaaaattccattaaagaaagaaaagaaagacagctttcaaataccattgcgtgacagtagctaactcctgatataagctgttggaagaagaagcgtgcctgcagcccaagacaacatacattagaaagaagtcgtggctgctgctggaaacaaaaacaatgaactggataggaacctcatcctcactgaatctcccagcgttgcatattcgctcaaatagctctccgccagatgcatattccattacaatggctagatgagttggtgttaagatgacctacatacatatagacaattgttaaaaggaaacttccataaagaggctcatttgtgataacacatttaataagcttacctctttgaaccggacaatgttgggatgcctcaatgacctgtgatttatgatttccctccgtacattttcatcaatctgttacacacagttaacaagtaggtaaataattacgactaaatgaagaatgaatagaattactgactaaaagcattgaagtcagtcactggcctacaacatagagaccgatgagcattcggcaagtagtgtccattacatgccatgtcaacataataggaaaccatcaggcctcagctgtattgactgatcacatgacataatgtcctgcctatattgctatatcacgaataactacaattaatataaactttgaaagctcttccaattatgagtcaaaaaattgtcatttcaataggattgtgaccagcagagttattaacaatttttgtatgtagaggagctttcaagtatagaaagcatatttgtgcgggattgaaatctattaaagaaaggaaatgtgtattgtgtgttgtgtcccacattgctcatgtgtgagtgatttgtaagatttatactacactcgtagctagcaagacttaccctttgtttggcaagaaggacagaatgagttagtgattgattgtatatgaggtgtagaaagataagagaaggggatggatttggtg

SEQ ID NO: 79041 - DNA, 2573 bp, Cannabis sativa
atataataatataattcctccattatacataattatctagttagggttttgctaatctatttcttaattccgggtattacaagacatgttaaccaagtatgtccctctagtaaagttcagactttgtctgaacttgctaaacatactcgaatgttgagttatcaaagtctagaacaactcttgtttgacagggttatgcaattcaaatgtaaggccaaaggtggatgaattgttgttttgggccccacattggaataacctatgaatctttctttcaattcctaagctcgggtacgtcctaacagtcataactatttttctattatgacagttatgacatcaacaacctatgtccaagctctataaatagaactctctctcattcgagctcaatgtccaaaaattcagagtgtgtgctatcaagaaagattcagagagagtaagagagatgttctcttcttgtagctgaaggatagcttcattcgagtgcctatgaactgttcataacagttccttgatgtaattctggtgtactctttgtatcaataaagatcacgaccctaagggatgtttctggccgtggaataggcacaataacaagttgttattgctgttcgaaccacgtaatatctgtctcaattctcttcctttatgtttgtttgatttactctaattgctattgcatttgatccacattttctgtgtttaattctatctctgctattgtgctttgttttgggttcttggccgagtttccttcaacaatacaaaatttagttgtttagctgctctattctaacatttcacatttttaaattcaaaatgacccattttcaaatcgaaagaaatacataagatattgtaaccatggtgttagtttactaatcattttatgcataattataattaatagaagaaaaaaaaactttaatgtataagaataatatatgtattaaaaacgaatctcaacctcatttatctgaatgtttcttttacttagttagaaacaatgaaaacccaaaaagaaaccaatgtgagagtgggatttatattatgagtgttgggtctgagcgaaaggtaggagttttaggaatagagggaaaaagggcaggtttggtgatttactttttgggagaactgatgtcgctctttgggcgagacaaaatgcttggccaattttttttcaaacaataaaataaaaaataatagaatgaatatgtaaaacaaaattaaatttaaaataaattacatataatgacccaaaatacattttatctcttgtgtagtaagacatggtatataatatattttttttaatggtggtatataatattttatgactctcattagaaaacttgaaatatactctacaaaactttaattgtaagtcattaaaaagagacattaaatagttagattgttgtagtgtgaaattagagaattatggatttaaacccttacgtacgtttgttcagtgtaaggtgtgaatgatctttcccatgctacattaaattcgtgtacaatgtttttatatcctcaagtagtgtgttacactctgccagtcttctcatactctcctctgtgtcgaattcaatcacggagaggaaaagacaaaagatatctgttgtccagctaatacctaccggagataattaatttgtcattacttttttaaaataataaacttcgggagtaattaaggtggcgtgtcccataaaatacgtggatcttattgtcatctagctcgctcctgaactgccacgtattttaaaagaagttttaggcaaaattagtaataattgatttgataatcactatatatagagataaactattaaaaacttacagatctaatcttttttcagaaatatttatttatggacgtcctaaaaatatatgcatcccacatactctctaacaaactcatcaaatttaatatttatttctaaattaaattttctataaatatcatcataattacaaaataattaaaacattcatagttgtcatgtgtggtcaaaatatttaccaaaaattaagcatcatcacaacctgcacataaaaattatgaacaaattcattcacaaacactatatatataacaaattgtaggcctatatataattttcatctccaaaaaaaaaaaataaaaataagaacaatggcattgaaggtgatgctttttgttgcaggagtagttttggctttacaggtgattacaagctctgctgcaccgagcatcattccagcagatggctcaaagttggatagttggattgagcacaacatacaagcccatgagaaggaaaaggacgataaagcccttgacaaggttctagcgacagcacaagcctcctctaaggtgatcaaggtcagcctagatggaaagggagatttcaagtcgatcacagatgctgttaaaagtattcctgcggggaacactgctagggtcataatctcgattgctggtggggtttacaatgagcatatattggtggaaaggaccaaaccctttgtcacatttttgggggataaaggcaatatgcctgtaatcacttttgatggcacagcgg

SEQ ID NO: 79042 - DNA, 4503 bp, Cannabis sativa
ttttaacgaccaaaaaagttcaagggacatgatttagtacatgtcaaagttcgggggaaaaaatttctaattagccaaaaaaatatgtattgatacactttttattattttagtatttaaaaaaaataaaaaaatagattaaatttttgaatttattttttaacatattaaaattttaaatttgttaaaattttataaattatcttacataattatagtttacacgaccacaaaaaaaaaatttgattaaaaaattcaaaagccataaatgtgcatcaattactttagtatacaatatcaagcaactaagtattctattacactatacttttttttaattcatttcttgtcttttgtaaaatgtccaatattacatatattatcaaacacaattttttttaatttagtttatttgtgaagaattatttattagtttttatgattttataaaatgcttctagatttaaattaaaaattaaaatatatattataacaaacaattcaatttaaaaagttaaattttggaaaaattaccatacatactattttttttttaatttacaatttgggttgctctgctagtttctacggtagtttctatgtgggttgttatacgaattttgattgagatcgatttaggtcgcattgttagttgctataggaatttttttgtgaaattttgtaaaaaatacaaaaaaaaatatatattttgaaagtgtaaaaaaaaaaaaacatctaaattttatagatatactgtgataaatacattatcaagttttcataaaacagtaagtagtacttagtcttttagatttaaaaaatttctaggaaaagaaaattttaaaaactatcattccttgtaaattttaaagattaagttttatttgaatagtctctattagaatgaattgagtatgaattatattgcaacaaaaaaattatttcaatccaaatttattgatattgttgtgtaaaatttaaaattgtacgttcaaatggtatttattaaagtacgacggcacaaatcttattcaactagtttaagtgtttaagataagtaactatattttataatttttattcattccaccaaaaaaaaattatattttataaaaaaaaaaaaactgaatatatttaatttgtgttgacggtactcttcttcttcttcttcttctttaaaagttttttagggataaatatcattcaatagaaaaaagagaaagtacatgtttttttttataggtcttgcaaagattagattgtacaaatctcacaaaaacgacaaaaagaaaatgagctctttactataccaattgtattgtaagtgtaaattttagaagcttaaggtaagtaaatagattacctacaaataaacagataatttataattgttaatattggactgtggagaaagatctttacctacaattattattcttaatattatgttgtaaataaatttgataggtcccacttatgtgccttttagtagggccggcctgagttaatttaggccctaaaaaataatttttttggatttttttttacaaaagtaaataatattttaaaatattattaaaaaaaatatgtatatttattaaacatgtgttagtttagggtcaaacatgccttttaatcacaataaaatttgtctaaaaaatttgttttagtgtaaaatagtattacaataccctaattaataaaaagttcagctagattatgaatcattaattaaatatattattcaagaaaggaaaaaaaagagagtgagtttaaataataaaaatattcgatttaaatcatagatttttgtgaatgtaattcttctttttctcaaaggtggccgaatatatcttttctcttaactaatatttaaattttaaattttaaaaagttgttgtaaacttattgtttctctttcatttatttgtttaattttgttgagaaaattgcccatttttaatctctatgttgtacgtgtttctcttaattataaaaaatattttaaaaaataattcaataaaagaatattggaggaaattcaatagactgtttcatttcctgatcatagtattggaggaaattaaaaaaaaaatgatttatttatttattcttatgaatttataacatgattctatttaaataattaaatatatatatatgataacaaacaatttaatttaaatagttaaattttatggatatactcgtgataaataaacattatcaaatttccataaaacagtaagtagtatgtaacatctttacttaaagtatgtaaatagattacctacaaataaacagataatttataattgttagtattaaattgtggagaaagattttacttacaattattatatattcttatgattatattgactaagagcattataatttgagcaatactctttccatttcatttgcattcggtaatccatattaattaacttaattaatcattgaatattaacagtttatgcacattattttgaagttagttgtacatataaataaaaaattatacgcaataacaaaacagaaagattaatttattgtttataataattttcaaaaagaatagttgattcttataaatagataaacctccccatgccataatttttatcaatagtttactaccgtttttttctgaaaataagtaaattatggtttgaatttcggagcaatattttcaatatatataccttaattttagaatatttgatgacactaaaaaaaaactttaacttttagttacttacaaatataaatttcaacaaaaaaaaaaaatacatttttttaggactaatacatttagtcactaactaatttttaatcacaacaaaactttaaattttgttgtatagtgtgaaatagttctaatacgtacccaaattaataaaaagtgtagctagattaagaatcatcaagaaaaaacaaaagaaaaacagagtatagtttatatggtatgtagattatgaaccaagtacgtaaaaaaaaataatatatataaagatcatataacttacgaaaaagtaaaataaaacttttatttaataaaatattcaataatactcgcttattcattgctgaagaaaaaaaaaacttgacaatgggtgcaagtctagccaacttgaagatcaaattataaagaaattataatcagccggcataattatatccgtaataattactgtaataattattgtaataattatcgtagtacggatcataagaattttgaggctgcacttgtagttgtggctgggtaaaatattgttgttgaggctgcgctagtgattgtggttgggaaaaataaggctgcgctggtgattgtggctggggataatactgttgttgaggctgcgttggtggttgtggctggggataatactgttgttgaggctgcgatattggtggttgtgagtggggaaaatgctgttgttgaggagataataattgtaataggtgatgataatcattatagaaggaaccagaatcataatcacggatgtgattatacacattataggtgatattataagtagtaccctttgcaccatggtaagcatggttattcaaattttgagaagcagtactagtattgtttggtaaatagttacttggagttgttggagtactagtggcttccatggtggtggtcgtaggactagtggccgccatgatattggtagtgctcgcagtcgtggtcataggacaattaggctgatcataaattagttcataatcttcgctaatattgtcacctgatcattgaaagttaattattaaaaatttaggtatctattaaacttaatacaaaatgtaccaagaaaattatttacatacctccacccatattcactacacccatatccaatcacaattatatgtagaaacaaaccatgtatatatatatatatcaccaattttattttataaataataaaaatatcctatttaaatagtagattttggtgtgaatgtaccgtttttctctaacttatatttaaattttaaatttgtaaaagttgttgtgaaaggcttgagataagggtggttattatatatttatttttcaatctttgtaccgtttctcttaattaaatatcaattaagggtttatatatataaatatattttatatcaattaagggcgtgtgattcggtcccacatttaataaataacatacaaaattgtattcttttatacggaggaatatgtttcatttatttacgtaaatgcataatagcaatactaaatatcaaccatggttattagttattaatattcttttatatgtgggaattaggtttactatcgattttactttaatattttttttatttcttttttgggtaactgttatatagttacatttttctttaacctgtaatagcaggttactaatgggtagttttacttttttagaattaattaattataattaactatatattttcttaaaataattaattaaatatttaacaagacctctt

SEQ ID NO: 79043 - DNA, 835 bp, Cannabis sativa
acaaatatcaaatattatgagtttagggaaaaaaatttaagcatatgtaagcataaaaaatcaaatttctctttttatttatgtttactttacatgatgtatttttggacttttcatgtcatgttgtgccaattaatttacatcattgtaccatgttgtacctaattttatatttttttcatatcaagttatgttcgtgtatagtctagctcgggtttttgagctgagggttttagtgtataccctttcttttctttgtgtagttatcagtcatatactgtctctttcgttttcttttgcccatttctttgtgaaaattttcttgtggcctgggggagcgtagtgtatgttgctttgcatcatggaaaaagttccgactaaggatgtttcagtgaaaacggtggatgagaatatgaacaacactctggtgcgtgacagtgccctagaattggaaatgctggagctctttgaagatatcaccctggaagatgttgtggctaacaaggcttgtataggcaaagtcatagggtgtaaagacatgtcggcttctgtggttaagaagattttgactagggtttggcgtagacttggaccgtggagaatgaaaaagtgtgaagaggggggtccttggcttcttctttaagcatgaggaggactgttcttttgtcttacagaagaggtcgtggctggtgaatggtgtgttgctcaacatcaaaccctggccagtagaaggggaggttcgagcgggagagtttgctgtggctcggttctgggttcagatacatgggctacctacacggtgtctcaccaatgataatgctcccattgttgctaa

SEQ ID NO: 79044 - DNA, 2153 bp, Cannabis sativa
tgtgtaattttcaattgctcatattaaacaagttaacatagaaaataattaatttaatgaacagactaaaatgttaatcctgaaaataatttttttacatattccgtgagaatttcgtattatattttctatgtatcatcagttttgtcgcttatacttggagatctgttgttagcaaagagaattaagaaagacgcgactcaactgaactgcctgcattttgcttttgaactttcttctttttcatcatttccctcaactccattgcactattccaagcccctttttccccataaatcttcataagcaccgagtaaaccacagggtgctcatttttcagtttattaatcccctcagcagcaaactcaccaagttccaaacttgaatgcaagccacaagctgcaagcaatgcactccaaacaacaatatcaggcttaaggggcattcccttgatcaattccactgcttcctcaagatgacctgctcttccatataggtccaccatacaagcataatgctctcccctggcttggactccatactcggtcaccattgcattgaactgctcctcaccttcctggatcaatccaccacgagcgcaagctgataatatgcttacgaaagttacttcatctggcatgatcccactctttgtcattctcttgaactcatccaacgccctttttgcaagtccatgtcttgcgtagcctcctatcattgtgttccatgaaaccatgttcttattcgacatggactcaaaaacagagaatgcagcatcaatgtcgccacattttgcatacatatcaacaagtgagctcaacaagacaatgtcatctggtatgccagatttcaagacacctgagtgaacttgctggccagtgagaagtgaacagcagcctacacacgcatcaagcaggctcgaaaacgtgaaatggttaggcggaatgcctgacttcagcatcatggggaagagcctcaatgcctcaataaaccgctggctttgcacatacccgctaatcatagcagtccaggagaccacattcttttggttgattttgttgaaaacccagcgagccttattgatcattttattgtcaatatacccgttcatcaaacttgtccaagaaacaatattcctctctggcatgacatcgaaaactctctgagcctcccttataaaaccaattttcatgtaacctgaaaccaacgcattccaagaagaaatatccttgtccaaaacctcatcaaacactctgctcaaagcaaatggatccccaacatcagcataacctctcatcaatgctgaaccaacaaacaaacttgggttgagcccaactcgaactacaaacgagtgaatctggggtaccaaaaggttgagctcagtgttaaacaccgcgctgagaaccaaggagatggtatactcgttggggctgaaactagttcttatcatttgtaagaaataaccataaacgccatgtgggtttttagtgttccttaaacccaataacatggtgttccacgatacaacatctctaaggggcatttgatcaaacagcttctgggcatgtcgcaatcggtcatttttaacgtacaaggcgattattatgttgtaggagacgatatttcgggatgtggggttaagctcaaagagtacagtcgcatcttttatggagttgttgtgaagatgagtggtgagcatgtgattgagactgatcattgaagaggtacaaagatggcggttggtagttaggaagtgcaagactctgcttaacttcctcatttttcattgaaaaaaacgtatatatcagtctatggctaagatgtcttatttatattaatgatgctatatcacttcatctttatgtatgttttcatttcattattattattctgaaaaagggcacttgtaataaagttacctaaattgaaattaaaggataataatagttatgaagaagtaagatagcgaattgtacagggtgttcatttagctttagcccttgtgaaaaaaagtatctaaaaaattgtagtggttcgttatatttcttattaatttttttaaaaaatgaaaataatatggtttattagttagaacttaagaggtgatcaaaacttcaagcttgtaatggacttctgacttttttttttttaaa

SEQ ID NO: 79045 - DNA, 6049 bp, Cannabis sativa
ataagtatccgaatgtttcaaattataaatgatatgttaaatcaaaactccgacccgatccaaataaatagatatttttgccatatctagttatttttgaaaaaaaaaatacaattttaaagtttttttatgatattcctcttcatatataatgatttctttttggaacttttttatttttatactttaaaacagtttttcatattttaattttttttttaacaaaaatattatatttaatgcaattaaatttttatgccatatatattaattttttatatatatatttttgtaaatagtccatacatatacatcctttatagcacttcattggaagtgctctaacatgcttctagttcatgcttctagttcagcactcaattcccccaaaaaaaaataaagaaaagccacactgaatattataaatatatcttgaaacaattaaaaggtaaaaaaaaaataagctaactaaaatattatatgaaatgtatgcttcaaatagtttatatccctcgaattacatttggaagaagaatgaatatatctattatctacaacatcagcaggggaaaattcagcaacattcagtaaaaggggcacagatgagacaaaaagaatgggtaagctgtataatggagcagcaaaaatctccaaactagacaaattttaagcaatgccaggggaaatacttgtgcagaaagagagagttcaaagctataaacaactcaagtatggtttcagaacaggaaaagagcagaaagaagcatagctaagctcaacagtatggagcctgcagcaatcttaggctgtgcattgcgagatgctggtgccggtgctgtagagttcgggttagaagctgatccggttggtgagacaggaggcaaaggtggctccgatacatcttccagtgtcaacactgggcttggtgcctcagatggtggcatgaaaggaggacttatgagttgcaagagagccccaggctgaacggggctcatgtaagcaggtgtattgtcacctagggccaaacatcggtttcctgcattagtttcgaccaccctcagttagcttcattctcaccaaatactaaccattatttgtacaaaaaatgtcagcagtggcctttacttgttctctaaaataagctttaaatatatggacctgcaattataattatatcctatatatgagaaaggtatagtgtacagaagtatatgtacttacttttgtatctagcagatgttttaggaaagtccgtgattacaccatcaatattggctcccatgacataggaattaatttccacagttgcatcagagaagaagtcccatgcttgagatacaaactcattgctgaaggtttcaacataaacagaaagattctttgcctgaagcttacttacaacatctgtactaccagtcaaaaataacttagtatctgggaagacagaggccttgccaacaaccacagagtcagccaatgacttgatgtcattcaaggcaccatcatcaagacttcgaatttcctcttcaatcttgtacacgagttcatagtcatttttgccttggaactttgttagcacagagctattggtagactgaatcataacttttagggctgtttgattattgaagccagctttgctcagggagttaatgactgcttcagttacactcaagccttgctcttctgctagataggccgcaaactgaaagaatataatgacagaaacagaaataatcataaagcaaatttcgaactaggatctgctctgggacacatctttcttgttaatatttttcatctcacatttttatttttattttcaatgttttaataccggtagaaatcaaagtagacatggaaaaagactcacctctatgctgatcaagatgccagtaagagaacttgatttctttgttaagtccaaaaaatcagccaatgagacaaaacttccatcattcatgttccttggattccggaataatgcgtactttgatgaataggggtttgatataacagctatatgtaagcagaaaataaataaatacagaggtcctttttaaataattcctcaagacgagatctcgtgcatcaattagtatctaaagaaatactatactctataccaatatactacataaatagcccaagtaatatttaagaacaaaataagaagagtttaatcaagcaaatttcttacaccaatttcacccatccagctataagaataccaaagatagaaacattagtaaagttttaaacattttcaggtccattgatagccttgaataaacaagcaccttaattacaaagacagcaagtttggagtcagcaatatcttttttttaatcacactatttagctccccctttataacatggatatataagttagtcattactctataatgataaattacaaaaacaccacagctaaattagtagacgcatgagaaatgttttgagcttacgttttaaagtttgaatttgatcccatgtcatgctgaaggcaaatattccagtcccagtcttaatctctggaatgcttaatgtaaggtcggtaaacgcagattgagccacatctgtgctgtctattagatttatagagcttaagcaaaatggtatcccatcttttgacatttggactggacagtcaagaacatccacgccatcatcaattgccttggaataagccttgtcggtacaacctggatagtctccactggctccgcactttgagataaccaaaggttttgctagagcaagaaaaaatgcaaaacagtttagacatgaaataaaaaacaagtgatagatcaaaatttaattagaagaaacaaaaaacagcggtataccttgttctgtagcgtttttttctaggtgagcaaagcaatctgcagttttaaagagaattcagcagcttgaaatagataaaatgaaaataaaaaaattatgatgttccagagaggtttcgcccagtgattttctgagattcttccatattggaatgagttaaactccatgtctctggtcaaactaaagtattgttcttactttttttaaaacagccatgaagagaatctatcactaggtaagccaatattcttatgacaggaaaataaaaattacctatggctgctgatggagttattggaaaatcagttagcacaccatcaacactgaagtcaccattgtcgatgaagttcaggtactcagctaccggatcataactataattataactcaaagaaatgtcatttacaaactctgatgcatatacttccaacccttctttatgagcatccaagacaagagaagtgtgtggctccaaataagattttgtatcaacaggccatatgtaacctttagggacaataattgcagaggcagatgtcttgatatttttaagatttttcaagagagaaccataagtctgatttgttgaaggctcaatctcatcttgtccaagaaaccgaaagaccagctttgtcacatttgtattgagtcttgctctaatattgttcaagaaactcaactctgacgatgagatataattaatgactacccttttagataaagagagtacatagtttctcatacttaaattccgttgcatgaagaatgcattgtgctgcaaaaatagaagagatgagatggttcatactgatatggtaaactagaaactatgcccaaaagtagcttaaagttcagaaaacgaatgtgctgaaagctggttaaagtaggccaagatgcattatctcacgtacctgaatattcagccataagcctggtggtttcaattgattggccatattatcaactgtcgtaatttgaaataaacttccatcgaagttaggggcgcgagaatagattccttgacgaactgtggggataataaaccaaaacataagtaagaaagggtttctcaatgacccaacttcaaaaatatagactacaccgttcaattaagttgtattatccaagagtaatcattccattagaataaattaagatctcaacgatagcaaaagcaaccatcatcaatatgaatgcaaagagtttgatggagtaagaactatgaataattgataatagcaatatcaatttttatatggtttatatgacataaataggaaaaataaaccacaacaattacaataatctcaaccagtgagatgatatggaataaatatatgttcaaaccagcggaaatatagtaaagatatcataaactgcaacttaaagaataagtagaaagatttattcacatctgaaaaatactttcaactattaaatcccatctgtaacctgtttaacaaataaataaatcattaaatcccattttcgggtttgtatagccaccataacctagtagccaaaaaactgtctcaagtttaccggtttttttaccccctttttcttttctatctttagaatatatgtcaaattcacaaagatcatattctgaattttgtaaatctgagctaaaagaataaataagtttatacttactggagacagatgatagctctttgagagtaaagtccaccgaaaaccatcctctggtagatttcccatcaataacgtactcagtatcccttttattataaacatctgaaatatcagtaccattgtctaagttgacattcgaagcgcaaattccatcaccatcttttgttaattgaacatcacaccataacaccacatcgggtaagctagtcatcaacgctaaactgtacgcagtatcgctgtaaccaggcaatgtccccgaaaatccaccgtgggctatcaccaaaggtgatttccctggaaataacaaaaataatacaaatcaataactgaggtcagctcatcacataaaaaattttcatgtcttccggcttaaactcaatttcgtaaatcgatcaacttcaatattccatattttctttctctcaccatccaaacagagaacaatctgtcctcgaagtacgacatcaaatacattaagaataacaaagagcaatagaaaacacacacacacacaataccgctaagtgtttgccatggagacttggaaccagatttctgagcagagacggaagctagaaccaagcttaaaaaaagagcagctgagactagagcgcgtgagtcacacattgccggagcaaatagacctcggcagagaatcagtttaggttcttccgtcgaagcttccgggtttcacggtaaaatgtgtgagatttggtcagctcagagagactgaagactatcagacaaaaatatttgagagaaataagaaattgaaatttggaggtgagagggaacgtttttagggtggttcagtgagttagttggtgaagcggatgattggatgacagctctaggtggggcccaactttgctaatgacaatctggcaaatggacgacgtggcaagcagtgattggttagcagccttcaggtaagcaaaacgcgcatgaagaggagtcatactccaacgtgggaacgacttctattatattcgttttgccttgatcattgtcaaatctacacttggcaactagattttatagactctgtacacaacctttttcttgtttttttgtatgaaatggtccatctcaatgtgcaagccaaaatatgccgaaaacattagaccaaaaaaaaatatatatatatgatactatactattgcttttttgttaaaaaaaacatgacatttaattgataaattttactttaagcaaatacgatcgattgattaaaaaagtccggttaagttaatatatataggggtgagtaaagggtgggtatgagattattagtaaataggtgatactattaagctacacttaatatatatgagggcacatttgtcttggattaaaatggcacatattgattaatgtatatgttattgaagtataatacaaaatagtgatattataagtatcaaaataatattaaattgttatgaaaatattatgtagatacccataagttaatttataatttgttgaggagtcaaattataaataccaaaactcattttataatgatctataaatagatt

SEQ ID NO: 79046 - DNA, 3442 bp, Cannabis sativa
ttttataaacacccctaaacaaaattttttcccccaaaaaaaaaaaaaaaaaaaaaaaactgaaaaaaagccacatgtacatagatatactaccataacatgtaccgttcactcatttcattctcattggcccaaaatacttccccatttgatgaggtagaaacaaataggcttccagtaaataaaccctatacatatatattaagaaattctatttatactccacaaaataataagtataccctaaaatttataaaagttaagtttaaactaattttaaaaatcactcttaatattttttaaaaagaatttctcacattattttgtgttagttttaatacttattttaattttatttttacaaattttttaaatcatgaataatttctttttaaaatataatttatttttattttataggcctgttttttagaaatatgaattgaaagaaaaatattaaattttttttatataattaaaaatataaattttatataaaataaaaattattttaaaaaagtatatttataaatttgtaagatacaaataaaaaccatataatatatttgaaggttgccctagtaagcagactaagtctagtaagaagatggctttcaatgcatatgcatatgcatgtactcatcattaaattcgtgcacgaaggagtaggcaatttatatatatgtactcatcatcatcatcatcatcattattattattattaaagagattctacgtacgttataaaaagatcgatcaaaaataaagtttaaccttatcttctttctgtgtacgcactgcttatcaaagttcaaaaaagagattaataaaaatggagttcgtttttacgtacgtatatgtcactacaaaaaatagtgataactttttagtcacaacataaatcttttgtaactaaatgcgatttttggtcacaacaaaaaactacttacgactaaaacatagtatttagacacaaattatcactaatttacttttagtcacaataagtattgtgactaaaaccacatttatattagtcacaaccaattgtaatttttgtgactaatacctttagtcacggaccttttagtcacaacataggaataataattaataattagtcacaacttttttacttttagtctaagatcttttgtagtgtgtattgttatttcattttaaaaacaattctcatgaaaagcatattattagtgcaccaaacatattatgttttataaatggacgtagatacttctaatttcgaataatttaaggtatttttaaatttatgaagtacttgatttatatatatatgtttgaatcttgattttggaaccgtaaattatttaattttacaaaaaattattaaacatatatctagctactataatatttatgatatatatatttatatataacaccaaatataaatttcctaaataattaataattgtggtacaatatattcactatggatagtgtgctttataatataaatttccattttgttatttttctctcatgtattactattaggttattttaattcttttttctatgatcatatattttgttgttaattaatattggcaataatgcgtcttcaaatggttgctactacttattaaaattaaatttatgtatatgagtagtgcaaattattaggaaaatttggtatttttttaacaagaaattttgcattgcatatatatatgatacccacatcaatatttagacctaagaaatgcaaccaaatataaaagttgtcactattaaggtcactatttagacatagattcgatagtattatcataaaaacaatattactcattaatattattatattgtaaagaacctaatactaaaaatctacccccaaacgataaatgataggtatatagatcaatctaaagaatgaaaagtatagatatattgaaaataataataataaaacatgtttataacaagtgtatttcattatatatatatttatatatttatatatcaaaatcatattaaggtcaattgcatgtggaaattataaattttgatgttcatatataataagtcatatacaaacatatttatacacgaaatcaataatatataatattataattaataataaccaaaaatagtgagtgtgcaaaattataagaaactacgaaaatggcaatagcagccttgtttgaatgttttaatattgttacacaagattagacctagctatgaggacacttcaattccaatgggacaaaactataaaatgaactttttagacaaacaaattaaatttaattgttgcgtgaacaacttcgagactctctcaaatcaaatcttatatatataatatatattaagaagagaggaatatatataaatagatattaattaataatatacaaatgtaggtgagttagattgttttttgaagaaataaatgcgtaggattttctatatatatctatttatgtggccaaaaactcttggataataaggctatagcaataaacacttgcggtgagcatctatatattatatatatacaatacatacaaattcaaccgatattaattatagcaaagagtccttcttctcgagggcaatgtaagcttccacactccttctattgtactatgattttgatcgatctcatgttaattttattgttatatacaacaataattaggaaaggtatgtatatgatcaattatctaccaaattatcatataagattatagaaacccttatcaaggtgttgtgatcgatccccatcaagttaactggagaacttatatttgggttttacagacataaatttgttactgttactacagttagagagtccccaattgcttaatttatagaaagaaaatacaatatataagatttatgaactattcttttcataacaattggttttgagataaaaatttacaattctaactactatgtactactaaaaaaacctcaaaacttgtgaatggggacaccaaataaaatatagttcttatctactcgcaaattgattgatcggtaaatttatttattgtgatttatttgagagcttgtaggatttatgggaaattaattggttgatatatttgagagcttgtaggacgtttgtccctacaaaattttgttgtgatcagtcaagtgaaacatatttgtcacaaaaaatatatcaacatgatatttatgttatcaccaaaaaaaattgttgcgactaaaatgcataataaattattaaaaaggtaaatgttattgatgatttgtggttaaatattatattttagccaaaaacaataataattattttagtgtgacttttaaaaaaaaataatacattattaaaaaattatcactaaaaataattaatttttataaaaaacaggcaattgtgaaagattttcaaaatatttgacaagtgaccctagtaaga

SEQ ID NO: 79047 - DNA, 3316 bp, Cannabis sativa
  modified_base (84)..(90): a, c, t, g, unknown or other
atccagcggggcggggcggggcagatccttacttgatctggatcaggtcggatcatagccggatcagatccgacccgccccatnnnnnnntaaatctatgaaactgttgcccaagttaatatgtatttttatattaaattattagcaaaatggtcataaaatttaaattattagcaacatttttataaattttattttataaatttaactgctaaagaaaaaaaataattaaagatctaatttttctatatgaatttgataatctcttctaagaagggaagccaggtttgactaaagctcaagaacagatctatttctgtcgatggactggttcacacccatattgggcaatctcactcggagattgggtggtgcttattcttcttcttcgtcactcccactcagaaggactctggaattgcttacgttggtcttctttctcgctattacctcctctgtcatttctcaattcctaactaacaactctctgtcttctactcgccggagcaattgtcattttccggccattttcaacttcggcgattccaattccgataccggtggcaaatcagctgcctttcatagactcccttatcctaacggcgagaccttcttccacaaaccttccgggaggtactgcgatgggaaagtcatcgttgatttcatcggttagactgaaatttatttactttaagccattgttactatgattcgggaaattgaaacccaatttgatgttagtttctttggaacggttttattatgtagctgagagattgggtctaccatatttgggtgcttatttagattccattggaaccaattttcgacacggagcgaatttcgcaactggagggtcaacgattcagtcagtggatgtgaaggttttcgaggctggttttagtccaatctctctggagatacagattttgcagtttaaacagttcaaggctcggactgatgagctattcaatgatgaaggttaggtaatgtgttgttttgttttggaagaacattaatagatatgatgatattgatattggttatagcatcatgtattataccagaacaatagttcttaattcagtatcagaatccaattaacttaaattgccattagagatcttaaatttatgattgagactgggaaagatccattactttgagatattactaattgactttgatacacttataatactgtagttctccatcattgccatcaattttgagttagaactggtttttaacaggaattttgggtagaacagaaccttgaaagtttttttttattcttcagcttcaagtttagatctcaagaacagtctccctagaccagaggacttctccaaggcattatacactttcgatattggacagaatgatcttcattttgggcttaaagctacgggagaagaacaacttaaggcgtcttttcctaaaactatcggtacgtttgctcaggcaatcaaggtaaaagggaggagaattttatgccttcagttttctggtcagttaaataatgccgttagccttaccttgccgctgaactgtgatttttttcttctttaggaactataccaactaggagcaagagtgttctggatccataacactggtcctattggatgtttacctttttctgttataatatattctccaaaacctgaaaatatggatcaaattggctgtgtcaagtcccataatgaagtggccaaggaattcaacacgcagctccaccagagagtttcccaacttagggtgcaactacctgatgcagttattacttatgtcgacatctattcagccaaatattctttaatctccgaagcaaagaagtacggtacgtccctgatatatgatccaactgttgcatttttacttggaaaactttgtttgtgcactcaactttgatgtattcttgatcatagttaactttcgtagtgtcaaaattacaggttttggtaatccacttgaacaatgctgtgggcattataaagattactatgtacaatgtgggaagaaagccatggtaaatgggtctgagattgttgggaatgcttgtagtgatccattagtatacattaattgggatggtgtgcattattctcacgctgcaaatagatgggtagcccaccacattcaagatggctctctctccgatcctaaaattcccattgctcaagcttgccataatcctgataattcatcttgatatgtttgatggttttacgaggtcatgaaagatcaaataacataatttttttgtcatgttcatgaaatatttcattagtcggtcaaaagactcaatttgtaacaccaaatatttcataatcaatcatgttcatgaaagttatgctgtatagtatgcaatgactgcagttgtgatgaatgagtgactttgaaaatttttggatcaaaaaaattaaactttgaaaatttggtcttggcagtcttgagtgcttccaactgttcaagctcatgattttgatggtctcctgttttgtgcaagggttcaatctcagccattggtgagagattctttgaagatatattgttgttgcctaagccttttcctctgtattttgatgttattataaactctcattgttccctcacacaccaaaaaataaggctttgttttcttggtggtgtttgttggaacatcattagttattggtcattgctattgtttttgttctaagtaggggtgtatatcggttgatttggttggttaaagtgtatttttactaactcgatataaatgccgggttgcaaatatctaattgtagcctgtttaatgaaaaaataaaaaaagattaattcatccaatgatttcgttacccatccaaatagatatttattttttattataattagtttttggtgtttaaataattgatttgaaaaataaatgtatagtatacatattttaaaattaaaacagttatagtttaaattaatattaagaacttaaacctaaattaaatataaattgaataaacttttaagtattaaacaacattcttctaaaaatagaaaaaaagatggttaattttactagcttatttattaagcatcacggtatcagtgaagttgaggactgataaagatattatgttattttaaattgatcacttgttgaatataattttttaccacactactagacttattgactatgtggatttaatacattggtatttgtaattatgaatgtcttttgttgatttaaaaataatataattgtcatagttcaatatcaaatgttaaattggaccggtatgttgagtgctatcaaaaaattatcattttt

SEQ ID NO: 79048 - DNA, 1780 bp, Cannabis sativa
aatgttacttaacccaatctatgcttcattgcaggatcgataatgatcgattccaattaaatattaatttctttacgactgattaattagtgataactacaaatatgttattgtctcttgaatcaattaatatgcacttaattattattagaaagctattatgctatttcttgggggcaaagatgttccgtttctgtcgaacaggatggtgtagatcattttcttataagtcgtttcatattttatttttcttatattaaatcaccaaatgaaaatgaaaagcacataagacttccataaagccaaaaagtttaggtaatatgttaggtgactataggaaatttgaagcgaaattattgcttttacagatgtcgctttttgaacttgcttttcccttgattgacatgctttttaattcaaattatttaaatttattagtaatattataaatctctattattttgtgaaaacaacattttattacttttattagttatgtatatatgtaaatatatataatcttcgcacattgttctgtcaagcatgggacacattggtaccaccacttacacgttagaccaattcttttgctttatacatttgcttatataaaacttcatttatatagcagaaaaaggggtttattagtaataaattattactagggtaagaataatatgtaaaaattacagtgggtttaattcgaaagagaaaaaaaaaatagtaaaactgtataaaacccgttttctccattattagcatcttttctcattcctatctactttttgacattttcatttttccaccccaattgacctgtaatagtaattaattaaagaatattggtcagtcaaagtcaaagacttaatcggtttgcattgttatttttccttaatatttaccattattatcgtagatgagtgcactagctagctaggtaagtgtttttttaagtcttatatgtccggacatgtaaaatgatcagaattaaacgcaatttttttcccctttctcaaacatgtacaataaacttcactgaaatgtatgtatataactcctctaaatattttttctttttaaaaagtaatattattgtcatgatcgatttggttctcaaattacctaataaatatattaaacactgcttttagtgtaccaagtaagaaaaatcaatccattttttatattgttggccgggacccctaattagagtactaaaacatacaaagggtcacgtactacctataaatatatatatatatatatatatatatcttacctcattataatttatcagttcacttataataataaaaaaaaaaaaaaaaaaggaacattactaactacataaagagaaaaaaaaaaagaaaaaaacaactcgtatactatataattaatccaaatcaaatccgaccctattgatatttttcagtcacactcacatatattataccacgacattaaaataattataagaggatgaaaatacgatattgcccaattaggaccaagtattactatggaattggccaattaaaagaagaatttttaaatatctcactattaaaattttctatatatatatatatatatgtgtatgtgtatattttgctgtagaattaagttcaatttgcgataatctccaaatacgaaatactgcaagatttgcaaatcaataattgggttttgttatctattttattcgacaattgatctaagtcattaattaatctatatttttataagagaatttgtcctaatgtacatggaagtagttcag

SEQ ID NO: 79049 - DNA, 4572 bp, Cannabis sativa
gaaaggaaaaaaggaaaaaagaaatatgaaattctaattctaaaaacaataaatttaagttttattagtgatcaaaaaaactttaaacttttattagacatttgatgctatgtttgagttttatgagatattttatagtatgtatggtacataagatattatttatctttgatatttttaatatttttaggtgctctaaaaatattttttttaattaaatatttgaggtttacgcctcaagcttacgcctcaatgcaccttgaggcttacgcctcgcctcacaaaaagaaaacaccttgaggattaaattcgcaattttaaacattgcccaaaatatttcatatgtactctctctgttgagtcatcacctcccacacgtcattcttttttttctccattctttctcctcacataagtgcattttaccacaggctttatcatcacttccccccgcagtcacaccttgtcctcaaggtgaaaagaaggaaattgagggttaacaagctcgaagtcctcccaagaattctcaaaggaagggagatgttgccattttatgagcacttccaatgggcctttggcattgtagcgaagaccttccacattttcaagttcaactttccattctaaatttgcctagaggattataggaaaaggttgagctggagtagtagcacctaccgcgtgcttcagcataggaacatggaagacaggatggatgggaacacttgggggcaaggacaacttgcatgcaacagttccaacacgagactcaacaaagtaaggacacaaatattgtggagataacttttcattattgcactgagcagtggaacgatgacgatatgtcttaagtttaacatacactaagtcccccacagaaaactaaacacctcggcgtttgcaattagccacatccttcattcgttgttgtgcccatgaaaggtgatttagaatggaaagttgaacttgaaaatgttgcttatcagccactgctctcctctcagtggccactcgggtgagacaaaagaatatatgtgtttagcaggggatgtattttgaaaatggctatggagccttatattggttgtttgtgcttttgggcggggtatgtaagaattgaaaacttctctctctacatctttgagtccgaaagggcttttcctttttctgtttcttttttgagtaatacaaggaaagtcatggctgtaatggcttaatttttctactgttgcgtgagttattgttttattgcttttgttttgctggtttggttgaagtattgattagcaggtagcttgaatctgaataaaggatgcggattgctttttaaacttcgcggattctctaggaggcttcaatccttgaaattccactattcatcaattatagtatttctctagactaaaggctccatagccattttcaagttttggttcctattaaagtggcatcaaaacgacatggtgaaagaatatttagacgttgaaacaaaagcaacagtggaatgtttagatgttgaaacaaaagcagcagtggaatgtttagacgttgaaacaaaagtagcagtggaaactaacaattggagaagaaactaacagaatttggtaagcatacttgtgaagtgtttcatgcttcatcaaatcaacgatggccaagctgttggggggataagagtttttctaaacaacaatggaggaaatggaaaaataactgaaaacaacaacaaaaacaaaaagataagctcgcatgagttgaataactttatccgaattctctttttcaacccttctatggagattgcttgaggttctacttgtgaagtgagaattaagactactcaacatttgaattcttgaaaaaagtttcttggaataactcttggagtaaatagttgatctatgagagctagagatagaggttaaaagagtgcaaaagtatgatcagccttttttttcactttttttaaccttccaaaactatttaaatagttggagtgttagcactaacctagaaaagtccccatttgttttcattgaaaaaccacaatttggagccaaaatcaagaacaagcaacacatcaccgccttaagtgtatgtgttgccctgtatggcgtcaagtgacacttccttactaggtagcaacacgtcaacccgtgccttgcatttaagcaacacgtcagacttgagggggtggcgactaaacaccaccctctctacttttgctacctttttactacctatcttactccaaaaaagatcaaattgcttccaacatgtttagatgtatttaaatgcttcattgtactagtctaaactctatttggtcacatattggtgctaatcacaaaatctcaaatgtacacatacttgcatacaatttttcaaataactttatttaaccactcaacacaatattaactcctagattcttatgatgcatctcaggttgttgttgatggaacaagccaaaaaagataatgatagcaacaaataaactctacaactagtgccaaatctggtgttcaactaaggcactattgttaattctcacatacgtacaaggcaatggaaagcacaatgccctgccatttctgctacatgttagggtgttatgtgccaaataagatggtgatgctgctggaaaaattccaagacatacaaatcattcaagtagttgaagaactcacaaaagatgagggcaaccacaactcaacgacccaatggtgtgttctagtggttgtttcccaaatagtccaatgtcatgggattgagtactacaaagcataatgtgtgggacaagatattctaggtccaacatcacttctttcttgcccaacaaggaaaattctccttttcaagtgcaataaaaactttttatattgtgaaagctattgaggcacttaaaaactaagcctcaacaagtttagtcaaggcttaaaccttgaaatgcgaggattacttttttaaggcaacacctctgaagcatgtgaggcttaagcctctcatctctggagacattgggaattttttgatgtatctagtcttttcgattgggttttttaattgggctttattttaagtttttctaacacatttttgacttataaacttagtttaaatcacaaaagtaaacccaaactcccaataaataagacatttatttcattcacccattctcggcctcctgtaactgtaactacacttttattttccaactccatttttagaaaatctcaatagcaatgataatgaacatgaaaacttcttggtctgtgaagttgtctgagactttaagttctactctttaatgaagtttttgttatcaataatgaggcttaggcctaaccgagctaaagcaaaatacctcagcttcagattaagctttttaaaactttgactggtacataacaaaagagttgactctatactttctgtaaagcagaagtctgtcctcattgtctgtgtcttcactgtctgacataaccaagccacctcttcaaagttaaaggtaaaatgaaagtctgccactttgttcctttcaatcaccttaaaggttttgttcatcatccaaaattcttataatgaacagttaatgttcaatctgaaatttccacgtaattgtttcagaattcttctatgacttgtgtttaaggcatacatagcgatgcaatgtgtgaggtgctaggaccttattttagacaaacaataaagcaggagaggaaagatggcatggaagagaagttttttccaaagtaatttaccaacaactacaaataattttgtcccaaattcaccacaagcagactaagaaaaaccttcgtttcaaatgcaccacaaactcgtaaaggtgaaaaaaataggtcagtttttcagaagtttaaacacattcaattaaccggtagtccaggctccaaatgtaaccacacttacgtaactgaaagaattggggaagttcatcaagtgtcctatcctaacaattacatatccatattatggctctatttcttttgttttacaaaataaaaataaagaaataaatatatttatattaaacaaaatacctcttgtaaacgctgcttgattaacctcttgtgtacatctaatgaacatctctccaatcccaagtcattctctaacaatctacgaactccctcaaaagtcaaagagctacaatacaaagaaaattacaataaaaaatcgaccataaagaatcaaagatctgcatttctcttaaaagtgaggtcacagttttagccattaacacacctagagtctagagagcaggatccaactgtataaaccttgcaacgggtgggtaaggagtggacaaatatctcaaattggctttagcccgtaaaccctacccactcaactgaacccaccaaacacttcatacctaactagattaacaagggaccttaagcaaactcaaacatttacaaatttaatagtaacaaaaattttactgacaacccaaaactattggctacaatttctgtcactcatatttctttttttcttctttttctttttcccttaaccgaaagacccctgtgacactcaaaaactcca

SEQ ID NO: 79050 - DNA, 2350 bp, Cannabis sativa
atacatacatatattctcaattatattatggttactttaaaaagaaaaaaaagtacttacataatttatccttaatttgataatgtagaaacttcataattatgactaatccttaaaaaagtaatagcattattttcaatcaagtagtgaaagaagggttattagtgaataatatgatgtgatttgtggatttgtgggtcaccaatttgttgtagcattgtggagaaaaaggctgctaataatgttgtattattagtgtagttgtttgttgttggaatgtgttaatacatgtcatatatgtcccaacccaactttccctttttttgttatataaaagtttatattttgagaagtgtctcccaaatcacaatgactgaataaattatctatttgtgattatggtgggaaatcatggaatggttggtaatgttaatttacttatcagtgcatgtgctttatgttagtgactccttgtcctttgatgatatctacactcaattgtatgtggatgtggtgtcaattgtcaaatatctaagtaaagttagaaaatatgtgttcaaaaatttgaggtgaagacaataaatgctatctctagctataaaatacctgcatatttgatggacaaaagagtaaatgatccaattaatagagtacaaactacaaatcaatgactcaaacatactagcagagataccttgatcatatattaacggccataaactaataaactagaagttgaagataattacagtattgattaaataaaaatgtagttgatcatttcctttaataccttatatacacaaagtttaacaaatgagtaatgatatagggatactcacaaattgtatttacaagatattggttaaaatgacaaggtaccaatagagttcaaattaatcacatatattacaattacaggaaattaagctgcagccacaagatgtaaatttcttcttcttcttcttatgttggagtgtcgaggtctaagcacatcttacatcaatttttattttattatttttttttaagattatttaaatattatattttaatgtattccattcaattaaaatactttatctacaaagacagaatatatatatatatatataatatatatataaagagagagaaagacttacaaaataatagtttagagcataaataactgaagatttatgtggttaaaaagtattgttttgagttgaaatagcagggtatataccatatttaatagagcgagtgaatattgacatttttagctatattttttcatttaaagtaaccaaattttccacatggtcattgccaacagaggtgtggcccatatgatttaaaattagtcagattaagaagtatatggattcttacaagttgatcttaccacatatatcaatgttaagttgttttcagtgtgggttggatgggagagaaacaaagaagaaaaaaagtgtggatggcaagaaattgggggagtgagtgagtgagtgagggctgggctaggagattgtgtgtggcagtgcatttgcatgtgatggggttgttatcatcatcctgttgaaagagaagtgttgcgggtgggacccacctctcatggaaataggtggccccccccaccccctacaacctcatcaaggccgtctattttgtctgatctgtatgcaatgtaggtttcatgaaagggaaagcttctctctctctcacacacacacacacaccctttcctttgtaagggtccatctgactttcatttattatctaaaggttctctttcttatcttctaatctcaaagaaaaaaatatgtaaaagataggattgctattttggtatccgagtaattttttgtatcaagtttaaattcacatgaaaaaataaattgatcaagtcttataatgtattattagtatccgtaagactactaaccgctcaagttacataccatgcattgcataaatattaactcaaagctctaaaattccaagtcgttggttggttatcaactttagctgaattgctgattggtccctccagcagaaaatttaaaccagggcttcaaaggagggggggacaatacaatatgatgatgaagatgatgatcacgaatcaacggccaaaaaagtccatattatattcattcacaccacaaagtagtagtgtttggattcagattgcacggctgagttgttcaactctgactgcactaccccatgttgataatgatgatgatgatgataagtagtatccaactggtcctcttgattctattacctgaatgtgaaaagggtaaaatgattaaaacaaatttataggactaggcaatctgttgactatggtatatacgaagct

SEQ ID NO: 79051 - DNA, 3129 bp, Cannabis sativa
gtaaaataatttccaacaggcacaatattagtttatgtagtgtatgatgcaaacaaccaattatttctaatttcctttgcaattcagtgagaatcacaaatcctggaagtatttcttactgaagttaagggaaatgattggggaggttgaaaacttagtgtttgtattagataagaatcaaaacattaaacatgctgtgaatgtcattttccctgaagcatgccactatacatgctataaacatattactatgaatgtggcccacacgctcaagactgatgtatgccataagcaaatatggctcaccgcttatgcatggttgaagagggaatgttataaacatttttaggtgctttaacgaaaggatcctgccattgatgcatacgcttagagtataagactggaaaagtaggctcgtccttattgtataggtgataggtacagcataatgataagcaacactgttgaaagcctcaaaaacatgacagaagaattcaagaaatatccaataactactctggttaagttcataaggttcacactacaaagttggttcattgaccgtctcaaagagacaagtaagtgtactatccctttggcaactacttttgaggatgatttggcagcgtaacataaggatggtaagttcagaagcgtccaacataatggtgcacatttgtttaacgccggtagaggtcctgagggtcagagagatggtgatgtaaacttagttgagaaaacatgcacacgtggcatgttccaatgttgaaaattccttgtgcccatgcatgtgccgcaacgattactcattttgtgagcctatatgctttaagctccacctattacacaaagatacgtggaagtatacgtacgatgcaacaactaatattatcgacgaggaggacaattgagtgcttctagaacatatgcaaaacatgagagtcgggataccagtggagaggaaaactcataggtcatccaaggaagagtaatgcaggaagaagatggagtaactaatatctatctaacggtgataaagttgtggtactcaccattgttaaaactgtggcgacttaggccacaacaaagcttcatgcaaggcccgagtttgagcattattttagtattttcattatttttattagtaatacagttttatgatctattttttaagttgtttttattaattttttactagttggacctactacaacgatatttagcaacgtgtatcaacaacgttatcaatatgattaaattagaatgactattttttgtagttttttgctatctagacatgtttaacgatatttgtcggcatgtgtcgacaatgtatttgacatggttagaatgctagtcgtctacaagtttggcgacatgtgttgactatatcatcaatattataagaatgccaatcttgactactaggacatgttttgatgacatttcgcgacatgtaacgactatgttatcgataaaccacataaatcaatgatcatttaaaatgaagaattaaatgaactttcaggacattagacgattcctctagcaatgtgtatcgacataacatcaacatttgcttagttatccacaactaaaatactagtcactaaaacaacatttttggtgttttgggttagttatcgacaaaaagtcgataaaataacattttttcagtatttttcttattatagacaaaaccaataaaaacatcatcctccaactatttcccgaccactaacaacttcctgaagaaactcacatcaccgacgctggtgtggagattcctaggagggatattgggatgtccccaagcactcacctcttgaatgtacgtagcaatctacgatctggtggtctttttgggtctacattttctggaagaagtcacttcttctttttatcctctatgtagtccagcaaatagcaaggcttcttcttctttctcacaaatggtaccccttctaggggtctagtatggagtaggacaccaatggtcgtgataatcccatccattggagtagacggtgccttatcatcatcttgttctcaatcttctaagaacacattaaaatcttacctaaaatgggatttaatctgtgttagattctcgggtcttccaatgtacatcgaatgcctcgctaaaacaccaaactcttttaaaattttggtgggtgagtgggattcgaggcaattcgtgggttccaaatgaagaaaaaagaaagagagggagataggggcagttcgaggaacagggatgctgtggatggtggtgggtgtggtggttgttcaaaggtgtgatgagtgagaaggagcgggagagattcaaagggagagagtgtgagagaggtgagtgaatgggaggggtattttgggggttaagtaaaattgaggtgtatttaaagaatgatttgtaaagtaaaatattaagagtcgctaaactcactttaagcatgaattgtcaaattttactatgtataactattatatttggttttgttagtattttcttggttcttcttcatcagatctgtgctactctgtgagtattatttgatcttttggttgtaatctgcttttaacctttaatttaagagaactaaactttagctgagggagtgggagtgaaggaagcattgagttaaataaagaggcaggattgaagtaagttgattttggagactggagttcggttgtggttcagcaatcaggtaattcgaagccaaatccatgtagtgtctttgtttgtcatttcaaataatgattgtaggaatttactgtcaatatatattgaatgatatttctatttgttttgagtttccttataagatagatcattttcatttccttattatagcttctctctcttattgtttttctgattgtagtttgaaggagggtgatgttccttcctcctactggtgtagctctttcgttggctgatataatattttactttacaaataaaaaactagtatatgctctaatcatgcataatagtatacttcagaaaaaataaaaataaatatcatgtacaaggagcacactaaatttggtgttacactatcaccaaatttagtatcaaaaagtattaccactccaaccacaacaccaaaaattacactaaaa

SEQ ID NO: 79052 - DNA, 2880 bp, Cannabis sativa
aagttttaattattttttgctttcatataattttgataggtgaaagctgaagttttcaaggttgagaaatatgataagccaatccgtgaactcatcatagatttgatttcaggactccatataaacaacctggtcatgggactcacattcatgaaatcttcatctaggtaatatttataattattgaacaagttaaatattaactagctacatgtatataattttgtatttttataaaattgactttatgtattttatataggaaagcaaaaacggcaattagtggctgtttttacatttatcaacagaagcctgaattttgtgacgagttcttcatagtaagtggtggaaaacagatatcaatgagtgaagaaaattttggtgattcaattccattagattccccccgttctcaaagtcaatgggaatgttatactcaagaaattgataactattttcaacatttattgtccctgaatttggatgaagaagtagtaattaataattgtcatgagccggtgaataatgataatagtccaattgaagcagaaatgaggaaactacaaacctccaatatggtactctttagttaccactttatatattaattcacttctataatatatggtttttattaactagctaattaataagcaaaaaaactttggtttttaacagagtattgctgagaaatctcaatgcctgaggacaaaaactcgagaaatattggagatgatccaatcaaaaagagatgaaactaaggccaattctcgtaggcatgcaaaagcagaaagggtcatttatttatgcaatgaaagggtataaatgttacatatatatacttatatgaattatggtctttcgtaagaatatatattgtaaatatcaccaactcaaagcttcgaacgacactgtcaaaattcacttcttcagtcttatgtacatttagttacaatcaatactttatatattccacatttctatcataagagtcaaaacttaatactttatattaggctaagtggtgtttgattgggaggaatgaaaatataataataggaacgagaatgaaaattggaatatgaataaaatagtataaaatttaaaatgcataaaaaaaattattaaattttcaaatcatgcattagaatggtctttccttccatttcaaaataaaatagtcattccactaaaatagtgtaaaggtcatttcattggaatgatattccaatactttaaaatgcaaccaaacaaacaaatggaatgaaaattgtttctttcccattcaattccatttcattagtaaatgaattaataaatatatatttttcttttgcagatgacagagctcaaaaacctaatgacaaaagtgggaacgaatccagcaatactgaaggaggaactagataacacaaaagaattattgaatgaatccatattggaagtggaagaaagtaagaggaatctaaagtcgttggttatgcttcgatacgatttgtcgaacaagctccaaagtttggaaatggcaaaatcgcaaggtgagctggaattacaaaggttaattgtagagagagaggagatggttccgggaatagatgctctccggcgagagagagatgttttccagcgaaggattaagttttataataaggaggaagaagagaattataaggagataggagaaataataaggtgtaggttgagggagttttcgggtgaggagatcagattggccactgaggatttttctgagcgtttgagaatcaagtcaggtggggatttattaagtggtgtttacaaatgtcgaattaaccttcaaactgtcgccattaaaatgttcacctcatcatcacctaacaatgcaatagctcatcaagattttcaactaaaggtacttaccactatcattatctactcattcctctactggaatatttgcagcaaaaatgtttaaattattgttgatgcatggcactgaattattatgttggtagaacttaaaattacccaaattattatatttttgcaacaaaactacctacaaccatgaaatttgggctgaaaacaatttgtttcacttactttactagcttaaaaataattatttagaattttttttttaaatttataggagattttaaataactacatcactcatagtcatataaaaaaatttggggttgtgattaatacatgtgtcaaaactccaaaaataaatagttttgaaacttgttttctacaaatacaaaacaagttgctttaaaatctattttttttttaatattgtgactcgaaaagtatactgagaatcataatttttttaaccaaatataatagtaaataattaactgtggcaataggcacatgatttggtaatatgttaattttttcattattaatccattgaattattttatttaggtggtttttgattagaggtaataaaataaaatagaatagaaaaaaaaaattattttattactgtatttatttgcattttaaagtattagaatttggaatgacattctaataaaatgacttttccattattatagtagaatgacattctattttaaaattgaaagaaagcccattctaatgtatgatcagaaaaaatttaataattttttattaattttttcatgcaatttttaaatttgatttattttttttatttctatatacattttcattcttatttttatgttttcattctttctaaccaaatgcaaccttaattttgaatcgattttgtcaaacgaaaattatgcatttaaattcattctcaataaaaaaaatgattttattctattcttatttatatatatattttcactcttatttttgtgtttttattccttcctttatttatttatttat

SEQ ID NO: 79053 - DNA, 1762 bp, Cannabis sativa
atatagatatcaacctatgggataccaaacctattatagtttatacctagtaatgccaacctaatttttactggttcaaatccctgtgaccacaatgcatgactaaagtttgtattaatcccattaattaaattggagagaacatatataacaaataataaaaaagatggcccatttaaaaagaaaaagaatgacaaaaggttgcaagttgcaacgaagtgaaaaatagtttattggtattttaacaccttcacaattcatttaataaagaactcattcaagggctatacttgaaattcaagtgagaaatggatatgaatctccatgtattatttgtttgggtttatagtcaaatgttgttattttctctttttggtccaaggaaaaagattgtaagaaagagagagctcatgcgaagattattcaaataaatacaaaaccctatgatgaaaggcatagcatgcttgaaagcagagtatcaaatagctgctctggtcccatacgccattgttcaatgttcatattctattattattattatctttctttttaaagtactgaaatacacaagaaccattcaaggaacatccaacactactcactaatcatttgataaaatattaattaagggcccaataaaaagctacatccaattcaaaaaagggtcatcatataaaatatacaattagaaagaaaaaggattgaaattctattgctctatatctactaaacaatcacgggaccaaaaaggaagagaaaaatgacaaagccaatttcatataatacattttcatagtgcccgaatacaaagaattatgccaaatctttttttttttttttgcctccaataactagtccctataatgggtccaccaatcaatcttaatctcaggagatgtggtcggttactacaaagagaaacccactcttaaaagtttaacatctctctccactctccaccactacaatctatatttgagtaaaggggaaactataccaaacaaaaaataaaaaaggaaaagagggagagttttggttaagaccagggtgaaattttaaaaaagaagaattgaaatcatttgggattctccaaaaaaaaaaaggtaaaaaaggtaaagactatggggaagatagagagttttcccacccagagcaactagtttacacaactgatccatccttgtttgaccttgaagttgaaggcttttattaacacagttttcttttccttggcttgtagaaaggttggtacagaaggccacaatgcttgtcctctggcagacaaagtatcccattaaagatcttatatctttattacacttcttgtcctcttcccccaattccctcttcttccactaacaaaagtaaaagttgctatataaccttttccccccgacccctcccctcctcttccgttttttcttttcttttttcattatattttacaagtctatgtctttcttttccccctgcatttcagaagagaattctgttaacgaaaccattagattaacatataacaacaatgtgcactcacttaaacaaaggtctattaatagaggagttaaggaaagaaccaatgcaaaaataattttgaagagtgagcctaggtttacactttctcttacttccaaagaacatatcagtttgaattactttatttttaaattgttgtgttgccttctctttccctgttgttttaccccttttttgtctcttaaaagttttggcagtcaaagaaaataaaaaacaagttcagttg

SEQ ID NO: 79054 - DNA, 1732 bp, Cannabis sativa
tttctcttgcttgtttggtaaaataagtagctccatccttattatatcagctggaagttcatgatcacaatacaaatggaggttgagacgaatattttagaatgtgacaaaaaattcatacatatatatatttaatataatatacactgtatagtacagtacacagacagaaaaagaagaagccaaaacggtcatattaattggccggaagagaagaagacatgtatatattagaaaaggagaaataaatgcactatgtatatttctatgcatgcttgtttctaactatgtcctgtaagtaagtcgataattttagtttcattttttatttcttacataaaattatgaattttaaagctagaaaaggagactagtacaccaaactaagtgataatattaagtttcaaatgttgagatttctggccggccggcctatattgttaacagctcatcagctctacataaactgatttctgaaactaattaattaaatatggtttcaaaatgttccccaataataaaatagaaaacaaaagactcagttaaacttggatcttaaaagaaaaactctttagagaaaatgactagttaaacaaaaatcaaatcgaaagaaaataaaaataaaaacctagccaaacaagtgagagtatgtattttaattatataaagagtacaccctagctagttagaaaagtatatcattaattagtaaataaattaattgtttcacagtagaataattccccttagaaccacctctttcctcaaccatatcaagatgatcatcatcgatctatatgtataggtataatcaaattaagcattaccccattttaatatatatatatatatttatatgaatgtgtattctagggtttcttacaaagagtatgcttgttgttgtgcatccaaaccttgagaacatggcgactcacaccagtgtctaacgaaaactgctccaccgcagactcatcgtgcttctgaatcctccacccaattctctccgacaactcaagcatcttctctttctgcacagcagtgaacttggtccgatacctcttcttcctcttcgacttcgacccacttccccctccgcctccagtactactgctcggaatagaagcatcttcaccctcgtctcggctctgaccaccaccgccgccgcctgaggtgactcccggaagggccagaggccgtggctgaggagtattcaagttgttgaggtacccagatgggtgtggataagatcgatagtaattagggaacgaggagaactggtggtggccatggtagagttggtaattattaatgctttggtgatgatctgatacagtagtagaaggagtttctttgcggtgaaagttacggtggcagttgcaggcagcacacttgagtgcgtcaagtgtgccttcctcccctgttctgttagaatttgaggataagatgaatgaggttccatcccaaaaccaattggcaatgggaggagtagtccatttctcttatatattctattatctttccacacactagcaatgtggtactctctaacatcccctgccgctatgaactcacagcaaccgtcaacaacgtggcggccgaagccggccgcatgattcttttggcactctctatacctgatgaccgcagcgccgccgtgttagacttttatttgggcttacattaaattttattggttttattaaaacttgggttgattggatagttctttgct

SEQ ID NO: 79055 - DNA, 5183 bp, Cannabis sativa
tctctctctctcctaatatctctcaccttgttatgtactgaatttcagcatgttctcttaaccattcaagcacctttgctccctctagaatctcttgcacctgcaaaatatgctaaccttagttaatagggctctttacatatgattgccaattcaaacattcttctttttttaagacagatgtggtggaaaaaatcattggttctgcatgatgaacgagaatgggtggccattcctttcagaacgacccagcaaaacctcattcttaagctactctcagttcacaaattaaaagttcaaagtcattgtaacctggtcttttacacgctcctcgtcatattcttggttttgacgtttgaattcagctatagaattctcaacctccttgacaagatcatcagttgcaaactgtagaccaaagatatagtaaacacaaattatttaatcgaaaggttacttgataagcagcttaaccatgtgagaagattttaaattttccaaagggatgatgaaaagttgagaaactgtacctgcaagttctcacgtttaaatatatctccaacagccagattttgttttatcattcttgtaatattctccctctgggtttcaaggtactcgtttacggtcttttgacttgatagagaagccaattgctcgtcgtttagtttcatttttgcctgttaacaagcaacttaccattgataaagttacttacacaatataattatataataaactgattaacgctttcatatactaacctgtatctctaaaaggtttgctccatagagttgtctaccttgttcttcaaacagggactccggaatatccacctccaccatctgaagtgacagaaattgattaaaattgtgtcactgatttccatttctagacatggtcaaccaaagcggccagtttcacgggtgtgctttagatagaaattgttgtaaaaggtgaaacaatttcaatctgtcaaaagtataaccttactaatctggtcaagaatggcattatctgctgcttgttctttagcagtttgttccagttctaggcatctttgcagcaatgcttccttaacctgtaaatttaatcagaagcattgttaattcaaaacattaaaaaagtaaaataaactttaataatagcattatttaagtgcgttagctacttgatcaatggtgatgcacccaggtatgagctggtcagccagggaatcatccaactcaggcaactctctgtaaaatagttctttgcagtcgacctagagttgaaacagacaagccaaagagttataaactggacacaggctgggcatcaaggagaaggaagtagcgtttgtaaaataaaatataccaaatactacgtcatttcatttcccgtcatcgacctaactgcaacatttctaattgaaattgctgaatattataacaataaggacttcttcaaaggaagaaaacaagatccatataacaaggctttgttccaatgttggatctcaccaagaagaatttttttgagaaagaggaaaaaaatttctttaaatttcataagattctttcaatgtattgttctaacttttataaaattatattacgtgtaagttttattttttccaaagagaagatttcgctattttttgtttgaatccaaacacgaaagaaaatgaaatcctttagaattcatcgaaatccaagatccaaacaaagggtaagcattagtattaccagtcactaacagatttcaacacaaatcagtgaatagatttgcaaattatatggacctgttgaaaataattacaaagcagcaaagtataatgatcttgctggaacttaaatgcttctctaaagtgataaaggttttacaaaatcagacaagaacttacagtaaattgagcatgaactcctcggagatgttcttgtctccatgattcaggaaatactagcggaaaggttctgctttcgccagactgaattccaactatagcgtcaaggaaaccaggcagtaccctatcaccgtcttccgtatcaaaatgaaagcctgcaaaggaaaattagagttgagaacattttcctgaagagatagtatagtgatacttcagaatattaaacacgtttaacggacctttactctcagcagatggaatattttgaccatttgattcaccttcacctgttgtagttgcagatatgtcaaggaccgctacatcaccaatctgcaagaatttcaggtaattatatttcaaaatacatgaactacaaaggacaaaaggtttattgtgcagcatctccatttttttcaaacatataaacacaaaagtaggtgtattaaaacagataaattacaggtgatgaaccagatggtattttaaaagtaagaagaaacaaaatcaaagtggaataagacttgagttacctgtagtcctctgtcggttacaattcgcaatgtaccaagggccttatgtcggcctgctagttcttgttcagaagttattctagcatcaatgtcactgtctacctccacaacaatcttcaaattcttgtatccgtcctcaggaatccatttgacctcaggtatcacatcaactatgatctcatatctggtcaaaaatacacaaatgagaatgataataaaaaatgcattatacagaaatgagcaacttaccaattgggagataaaggataaggaactgcaaaaattgtggaatacatgagcaggaagaaagaatcatacagatgtgaagtactaaagtaacttgaagggttgtagatgacaaacctaagagaattgagagaagaatatgattgttccatatcagaaaatttggttacaatacgaattgagtcttgcaaaaccctgtcagtcacctatgaaataaggaaagatcaagagacagctggtatgcattttgacatggatataataacacagaaagctaaagtacttaaattgataagagcaattactatagaaagacctattatttcaattgctttacatacaaggaaatcaaatattagtcagtaagtagtcagtactcacagaatccatggcatgaggaagggttcttttcaaaatggattcaactgtagccttctgaacatttttcttcccaacgaaatttacaagaatactctccggaactctctttccagggcgaaatcccgggatctgtatattttttgccaatagtacataatttaaatgcattcactaaccaaaatcatgacttaataaagtagcaataaccaatattatcagtagctaataatcacttagtaaattatattagaagtatatatggtgaaacctaagcaaattcaatacaatcatattcacctttgatagcttcatgaactcgtttaggaccctattgtagcaatcatcacaaacagcaggaggaacttcaatggtcaacttaagctgcagagacagataaaatagtagctaatatggtcaaatcgtctagtaataatagtaaagggggtaaaagagaaaatggttgagcgtgaaagagcaagtcctggctgcaaacttgtgacgaattaacacatttagaaacttcacaaaggacagaaaaattaaaacaagtcttaagagaaataagttcaatctctctagaaaacactcacattgagtcactatcatgaaggagaaaaatacacttgaaaccatgaaaataagcattttacacaaattgtctatgtaataagtaaaaataatagatacccagttgagaagactaaaataaacgttgagaccaaaacaaatggtacaaaattaaaaaagaaaaattatgactcactctggagttgggttctacagtctctgtaacgtttatagcagccgggagcttgtcttttcctggtccaggagcaacggaagaaggagaagaagaagagggggaagctaaagccacgaactgacagaaatttccatgaaactgacagaaatttggttcagtgaattggcttcgacggagatgaaatggaagtttaagagaggtggaagctctatccttgaattgggtaaaaggttgtgataatgaaactgagtttgcaggagcgatggagtgagaaggaagagaataattgaggttgagaagaaccttagcggagctaaagatgggtctggtaccaatacagagctccattcttgggggctttgttttctttttttgaggttccgaagagataaagtgagactgagctaaaagtatttaaggatagaaaattaaaatgcaacatgcgtctttgagaaaaaaaaaaaaaacatgttgttgtgacatcctacgtgtcaaacagtaccggaagatggttgaactttgatgtctctaaatgatccatacaccaaatgtcaatgtcttagacacaaaaatttagattaaacttttaagacatactcgctcgctagattagcgagaataagaaaatagttaagtatatataagaaagacagtaaatttatggtagttcattttttgtatcgcgacagtaatagaactacgtctacttcgagtttctatttctcacgagatggtattacagaaataggctaagtatccaaagctccaatttctagagagaaaattagaaaaagaatctctaaccttgtggacaattttctgaatatgaaaaataagctaagggtgttttccttttataggtgaaggaagcccacaaaatgatgatctaacggtgaaaattagctcttgatggtgatggtcatttttcggagccaggtaggactcgctacgaataactcagagcttattttcgaaacactcttgggtgaaattttgtaacgctctgatacttaggcgtgctacagtaatttttcaattacagtgccatctttgctaatcaacgaaattttcttgaaaatcatgtcaaatgaaaactttagatttaataactaaactttataaacttttacacatttatttactaaagtcgggataccgtatttaaacttttacaaaatattcgaaatatatttagtcagatcgcgcaacgactacaaaataaaaccctaggtgtcccgagaccgaacactccaggtcgcatcgccatgacatgtacaacatcatcttagctcgatgctcacttttgtttagccttcgcctttcctttacctacgcatgaaagtacgattttgagtcgacagactcagtaagaaaagca

SEQ ID NO: 79056 - DNA, 2392 bp, Cannabis sativa
ggtagtcatacctgccaaagtcccaaaaaaagaaagcaaaaagaaagataccaattagaacaactgataatcaataatcattcacaaacagcaagagagggagatagagtaatacgttagctcgtcgccagcagctacgttagtcttggcaataagaacaatccggctttcatcatcaccaacactcatgatcctcgcgtagcaattgggcatgcactgtatcaaacatagcagggaacgaaaattgaagtgagaacaaagcatggcgattaagcaaataaacaactatcaacattttcgaaataacttaccgaatgattgattagacgggctatgtttcctttgtcagtggcatccaccactacttcttcactgatcttgaatagctgcatagaaggaaaagacagtaattttaaaaataaagattggattttttgctcttttcttaaacaaattagctaaactagagaaaatattcagatcagtagaagattaacatagacttacatagcagtctttgccttccaatctatagcgtgcctctctaagatcagcaatactacccctcacctgctctccgcgatattcaagaacctacagacaaacaaacgattctcattcttacaggccacaaaacagaaacaatactcttctcatttcgtatagaaagtgtctcctttgacacaactgtaaaatgaataaactgttgtaccatttctccttcttgaatctttctacgtgcgaagagtccccagccatgaatcccagatctaccaaagcaaactcgatcattttcggttctctgcagttatcatcgaccagacaacaagtcagaaatacaacctgggatgttctttatagaaactagaaaaggattcaaaacttgcctgtaaatggtaaagccgttctctgaacgacgaaaaagttttaggttcctcaacaacctgctgaaagaagagataaaacaagggaaaaaggaaaaatcaaattctctggcagtctcgcatataaaatctttgaaaaaaaaaactcaagtgaaatataatttcatgaagtacaaaatttaccataaaagagttcaaacttcgaattgcttcaacagaatgatgggaaggtcctccaactttgtgggtaacggtttcttcttcagttctctaataacaaaaagaaatagatgtgaaaaagaagaatagctcatctcatctcaccacaaaatactattaagcctaaacatgcaatgtaagagtagcaaactgaagccaaacctcataggaaattattatattaacttacctattataaatcattgcttcatacaagtttttttatcatccaatccagtaaaggtaagcacacaagtgtaaaaacatagcaaatatgcactgtgtgagaacatccaatcatgcgtgaaagattaacccttacgagagacaatgaagtcccgatttccactgatttcacttcaaaatagtttaaggtacatgggatttgataaaattataggactgaaatagaatgatttggatcgggataaacttaatattatctcttgtttggtgtcctattagattaaattactatcaaaatatcacttaaccaccagaaagtcctagtaacaaccaaaatagagaactaaaacgattacagaaataaacatctacggtgacttacctttttgtttttatttactcttttgtatacccggcatctagcagcagataaaggctcaggctcgacagtttcaacagctgcaacctcttctgctttaattctattggatgaaattaatcttgacccagccctcttcttattttggagaaggcttttggctgaaaaaacacctacaggtgtttgtatgattaaaacggtatctggatttggagccctgcacattgtacgaaaaggaacgagttaataaaaaccatagatggtactcacacaataaacgaaagagtaagaatatcaaaacgatctcatacctgtgataagcacaataagaaatcatctttgtggtctgtctaccattcttttccaaacagtgcatctgtaattattacatccaaaattgtgtgtcaataatgagagcagttgaaataattttcaaaatcgctaacagaccgaattcaaatgatctcacctccatgcgataccctgcccttgatgcgcacattgcatggtaataagtagaacacttgcagcattgcatgcaagaaccatggatttgctgacaaataacacaaatctgaaattcatagaataagaatcacttcagatttacaaaatacagtagctacccgaaaaagaaaaagccgcgaattgtcctgtccattaataatttggggtcctcatttaagctcgtaattgaactaaacagtaataaatcaataaatga

SEQ ID NO: 79057 - DNA, 3228 bp, Cannabis sativa
atactatagttcgaccccatctcatattgtaaaagttctaagatatactactacactatacaaagcttcttacaaacaaaatacaaatttactgttttctataacacccaaaaaagaacacattagttttaatttgtaatctaaccattaaaagattgcatacacctgaaacaagtaattcaaaactaaattaagttggaacaagatatccaacctcgtcttgattatttaaccaaatgagtggagtaaagatagccattgctgcaaaagataggccacaaactaattttagcaccaacttcggatgaccagttttgttttcagcaactactttcagagatacttgtaaatcagcatcagtaggaaaatcttcagtagatgacacagattcagaaccttctaaaaattggtcaacatcagcatacaacttctcatcatctctataatcataatcatcatgtgatatataattatgatcacatctacaatctgagctccattcaaaatcatccagggaattatttctagaacttctcgcttgattttcagaacaaactgagttcactttaattggatcctgaaaagagtgaacaagcttctttggagttttgaagatattgttgttgtcaacattgattggagtgtgtggagtctgattcaaaaggtttcacatgtattagctcttacaacaaataaacaaaacattaaaatgtagcaaagtataagatttacactaaaaaatgcatgtgtaaatgtaacttaccaaaggactgcttgtagctccactagagattctattactgggaatgctctgtgagaatcctaaaaattctttgtcaaaattttctttgttatcagcaaacttatttgcactaggttgctcatcagattttgtgttagagatcccacttgctttagcaatcccagagaaaaatccatccttcagagacacatcaacacctccattatcgtaattccaaagcattttatccgcaccactactatcgctatccaagtattgaatatcctcagttgataaaataggagaatcaatcaaggagtcatattcaggaaaggaatagaaaatctgtggtccaggtgatacagtagcttggtctccagcattcaatataaacttcttcttgtcattgtttcccactctaaaatttggtccagtgactaaatcaggtcctttatcaaaattcaacccttttcctgcagctattctccttgctgtttgcaaagcttccgaagcagccccctttacaaatgccatccgatcagattgacacttctccatctctagaattatccattgaagctctgagcatatgctccaggaatctaaacatttcatcaaaatgttaaccatttgaatagctgacagcctcttctgagaattcccttgttctatgccagcatttactatcctcagtccagattgtatcaacaaccttgcatatggttcaacagctacagcattacgttttgctaaagccgaaacaagccccatatgtgcattggtctgagtagaattctccaccaaagccccagcaacattttgacaaaccttgttaaccatttcatatgaagagaaacgccaactgtcgttttccacaagagctttcaagcaaagggcagcacctgaagtgaggcactcttgagatcccaagagagaatctgaaagaggattgcagagtgaatgaattacatgtctcttcttttcttcattaaagtttgggtcaataccatatcttgcaatagccataacaacctttgagcaagcctgttgaagagggaaacaccctgcacttgaaaccaaggtgttgattatggttttcattatggtctctatcagtggcactattttggcgccatgtacacgggcaaggacttcatagagtgaaatcgtgcattcgccagacaaagatccggcttctatcttctgagaaacttcagcaatgaagagagggatctccttagaatccaaatctttcacaaaagatttgagtgctctcattgcagctttgcgactatcagcatctttgtcaagatttttcaactcttcctgtagtaatggatatagattcctacccattgttgaccaccttgagttgcaaaaacaaataaataaatgatttgtcttctgcaaattttcaaacagacaataccaatctatttaacctactcaaatgcaatgtctaacattctcaaatgcaaaagtgtcagaagtttgtgctaaaacggcattttcttatatcttaacaacacaaaatttgagatgtctttttttgaaaaaaagaaaagaaaattacaaaatcaacaaattggctaagaaaagagaattcttcttatattcaaagaagaaagacccaagaatcttttaccaatgcaccttggttatttctcataatttttttttcaggttctaaacaactgaggattttgattattttttatctaaagaaacaaaaataaaatatgggtatttctgatcttgaaacataaacacatattacgaagaaatatttatagaacgaagaaaaaacaaataaaagaaccaagcagagtaaaatatttacatatcaccacccattactgagtctgcgaacacaaaattgcaagatatatcaagctatagccacaaaactaaaactaaattgatcagaacctctcatgtgtagctgaaaagagtttattagtgttcattaatccttaagccgacaaaagattcaaacttgaaactaaaaactcagtagttatacctcatgactgttagtaacaaagaccagtgagaagatccggagttagaagagccagacggccaaggacagtgtcggagatggtcttgtcaggtgagaaggaaaagggaagatcatcgattaatgataattttgtaggtgagtgtttggtaagtaagaaatgttttgtggggatttaatttaagtttgaattggcggccgggttcctctctcagtactgtctgagtgaatctatttcaaatattttgttcacaaacaaaaacaaaattttcaaatcttctcttaaattccaccgctatccttttacacctgccaccattttacctaaagttttgcaatatttctttaatatagtactttttcataaatgtacaacaaaaacaaaataattacaaaaaatgtgcaaaaaaaattattttaaaaatttatacattttgaaaacttattatatgaaaccatacatttt

SEQ ID NO: 79058 - DNA, 1947 bp, Cannabis sativa
atgaggccttttgggaaggtgcctaaaaacaaatttgtgagagcttaggcccaaagcggacaatatcataccaatggaaaaatagatggtgtccgactgtccttacattgagtataaccttttgctacaagatatgcctttaatctcaccacattaccatattcatccttcttggttttaaatatccatttacaaccaaatggttttacactttctagtaatggaacaacttcccaaaccttattgtattgcatagatttactctcttcattcattgcatcattccactttcgaaagttagaacttttcatgacacgatgcaagttgattggatcatctttcatctttcatcattccaatttcatatttatgttcttgaagaaatataaaataatctgagataatattttttctctctcttgtggacctccttaatggtttttgttcttgaaggtgctgaatttgttcttctggaacaataatctcatcttaatttgagagttattcaacattgtcttattgaggttccacaataggatttttaatcaaacaattcaaacttgtgacctcctctttgtgaggagaagtttggaatcactaagctatgcttgtgtcgacataatagtttgatgattagtgtatatatatatatatatatattatgatgttaaaactttaataagttgtttttattgttaaattttttttagattttttatattttcattataatgtgataattataatagtataaactgctcaaatcttattgtggtttggtttgaaatgaaagtcacaacccgtaaataatgactaaaatatttaatgttttttaaatggtgtatttttaaataggtcgtggccaggggcggacccacattatgacagtcccctctaaaaaaattggacaaaaaatgtatatgtattttagttagtcacaacatatatttgtattaaaagatgatatttatagacataatagtaagtttggtgtaatggttaaggtagattattaatatgttagaaagtaaatgttcaaattccactaattacactatattttttctttttaaatttatttttgccctctccccttttacaaaaaaaattacaccttctctcactttaaattttgggtccaccactcgtcttggcagaaaaattttcaacaacatctatgtcactcatttggagactcatgacttggcaaggaaaaaacatgcaaaagagataataagagttatctcgagactacatctcgagtttggtttatacctatcagcaaggtgcaaatgattaactaataacgaagtactaagtaacaaaaattcatgatttattcattatattaagaaatcaatgcaattgtatagtttgttagataaaaaataaaaatgagacatagacactagtctctctttttcttttttcttttaaaaaaaacataaattccattctctacatcaatcatctatttgactagtagagtaaggactacgtcaatcatctatacaattggatcactcaacatatagtctcatctctaaactcaccaaaataaatgcctaatacaatattcattctgacaagttttaaagaaaacatgtgagaaataaaatataagattaaactttactaaacgaaattatactagaagacgatccccttctttgtacactatttatagtgtattacgtgctatggaaaaattgctcaaagagaattatttccaataagcaatttccacccgtcagcctagttcccagtgatacttctctaaaggccttgtcttcatgttgcttgtttgggaaagttattgctcccatggttgtggaggagatcaacgtgactgatttcgtagcaaaaacctggaaaataccagtctctgtggctactgtagtggatgatgtgaagagtccgaatgtcttcaagttcggttttgaatgt

SEQ ID NO: 79059 - DNA, 1543 bp, Cannabis sativa
gtttttgtggttgctcatctgtgatgcaatcgcaacatcatttgcaatcatttcaaaatctacactaacattatgattggtgtacactttcacagaaatttcacaatcttcatcatcaaggtcaattactcccctatacatgttgtagcctccaccctggtgtatgattctgctaacatggtagttgtttgttgcgttgttgagttgttgagaagagtatgaacggagtggattggattttccattgaataaacgaatggtttgctctaacacagcacctccattcctcaaaaagaaaccatttatgtcttcttctactttagtattattcttcttgtagcatgaaaacatgatttagaaaatgaaactacaaggacaagaagattagttaatattgaaagagatgaagaaaacaagtggcaattaattaatcaatcactcttatattcacaactagcagagtttaatagtaatctaacaactgcaacaaaaaatattatataattgaatataagtctttctacgatcgttccaagaaattaacgagaagaatcataattaattattaaaattgacatgtatgactacatctaaaatgtatgggatggttcatctctattggagaacattgtccatatagattaaatgtaaaaatattgagtaatatatatgaacatgaactactctacttattactaattggttttgagatggacggaaccccatgattcttgtcaatctcaaactcaaagcaagagaagattagctccacacattatcaaagtgaatcataaaaaacataacataacaaccataaacaaggaaaacaatattgttggggtattaatcaaatcaaagggtgttcttggatttgatcaaaatgagagctttggcaacttccaccatgttaggtctctcttcaacactcttattggtacacctctcaaccagcttaccacattccactaattgacatcttatctcttcatcttcttctaacgacatcttagcctccaactcacatttcgatttatgattccaatcatatctggaaccattattgatattatcccaaaatatttttccacaagattttcctgttaataattcacagaacagaaatccaaagtcacagacatcacttctttctgtatatcgtccttgcgttactacctcaggaggaccgaagcctttagtcccaaaaacttcagcatctacatgagtttccccttcaggaattggaattgaaccatagaaattaaagagcttgggaccatagtcttgatccaacaacacttgtccactatggatatctctgtggatgaaggtctttgaatgaccatggtggagataagcaactgcattggctatcccaatcccaattcttaacttggtctcaaatggcagttggggtggcagtaacagtggtggttcaattgtatggatgagaaaactagagagatcaccttgaatagggaagtaatcatacaccaacataggccactttgtttcaagacagtatcccaagagctagatcggaaga

SEQ ID NO: 79060 - DNA, 3937 bp, Cannabis sativa
ataaaaaagtaaatttttataattttttcatatatgtgtaatttttacaatatcttctgttcatttgaaaaacaaactatgactaatattattttaaatctatcagaaagaagaaaaaattatgcttattttgccgtacggctcatatattatgaatgttatttgtgagatttttattatttagcagctactaaattttaattctatgatagaattttgataatttaatacaagggatgctctccttttttaagtaaaaaagttttccaaatttaaaagaagatttttggaggattccccctccgagctgtgaaatcctttatatggaaccattttgttgctgaaactagggccttttgcattccacaaattaaaaaattacaaaaatatagttttatggaattttaaatattttaacaattttttttaattttatttaaagaaaatacggtctttttatgttgtactcttgttaatttgttgattttttgttatccatatattatttttttcttattatttagatgttattttcatgttacttttatatagtttttataaaaaatcgtaaaaatatatataaaacaaaattctttaaatgtaaaaatatattttttttaaaaaaaataatacgtaattatcccttcaattttttttagttaagttaaacaataggcaaaataaatagattagatttatgaagaggagacgacgtcgtttatgacaattggctctctaagtaagtagtatgcaaaccaaactaacataacatacgaaagaaagaaagaaagaaagaaagaaaggtgagattgtgcctttcaacgttcaaacttgttttggcagcccatccttcattgctattattaattctttcccagttttatttattttctataaatttcgtcgaaacttcactctttctccttgcttccaactacccctcttccctcttccactgggtcctttgctttcctatccaattcaatccatctcttcgctccatatttgattatttcaaattcaaggttagtactttcttcttctctcttttacttctcatattactaggtttgtttttggtcagtaacatcaccgtagaattttttatgtcgtctgctaattacaaacaatttacaattgttcccttatattgagtttttcttttacctttatctgttgttacatttgggttattttaatttgttattactattaattgttaaggtttttttttcggctaagttcgatagatagatatttattgccccctatttaaagacttgaaatggttggtgtacccagttgcgtctggttggaaaggatgagtggatgtaatgggctttcatagaatttgcttttgtaaaatctatcaatttttcattttgccaatatctgtatggataaaggaatggtccttctggttgttatttttccatttaaaaacatattgtgaaaaattgcagaggttttgttgaccattgtgctttaattttgaactttaaattcaagatttgtataatgataatctttttgagttgggacgaggggccatttggatattttgctctttgattaaggttttgagtgttgagtgttaattgagtttgtaatacttttggtataggacttggaagattttgggttcaagagcagagggatggctagtgggattggtggatcaccaagcaggccatcccaagacccttcttcccctgctaataacaatggtgatgcaggtagctttgaatgcaacatttgctttgagttagctcaagatccgattgtgaccttatgcggccatcttttttgctggccttgcctttacaaatggcttcaccttcactcacgctcgaaggattgcccagtttgcaaggcccttattgaggaggagaagttggttccattatatggtaggggaaagtcatcaactgatccaagatcaaagtcaattcctgatgataacattcctcaccgtcccacggggcagaggccagaaactgcccctcccccagacccaaatgagtttcgtgatcattacggaatcatggcaggcatgggaggcatggcaggctttggaggttttgctccattggcaagtgctagaatagggaatttcacattgtctgcagcttttggtggtctaatcccatctttatttaatattcagatgcatggttttcctgatgctggaatgcacggtggcacagccggttttcctcatgggttttctaatttatttcacggtggcaatgtgcataggtaccataggcacccaactcaaggacaacaggattattttctgaaaaggctgcttgtgtttgttttattatgcgtcattcttgctcttttgtggcagtagattaagaacgctgtcacggctgaaattgctaacggtggttacctagggtaagcatatctttaaatctgttagcatatcttgtccttgattttctttttctactagtattctattccaggagatgatcacatagtgatttagagaagctttttattttctgttgttgtttatgtttttcatcagtatgtgaaatatggctttcgtgtgttcgttgtttgtagtagatgtaaactaatgtatatgtatacacaatgttgttgatgggcgaaattttgtgtgttctctcgactaggatagataagtgctgttgtggtagtcatgtaactcttaagccattttgctgttttgttttttcttcttcttaggttgtggtgaatttcacaaactagcttgttgatttatgaaacggattctactatttctgaagttgctttcttcgaatcgttgatattggagttaaattttcttagttgggtagtgttttgctttcttcttcattgacaagagcaagtactgcgaatcaaatgctagtttttttagggtgcatgttaagatttaggtaaatacaaatgatttcagttttaataggatatcataaaattagctttcttcaatgtaaggttattgacatttttgtgttactgcaagagcaatggagaggtggttcttgttttggttgaatgtcaatacatagtgttgtgcaaagtttgttttggggttggttccgatcgacggtagacagttctgtttttcacactaatctttgaaatgtagctcagttttctcgtttctgtgttgaaatactactatatttgtgtttttattaatctattgtttatatagaagatttaaaagcttaaaataatgaaattctggtttaagatagtttactaattgaatagggaagatactagcatgaaacattttaaatgatcgaactatattcaaattcttagttttggtcggtttagtaaatgttgtagcaaaatctgagtctttacattaccatctgtgatcctaaccttcaaattttgcattctattttttatactttcaaataatttttatagttcaaacttcaaacttcaataatgttaatttcaacattaacttggttattgttattaggctttccaatacatttaaattccctacttatcagattgttgtaacatttttatgttaactatagtaatttatcatcttctgcacttaccaaaatacattaacatgcagagaaagaagctattcaagttcaaaattccaattcatcaagtccattttcatgatttccctctttcattaactttttttcaagcactgattgttcattaggtttcaaaactcgctaaaacaaatggcctcctttgaatgtgagggcgcgcgcgcacacacacacacatgtactagtattttttttttatttaagcgtttatatattacacaatgtattacttgggactcgaaccctcttatgtgttagagattttataacaatggaagaaaatcaagatttattacaactctattgtaaaataatacaaggactaaaataagagattgattaaatatatgcta

SEQ ID NO: 79061 - DNA, 7420 bp, Cannabis sativa
cagtgtaattacatggtcagacaaatatgtcaaattatgtaattaccttcaactataaacaaatctaattttattgtggctttctcaacgcaccctaaaaaatgcttacgtgcttttttggagggtgcatggtagaagcactgtacataataatcatgtgcatgtgtggtgtaacgtggcacattgagaattagctgtatgattccaaataataccctccaaagtaagatttctaaagaaaaaaaaaatttaataaactttacaggctaaggaaccgggtacctgattcttctaatacaaccaattaaccacagccacgtgtaacattgttacctcttctctatatattgaccacgctcaagtccataaaccaccaaaccaaaccaaagcagttatagttttacgctctgatatcttttgccttaatttgcctaataattttctcgagaaaaatacatcccaagaaagtgagggaaaatgccgagtgagggcacacttacctgtatagatatccttttggccatcattttgccacctcttggtgtcttccttaagtttggatgccaagtaattttattatatattcacccttaatctttaattattagttaattacttgttaattataattaacaagaaaatgggtatgatcaaaaattgtatactgctaatatgattatgtggtatgtataaattttcaggttgaattctggatctgtttggtgctgactttgtttggatatcttcctgggattatttatgccatctatgccatcactaagtgatcaaactcattttgtaagtatacctaactctctttatttcatttagtagtttgcatttaaagtaggattttttttatctttaacataacaacctcttctttgaagaatttttagttatttttcaagatggaaaatgaccagtggccatttttttttttctgagagtaattggatagagatgtaatttggggaatttatatttttatagtttttaaaggatttgtaaaaatatagctttttctaaaatatataaaaatattatgagaaaattttagaaaaaggttaagaaaaatatatatgaaaatctcaacctgattttcttatattttttaacttttttttttatcaatttcataaaataatttttttgaaaaaacaaatatattttgataataaaaaaatataaaaatccataaaatttgtaatttccacttataaatttatggttgatgaacatttcttattcttttaattcacccctaaaaaagttccctattttgttagaattgctcatgaaattaggacaaggatgctattctagcatataaagcatgtagtactttattcttacttaaaataataaactaatttattcatgtcttaatttttatttctacagagtttcatcgactactgtgaagaccatgtttgtcttgtcgttactgttgatggatttgatctaagccgttggatttatttggtgtagtatatttatattagccagatgaacagttgattcttcctctagagtgaatgtgttaacttagtatcagatattgggtttcttcagtttattttttatttctttatttgctgtaaagtttggttgttggctctaaatggtaatggggtccaatctgtggtcattgtctcaaattaggatttttatttaatattaaaatgtaattgtcatgttatgaagagttatccattttatttaatttgtctttggaggaaataatatcatcttttttcgtaattatacaatgttattaagttgcgtttttgttaagcaaaccaaattattcaactaatgtttctattgatgatacctttattcttaactttattatgaacaatctcatctttcggatatggtatcattataatataatcaaaaagacaaaagggttgttcaataataccttctcttatcttttttctttttaataatcttattttaatagaagcctaaacgtaattttcatctacctaatactcatatactagctagtgtgatacacacatgtaaatgtagtgtgatataaaagggttaatgcttcttctatagtccttatctaatacaaacaaatttgtaccttgagcctttcgattgcgatcaattgattttgactattcatcatgaaaatcgacaatggaaagtgtccacggtccacagtccacagtccacttcttaaaactttctatatgaattggtttggtgctttagttaattaggaaaaagaagttattaagcacgtaagaaagacaactacataaaacaaacatatagcgttaccatcccgattagcaaaatgcagatgcaaaaatttaaaatccacaattatatagattgtatgttaattcagaaataaaagtaactcatccaataaaatacaaatatattttaaaacaacaacaataatattaataaaaaataataatttattttattttgatgttagttatgtaaaaaaaaaaattaataaatattaattaatttaatattaaaaataactaatctaaaataatcaatacaatacgatttgaattaaatttgaacagtgtagatccaacggattgaattaaaagaacaccccacccacatactctctacttgtttcagtatccggaaaaaaaaatttagtctaattttttttcatattcatgtacgttatagctatttgagatatgttacaaaattttaaaaaattcggaataatttacaatatattggtgtgtcccttttaaggaggtgcattatagaatttcccaaacatttttatcagatttttatttttcaaagtaacccttagcagttataaaaaattaaaaaataaaaaaatcacgaatttaacgtgaaattttacttttacacttttagaaccaaaattcaaacacgtctctaccactacaaattagttaactatggcgtggtacacaccaaatgttttcatttcctttaattatttatttataatttttttctccaattatgatttcgagcttcagtagttagccagagaagtcttttgttaatgccaaaattagtttgtacgaaatatatgttaaggaacaataaaaccttttagtacacgacctaggaaagcttcctttgcctcctcttcaaacaacagtttaaacctttttttttaaaaaaaaaaacaatattgttatttaaaatcttttttgggtcttcaaggagggtgctatggccaactgtccatgccgtgttgctatatagaaaattaaaatacactctaaaacccatatcatatatactccaagactttgatgtctcttcaattcaatctataaaaaaatatattatttaggaaatttcgtttggattggggcccttaaagtgggagaaagctactgactcctctcctaccccccgtgtaaagaaaccaaatccaaattgataagtttttactttgtttttaatttaagaaaaaagagaagagggagacaactggaacaggtgatatttgaggcatttaacagtaaaataacaatgttggcatttatttcacaaagatacaaaaagatgaagatgaaaagaagaagtcttatcctttgaattgccattccctacggcacatggggcaatgagcctgagatgtttgtgaattcacccattttaagatacaatgaagatggaaagcatggttacatgcaccccatactgcagcaaaaccaaccattttacaagtaagaaaaatatttaggtttataacacaaatattcatataatggtttcaaaatgcttaaagaatgaagattgaggtaattctaattggtctcttctcaggtctaaaaggtaaaagatgaattacaaccagtatgacaatcccatctaattattgatcagtttgttccaaccaagtatcaacttcttaggatagacaatgagcaccaactactaagtaagatatatattaagacgaaactagttattgaattcattaggagcatgaagaagctagtcgattaattgtagcgagtaaaaacttacttaatgggcaatcatctccgggaagtttacaatcaggacaacaaccatcaaatgccatcctgcaaattccacatgtttcgtcctgtgcatcccaagtccatgaagcaacagcatgccacctatgaatgaaagagggaacacaaattatctccaataaaatgagacaaaataaatcagcccatgaattgaatgttaaatgaaaaataagcaaattagtagtgttggaagatcaacatatccagttcgtgaaatcaattatgatttgttctactagagatttctagcatgtgtttcaagtaaatatttataacccacactataaattgaaataataacaatacttactctgttttatacagcagcagatatttcaaacaagctgagtcaagggaaaaactgttcgtatatagtgcatggtaactgagattgaatttacaacagaacttctggtgttaatattaccaatcaggcaacttccaaatagaaggaaagggcttttccactgtttaactaaaatacaaactaatgagaaagtgactgaaagaaaaacatttagactggttactaacagccaaaaaactaagaaatccattgtaggtgcatttagtaaaggggaaaatggatgttctgtctcataatttgttcaagaagataaaaggcttttccaattagtgtaccagaattaataatagacagagagaatcttcaaagcaaatacattcataatgatcttctaaagttctttaggactatcagttataggcctctctaataggcaaacttacatgaagttgacatcataaatctaatttaatgagagagcagagaatagagataaggagcagttatatacattgcataatctgaatttttaagtcaaactagtcaaacatattatatatcaataaggatacgcaagacattgaccttcatcctgttctcctgtcctgcaacaaaagacctcaatttgaaaatgtccttaaaatatttacacatacataattaaaaaacacattttgtttttggcttgcttgacatcattttttttttgtgtgtgtgtttttgaaatgaattgaatgagtgaaatcttctcaagaaagaaagagagagagatttaggtaatacccagttggacaatgccatagaatgtgtccattataaattaaactaaaaataatgaacaaaatgatcctaaaggtgttacctagtataccaaactcgagcagtaccttacgagaattgtcttagcaaaaattattaggggctggttgcttgtagatttggaaacaaccttatcaattcaaaaacacaaatagtgagcggcctacaaatacagaattctcatttaaaaaatttcaggaattaagcattcaatattgaatacatgattgaaactctatcaaatgaaattcacaatcataagttaacacatcaaaataattcttagatccctcccactctaacttttacttgcaaaaaaaagcaaaggaatacacactagtttaactaaacacacgtcacactacttgataatacaaagaaattgctattaagtcttgcgacaatatggtgatggatatggcaatattgcaagccttgcaataaaccaaacagctaatagcttatttcgaattgatttattcatgagttgaagtttctgatacacgatcaaattacacgtataattacaatatagcttttaagcatttagaaatatccatagattatacatacattatagtgtaagttgtctgatgtttttaaaacacaatcgaactaccaggaggagggccataaaaacattgccagcagaacaacaatccagaataaaagtcaaaataagctagagagtatggccatgagacatttcaaaattgcaatccaaaaatctgttaattactaactaatcagccatagaaacctttttcaagaggcatgaatagaggtttttcaaacctatcaatttgctattgtaaacaatggttgtctaatgtcctacctaattcttcttcaaaaaagcttaagaacacattctatctatattgatatttatgtaatacagtggagtggattacaactttaactacatatactttgactagcacagaggctttattgaaacattggaatatcacatcaccatccttagatcgaaaataaaccatgatttaaataaaatgagaatgaaaaccaaacaatgcagtaatccacaacaataactcaaaaaaaaaaaccaaataatttcactatgctaaatgaaactgcagcaaatttgaataactaaaaaaagctgtaagtgaaaaaaataagtaaacctggatctgctggaaggaggcaataaccgtagatggaagcagtgaatgatgcttggatgggctgtaaaacgaaaaggagaaggaaaacaacaatttagatggttgttggatgattgaaatcatcttcaaagacgcggtaaaacagtgaggcgcagtctttagggtggagcggttctcaggccaagaggcctcccaccctttttttcttaatatttatatatataaacattaaaaccaaaacacaattttgtgatgaaatgacattttctgctaccggtgaatcatttctttcctggattcacaagattgagaatcccatttgaccaactatatacaattcaatagcaattattcttagaccataattaacaggttttgaatgaaagaaagtaaacgtgaaagtatccctctttgacatttcatcaaatacatcacaaacagttttaatctatcattcgttgacagcacaactacctcatagaaccataatcccaagaggaaagggaaatattatcatgaataatgtggtcacagaaacaatgatcgaactaaagaacataaaatacaaaacctaaccgcgaaaaaattagaaaaagattcatattggtagaaaaatcctacccctaagaactcgatttagtcattgcgccatttttatatcgatcctagagcccttaaattgcaaatgcaagatatcacacattaacgaggaaatgttgatattgagagaaaaaagcagttggttcatatgaaggagacaataaaatggtacctgaagaagtagccagaggtaatagcaagtgagagtggagtagataacaatggcgtctctgaagagagcacaaaaattggctcaggagtggagagtagagaagaaaagaacagaaaagaaaagtgtttaaaaaaacttaaaaaaaaaatctttaaatctaacaaaatttagtacatgttaaaagagaaaaattgttaattagtctttttttttaataaaaatctggaaatttattaattaataaattcgttcaaaataatagaacgcacttcaaaggaacaatcctccaattgaagcacacaacttgtag

SEQ ID NO: 79062 - DNA, 1673 bp, Cannabis sativa
  modified_base (1479)..(1493): a, c, t, g, unknown or other
acaacaattttaaatccaaacaaaacctaagttcgcaataaaaaaaaaccacataagattaaaaaaaatctaaaaattcctcctatacctcttgaccataatagaaaatattcaagctcaattaagtttcaacaatttttcaatttagttgcaaaaaattaaaaaactcatggtcaatggatgtacaccaatacaaagaaaatataataagaaattcttaagaaaagtttgaagagaatatataaatatatataaaaaaaaaattaataaatgaatatataaataaatatataatataaagatatataccttgagatggagcccgaccgatgaactctggctgtcgagtgggtgtagcggtggtggttatggaggtaagaagtccgatcgtgtgggtttcatgggtgtagaggctaggcggagctagagacgagagagaggttaggtgaaaaaccccatcaatgtgggtttgtcagtgtgggttcgtcaatcggtgtggattcgtcaaggttttgcaattggtgtgggtaaacaattttatttaggttttgtaaatattaaaagttagagatgagagaggtagtctgaaatgagtatgctaggtcaactgaaatatggtatatatgtgagagaaacgattttttaatgggcccttatacccgacagtttaaaaccgttgggtgtagtattgatgacggttttaaatcgttgggtataagggcctaataaattcacgaatttcaattaaaattgttgcctattcctgtaattgatgttatataccatcgagaatactaatttttccacaggatgttaaacagttacttaatttttttttagtgacgatcctcccaaaaaagcatttttaagactggaattctgacttttgtagtagtgtttgaatttctatatatgctacacaatcctttgattcgtgcgttagggtttgtcaagttgatcagactaagaaaaattattttattgatttatatgattgggaacataacttagcaatatggaatctatgagacaattcttactagtaaagtcagtagtactcttggaacaattgataattaaattgggtaaaataattattaacttttattctctttaattatgaattgttaatagagggttgatgatgtatgtaatgattatatcaatggacgttttattatttgataaagtactcagtaaaaatatgtctataattatcaagagtagagtacgtatttatagtgaggtattcattagattaatatatataattattgaatgaaagaatttttttatcaaagaaaacgatttttattaatcaacaagcaaatgccacagccaaaattacaactcagcagcgaaatggtttttattaaatttttaacattataacatatacattaattaagtcactgggttgaattgtctctacaaatttatataatgtacatatacattacataataataataataatannnnnnnnnnnnnnnataataataataatattatgttaacaatatgagaagtaagaataaataaaaacaataacttatatagatgttttttaaaattcaattgtatggcttccataatgtaaacaaatgagttttccatatatatatataaagctatattgtaaaagtatgtatctttataatatataatgcggt

SEQ ID NO: 79063 - DNA, 5953 bp, Cannabis sativa
atagaataatacatatttatatacagagttaggagactaaatatctactaaatatctactaaatatctaactctcttacagctaatatacacctaatatctaacagagacaaataagaagcccaaatgtaacaaaattacggatggaagatcaatgttcttctgtgaattctctacaaaagctagggacacattagcttgtctgaaaacaaaatgcaacaaatacaacaaatgtaagaatatcaactggtccccttctcaagggtgtaattctataggcaacaaggataaaaggtggtcactcatcaatttaaatatagaaagaaaagccacaattcttgacaacgtattgaggtgggaatcaaagggtggaagtgcacaagatttttatatgtttggtagagacacacatagttgatgctagaagcctggaaaaggtataatggcaggatccagaaaaggaataagatacattattcaattaattagggaatgaattagcaaagtaaacctgtcaaaagtttttaaattaatatagggctgaagaagcattgaactcaagcttggtaaaaacctaatgtcatcaggagacaaaaggtgatcattttggtacattggagtaaaaaatatcacaattttgtccatgaattcagcctacatagttgaaacatgtgcttctaaatgtgtaaaaccatcagacgtcagtgaagctccctatattttctaagggaaatccttccaccttttccttcaggcatagaattacgtaccgaaaacactacacaaatttgttaaccagaaaataaatatagagaacaccaaactgggcaagttcccttacttattcttactttttctcattcaaaccaacataaaatgctcaattaatttggcactaactatacaaaggtgaactccaaaaaatattaaagtagaatatagaaataacctgtgtagcgaactagaagtcaaatgtacttcttcaagatccatcattcctttgtgcctctttctaaacgtctcaaaaagctcatctctaatagacagaagctgaggagaaaatgagttaattgattcatgttttatacatatacatatacatatgaaataaaatatagatttgcttaaattaggtactgaaattaattaacacgagatggcacttgctatagaaaggaaaaaaccatagtcagcataatctctaggaccgatatcatcattcctttcattattaaattaaaataataggagtaacttttgaaaattggttattgattatatgtttataaattgggtagttcaagcagtgatgcttgtggtttgcacttttctgagtactacatagcaagcgattgctataatttcttgatccttaaatattgtagggtttttagacaaggactccaatttaaaagtttaagagataacaataataaaattatatgtttatatgtcctggtgaccctactcatgataaagatttgaattaaaacagcatcttatgcaaggaatcgagatattgaaacatttgcataagcacattgtggtttgaaagttttaaaagaaaaaaattggaagagtgccaaactgttagaccttgtttggaccttggattttaccaatacaattttatgagagaaaataatagggaaaaattaatgaaaaatgtattaacttttttttcttttaatattttcattttttgaacatatttataattgttcttttttgataaatttcaatcaaactcatagcattgatccaattaccaaaactctatcatggggtttatttataattgttctaagtattaaattatactagattttgttcaaaaaaataaaaataaaaattatactagacttaagttttaatttttctagaaaaagaattcttaatttattgattcaatattaacatgtttggatcaatttatcaatattttgttaacatctatttaagctttaacaccaaatatcattagttgattgagaaaactagcattggggaagcaatatattagccaactagcatcaagtaactaaacaaaagataaaggtgcagaaaacaagaaatacataccggttgctccacgtggtcattaaaaaagctgactgtagaatcctttgcttcacgtatccaattgtttatgtcagaacttcccattagactactatgttttaggagccacatagaacaaacagagaggccaactgcaccacatgcataatgaatccagtatcgagttacttttcttggtttcttatgtttttggacctgattaaaatacaaaagtgtcaacgataaggcttctaacaatactgtctttaggttgaaagttcattgcctacaataaaacaaaccatccaaatccaagcgatggtagccatgaaaagtgcatacacaaattagcaaccagattccagatatataaatttatatatttctattttattaaagaaaacacacacaaatacacactcagtttcaatttttttttaaacatccaggatacagttgcagtaaataacaatccggccaccatcacactaatacattaacatacatccaactacgttatgttgcaatcttatttcagcatgataaattggcatgacagacacctaatacacatgatttaaaattaccaatagatgatttttataaggtaccgatttttaagttgatacacgaatcaaatccacaagctcttacagtgaaagatatgtaagactccaacttgtgtagattttgataaaccaagtcaatagcattcttgatttcaaaatctgtccatagtggtccttcttgatttacttctgctagcttctcaaacagtggtggaaatgagtaggtttcatcaatcaataaatcaatctgcataatcatagcatgaaaacaaaactataaatgtgaaatggaaccaattcctgataaatttgattagagaaaggtgaactttctaccacaaagaccatagtgataaaccaagaccttatcttcttatagttacctggtgctttgtatgtatctggctaatcgatgcttctaacttggaaaataaagcattaattttaaccaataatgataccaaggccttgtctggatcatttatgagctgctcccccaactggtcagcttcaacataaaactacagaaaagcaacaatgaatgatatcattttcaaaaaaaattattagagcttgtagaagaattatgcaaccatggagctgaatagcaacaaattttggattccacataaaagatcatgcctatatttgtgtacaggtgcatttgtgtctgtgccaatgcacgtacacttgaaaatggagattatgaaccagccaactatgttccagtggatgaaaagaaaactatgtatgaattgagtggtgtatgacaaggcaatgcctcaatttgttaatcgctgaagctaaggagggagaaagcaggctctgttctttggaaaactgcagtgatagaaactttctggactatttggttggagagaaatagcagaacctttgagggaaatagttttacaggtaaaactttatggggaaagattaaatactgcactgggtcgttttaggggcctacagtgttaaagacttgaaaaaatgtaatagtatctgacctatgtagagactagagactgggatagtctgctgtaaatcccaaccatgttgcctttgtttctgtggttttccaaccaaatccctatccttgtactttccggtttttataaagttttgttaaaaatatacataaaaaaatacaaaaggtcactcaaatcacacttataggatagaacctaattagggcattcttcggatgatactaaatgctctagatctatgtattcatacgcacagctaaatgtgtaagacataccagtaacaaagtttctctcatacacacatctgaacattatatcaaaacattcttcctacaaaaatttcaaagagaattgtgaaattcagaaatgaaagcatgtcaaccccccaccagcattcttacttatacaattcaatcaagaataaggttaaccaaaccagctaacctgagccagaaatgtcgcaagacaacattgtaagctacttaagacagctatcctatcagatatatgagcagatgcagaatgacttatatgctgcatggaagaaccttcagtaacagattcacgtatcaatcgaatcgttccatcacataaagcccgcggccctcgctcaaacagcataaaatatgcctttcgagcatttgtttcctgaaattagacattatacacaatcgatgaatatattatcaaaatgcactttacacaaatcaagaaaaaatatatgtataaaaaatgaaattagattccaaacgcctcttttcttatatatgaaagaaaatttgcagtaaagctgattaactaacctcagccctagattgccaaaactgcaagttcttctgaatgctatgcaaatttgaatatatctgttccaaaatatcctccaaaacaatgataacactagatgcttctgttttcaccctgtatgttaaagcattatagaatcaacaaagtaatagagaataagataaaagaggaaagaccaccacgttcttacaatatattggaacaattgattcaatgcttaaacaatcgtaaatatgtctcattaactaacgatcttcacaaaataaatcaacacaaaaaaaaaaaaaacattaagaaagaaaaactaaatgaatatttaggacaacattcatattagtatacatagccaatgaatgaacgtgtacttaacttcaggttactcacggacactcagaaaacaaaagtgtacattttctttgtaaaatcaagttcatacttcatatcactctaataaagctcataaagtcaatgccttcgttaacaaacttgcgcaggttaaccctcccctcccctcttgtaatcagtaatgaattaactcttgatttcgcattttatttctatagtctgtatgatttcatataatgacatatcacaaccacattattataagattatggcatttgagttttgattgtacaaaactggaataaaatggaaccaagagagcaaatgaaacaaattttcccatatcccagagtttttggttcaaacttgtaatgacacaatgaatcaacattactaagttttgtcacttagaatccatttgtggtatgcttaagcgacaatcaatatattaaattcatttagttctggtaagaatctgatacaactacaataatctaacattcttaacaacctcattgactaattttctccccaaccaaacaaagagagaagcagagatttataaggcaaaatgagagagtaagaaaaaaagtgagcatacagagtcgaatcgaaagctttggtaggaaatggaagaggaagacgcgggcgacgtctcctcgatcgggcgcgagaagcttggcggtaaaggttggtaactttcccgagaaaattggaagcgggggaggtaaggaaagtgagagctcgactacggacgtaattagagtaaaatgaaaatagggttttgaaatcggcggagtgattttcggcggcggtgggagatggaggtgagaggtcttccattttcaaacctctcaggtaaaggtgtcaaatatgaaatgcgcacgcgccctcccgttcttgcttcgttgattttctttgtataaataggatttgttctcttacgagaactgaactagtaaaatggagttgttatgtaaaagaataaacacaaattttggtttattgtttttttttttttttaaaaaaaaaaaaagtaatgagcaaaatgattgataattaaatgtcatgcagcctaaatgattatacattttaaaaaataaattaatgagtaaaaatttaggtaaataagttggttatctatttgaaaagtatgccaagctaatttatgtgcagccatattagt

SEQ ID NO: 79064 - DNA, 2785 bp, Cannabis sativa
gaagtggcagttaaaagactatcagggaagtcatggcaaggtgatgaggaattcaaaaatgagcttgtactaattgctaagctccaacaccgaaacttggttagacttttgggttgtgctgtggagggacaagagaagctacttgtatacgagttcatgcctaataacagccttgatagctttatatttggtttgtttcatcttatttaacattgtttaattgttgataacacaaaagctattttaaattttaactcttttaattattttttctggtttttcagattcagataatcgtgccttacttgattggaagactcgttatagcataatatgtgggattgctagagggcttctttaccttcatgaagactctagattacgaataattcatagagatttaaagccaagtaatgtgttgttggacagtgagatggttgccaaaatctcagattttggtttggcaagaatcttctgcgaagatcaaaacacggcaaataccaaaaaagttgtaggaacatagtgagtcacaccttctccttgtaacgtttaatttgtcatatcatgtattttttttcgttttttgcgtttcatttctttactcttttaggctaaactcacttatatttgttatgtaaaaatagtggatacatggccccagaatatgcaatggatggacaattctcagcaaaatcagatgctttcagctttggtgtaatcttgctggagatcattagtgggaagaagagttgcagctctcacctttctgaaaaggctcagacactcattagatatgtatgttttttgatttaaattaatattagctactttttaaaaaattaaaaaaaaaaataatgtaaggaaacgacatatggagattagaaatgtcatggcgttttgataagttgttttgacaggcatggcaactatggagagaaggaaaagaagtggagtttgtggaccctttgatgatggagtcaagcccaacagaagacattataagatgtatgcatattgggcttttgtgtgtacaagaagatccaaacgacaggcccaccatgtcgtcagtggtggttctgttaggaagtggaactgtatctcttccccagccaagacaacctgctttttgtgtgcctaaagtaataccgatcaatcagtcttcgtttacaaaccgttctgtatctgatactactgcttctattcaataaaagaaattgttgcttctggaactattaccacttctatatatatacatcaaaactttatatattatatcaaattttattattattattatttgttattaaattaaaatttaataatttaatattttataattaaattttattaataatcatgagtaatatcttttataattagaacatttgcaagaaaacattaacggccgaagtggattttcgatggaggaccaaggtggaatttgaaaggaatgaggaaggtggagcttgggaggaggactgttcgtctgtaaatgagaaaaaaaaaatcaaaaaattaagaaagaatagaaagaattttttttttaataatttttttaattttaaattaatttatttttatttttaaatatattatttacgtgaataaataatattttaacatgtacaatatcctacctacacattggctaaaaatatataaaaataactaaatggtaaaagaaagcaaattttagaattttgccgtaaaattttgagttttttaaaattaattactaacgagttatgtcctaatttactctagcttatatttctaagtataagtaaaaaaaaattatacaataactattattcttcaagaaaaactgatcattgccacattaattgttagggtcgttgacatttgtcaagttacttcagttgacctgcttagtggggagtctttattggaaaatggttacaggagaataatcaatgatattgcaatttgtttttttttgctctcacatgtttttgctagctagttttgactcggtcaatcgatccatcacaattgacaagtatgtgttctgcacccaatagctatttactgtgtttataatttatgaaaaaaaaaaagtaacacaaaattaagtgatcattaagaatgtttatcctgaaattgtcgttattagcaattataagctcacaaatcatccaatcaagaactgaagctgcatgagcaccaggtaataatggcacttacatttctcacgtccgtgacaattctacaggcttcaaaaatgacagcacctatgaatccagcctcaaaattcttctcacaagtctctcccataaaggaatagcaaagtgcggtcatcaattgtattccacctcatcattggcacagaatatcacaatgaatattccctctgccataccgttacaccagttgccaatacagtactagaatatctttctgttttgatttatgcaattgtattatgacacctgtcgtattacctatggctagtgttgttataccatgtatccaatattgctataaattgaatactctgcctcactcatttgagctgagttttacatatcctatacactccaaattttttcttggtatcagagtcgtactcggcctctacccatggaaacgcctgaaaaaggtgagtctccagttgctccgactatgagctctgctggaaataatcctatggtaacagggaacacctctagtagttccactcagctccctaacacctatcttcagcattttagcaccctaaaccagcccttttcactaaaactagacaaaaacaatttcactttgt

SEQ ID NO: 79065 - DNA, 2196 bp, Cannabis sativa
tgcttttctctattttcatccacaccacaccaccctcttgtctaaattccacaagtaaattttgagtgacttacaatctcagttactccaaaacagcagcagtagcagaacacttactgacttttttggtgtcacttttgttcttcttaggagactcacttttcttgtacctatgcttagaaatcttcaaattaagatcctcaaacataccctccaaagccttaatatcctcaataatatccacactttcatcattgttattgttattattattcttcttattaccaataataatcttctccttcaaactcttcattctctcaaccccattcttcacttcacctccaattctctcaatcacattctccattttcccattctcctcttgacaatccttaagctttctcttcatagatctatacccatcaagggatttcaaaagctgctcagaaagagtcttgttcctttcctgtaaagcagcattattattaccaccttggctggactctcccacaccagataataacaatctcttattattattaataatatccttatgttcaacagcacaagctttcactttccctaacaacatgtcgttttgtgctcttaaatcacttatcaactcttcaagctcagcaatttcttgaactttcctagaaagctcagaagccataatctctttctctttacccaaacttgtacacataatctcaagactcttcctagcagccaagctcatactcaattgtcgtttaagcttttctttgtcgtcgtttatagaagaagaacaagaagaacaaaccaacatctcatttggcttcttttcccttggaacgttactgcttggtttcagatccgtattgcatcttcggagctccggttttcgacccgaactctgagatttctgaatccgggtcttcaggtcttccaatatgctcatcattccggctaccctttgggttttccggtcatctttgctccccccggcctcgttgtgatcttggactagttttaacagaagcttaacgcttgtggagatgccttaaaataataacaaaaaaataaaaaaaaaataaaaaagttgttgatgggatttcgagaattctctgattgtttctcgggaaaatgaaaacaaggacattacattacattacataatattatatacatacaatgatatatgaatatgacattataattattaccttcgaaactgtgatcttctgatctttcggcatgattctgtgaagatggtaaatcaggagatgaaaaagctctaagcccactcatatttgctttttcccgggaaaatggatcttcagtaatgtaatagagagaaaagaaaagagacaaaattaatatttgagtacaaataataaaaagcaaagctttattgtatatccagaaatggtggatcaaatgaaacagagagaaaaaaaaagtgtttaatgtttgtaattttattaaagagaaatttataataattataataataattaaaaacaaaaaagagagagagagctaaaaaggagttaaaagagaagaaggagatattgctttcgcactctctctctctttttctttctctctctccaattagttaatatttaataatttattagttttattttttatttttttatttattttgtattttgtgaataatattattgtcatgttatgatgttgttgggtttgtttggtgattcgcaagtttctgtaatggttggctatttggatggttgtaaatgatgcacaataattattgagttcttcttcttttgactttttctttgccactcttctcgtggctccttttgactttttatttacaaaaatatggctataaaaggctctatattattatgattataataataataaaaatcatctttatcaatttatattcaaatataaatcactttatgtatgtataattcattcattagaggagaataatatttcaattttcaaccaaatgatctaatcctccacttaagacaattaaattaagaaagtggttgtatttcgattttttttttttgctatttaggattttctcttatgaattataacttatgtattattatgcttttaaattttttagtttgttaaaaataattgcggaactattcatattataaattagtctttttatctggttttgtaacacgagcaaccgtttagaaaatt

SEQ ID NO: 79066 - DNA, 2884 bp, Cannabis sativa
tttttttttttttttttattacaaatgggctgctgccctcattttagtccaagcccactaatgtggtggacccaacaaattgcttaaggtgattgttcaccgcttgccggactatggaaacctaagtctctgtatatgtatcaataatgcccatataaatagaggtaatcaatggcgacaacagctagatttaaacatattttcatttccactttcaatttcctcagactttgattatatttcttcgcaatttctctgctttgcatgtccgcatcagtgactatagtttcagaattcagctctcaggtaaacgtgtttgttagtccaattcttgttttatttccttcttgatgttaattgtaatctacttgcatcaatctgcatatgcatattaaaatatgataaagataacattcttccatgattctttaatatatttttttttatcaatcttgattctctaaaatattgatgaatataacattcctttatgattctttaaccttaaaactatgatcattcgatgtctacagtaaaaatggagaaacaagatgacttatgccaactcgaatgccaagatcaagagagtatggagcactcaatcgaatcagattcagagtcagagccagatgaatatagtactgattatgattctatgagtgatagcgactatgaggctgaagaaacctgtcaagaacaacaagagaaaactacttttgatgagctgattgctcccgaggaatcagtggtgtttaatatatttagtaggttgtccgtacattgtctactaaaatgcaaggccgtcaacaagttatggaaatctttgatcgaagataagtatttcatttcagaactccatttggaccgagctccttgtcactattttccaccatttactaataataactacgtacttgactcgttctgtggattggtgtgggtgacccgagaagatcccggtcttgtgatgaagcactacatctccaaccctgccacccgccaagtacttcatttgcctgatccaaatcatgctctgctacgttctcctcagacctacaaggctcccactattagtcgattaaagagttacattgctttgaatagtttctctcatgagtgcaaattgctcttggaatgtagactgactaatagtcaaggtatcatggaacatgctttggaaacttttgaagttggaagagatttcaattggacatctattgggagaaagacaggcttgttagatgaccctgattatgatgcagaggatctagcacgaatgatacacgtgagaaacatgggggtattgcatttcatccaagtattagtggttggttcgtgtaaatttttgcgtgttcgctctattgacgtgtgggatgacaagtacgtggttactaatggtttgcctaggcgtatttccttcaatatactcaaagcccattttatcgatcttgatgattgcttagctattgctgagataaaccaccaagaccttcacctcttgaaaatgacaaagtacgtgggtggtgtcttgagatggaacacgaagaaaatgattgttccactcacatttttaagcaaacagccctattcaaatgaaatagatcaagttgtgccgtgggggtttaaatctgatgtccttcggtttaaatttaaaaatgaagtgtttgattacgataccaaaacagagagaattgacaaaattgatgaacttgtactgcgtgatgaacagcttaaggtaggtgaatttgagtattttccaagccttatgaagttggaaggaatgataggaggataatggtaagaactggcctggaacagaattattagcaaatcaaactattgattctttgttcatgtagtgccttttgtaaatggggataatatgagataaacaaaatgtactagtttggaagttagttcatatatttgttgttatgcatatctttattttatttcatttatttcggaaacaaatgcatatctttatttggaagttagtaaagtattttaatttccttctttttcattttgtagagattttaatttccttttttcttatgtacaaagtaactattgaaaaaaatcaatatattgtcaatatttccattcatatgttccttcctattctttatttcataccaaatctttaatccagccaaatgtgagttatcacaaattgttatattaccaatttaagctattaaaatatgaaaaaaaaaaaaacaaaacaaaacaaacaaacaaatttgtgtcaaaatagcttgtacttggagaaactaaaattcacaatcaatgtaagatgattatatgtgggcacattagtaaccaaaaaactttgagacaatatggtgtcgaaagacaaatcattagtatcttaatattggatatgggtaaatttatgtgttcataccatttagattaattagatagtccaatttgatattattatttgagcactcttaggcaacaatatgcagtgatatggtgcttaagcccaattttagcctttacattactgcagttcattccttcttttttgttgataaaatctcattccaagttttgtatactagttgacaaattattctaaattaaaagattgattaacgactgtaaatgatgtaaacaatatcatttgctttttgttagttggcttttggtcacgagccattagttcttgtataaataattctcttaattaataaaatgtgtagagctcctttctgtttgttttttcttatttttctccgatttcattgtctgaaactatatttttttttttattgtaaaatattattaaaatattatataataataaaagttataatatatatatatatatatatattagtaattaacacattaattataaaaacaaacaaac

SEQ ID NO: 79067 - DNA, 8033 bp, Cannabis sativa
  modified_base (7208)..(7210): a, c, t, g, unknown or other
cagtctcagaatcatcccactagaccttccccaggcgatgtggaattgcacagcttacccggtatttcccgttacgaatcacgggactactgactgtcacatacccttttggtagtattttgaaatgtaatcttattttgtaaaattaattttggaatagattataaaagttttaatatagggaatccccgtacttatcagtggtctatcttttatatatgttatgtgtttactttgattacaccacacttttcataaattaataaagttagtaaaagattaagtttgtaaaagcacacacgtggcgtaataaagctccaatgaatcctgtgttccaagagtcatccatatttttcaaatcaacacccctcattttatccgagattacatacttattataaattttaaaggtgaaaggccttggtaacaatggatcttccaatacccttacatcttcacatgtaccaattatccacccattaccccttttaataatttccttgttccaaaccaaacttctccaaataaaagacagctttgactcacatttagcattcaacacatcaccacttggaaaatagctagttgctagaagcctgctacatagtgtatttggattacagatgcatctccatatttacttcgctaaaagagcttgattttgtaaccccaagtcacgaaaccccaatctacctttttccttgttttgcataaaaatgaccatttgtaccgatgtgttttcttatttctctctgtcgacccccaccgaattcttgctcccattcaatgtaaaattttaagagtactttttgtaagtcgaaaaaaacacattttttatataccgaaataacttgtgaaatcaccttgataagtactcttaccagccatagaaaatattgagcctcaccatccgtttacctttttccaaacttgatttttaatcgtctcaaatagttcttttttagttcgaccaacaaaggatgaaagtccaattccatagttatctaccaccatgacccctatcattaaagccaatctccttctaatattcatcgacactttcttttcgaaacacaactccaatttgtggaaattaaccaactatcctgaagctactgagtagtttgccaaaatatctcaaaaacatcaattttgttgttgagtagcctcaaaaaatacaaggctattgttaggaaaaaacaaaaatgacactcttactctattttggtcaaacaataatccatttagtctttcattcccctcaacttgttgaatcaaattagagaaggactccgcacaaaagagaaacagaaaaggagagagttaatccccttgccttaacccatgctgggaaatcacatgaccctaaatttccccattaatcagaaaagagaaactccagttgtaatacatgtcattaatttatccacccacaatttattatatcccatcttaatcatcatagatttaatgaatcatcattcgacccaatcatataccttagccatgtctaatttgagagtcgccttagaaccatttctaaatttatctttgcgcatgcagtgtaaaccctcaaaccccacaagtgcattatcatgtattaatcgacctttgacaaaaaacactttatgaatctgatattatctttcccaatgattcacacagtcgattttcctggagaccaccttatatattacattacacaaactaatcagtctaaatataataattgtcgttgggttatctaccttgggtatcaaagcaataatggtatcattaaggtaactaacatctgccacattgttaagtatattcgagcacacacgagtcacatttcactaagagtagtctaaaattattgataaaaggaacctagtaaaccatctagtcacatttttaagtatattcgagcacacacgagtcacgttttcactaagagagtagtccaaaattattgataaaaggaacctagtaaaccatatgctccagcagctttagatagatttatgtctttcacaactttaatcacttcttcctccctaaactaattcatcaagtccacattcatttctaaagtaactttgggttgaaacccccccaaaacttcttcaaaaatcgcctcatcaatagtcgacacagtgaaaagtgaggtaaaatattctcccacaatattctgaacaatagtcttctcattttttcaaacacccatactgtcttctagcccaataattttattattttttcttctcgttgaggccttatgatgaaatttttttgttttataatctccccattttaaccataacacccgattccgttttcgccaatatttctcgtctttttcaagcatgtgattaagcgtcttctcctcattttgaagatctagccacacttctagttattgtaatgcagtcaaagccccaatagacttgttaacggtagttatctctccatttaacctctttttcttttccttattccacttctgtagatctttcccacatgtagaaatacgttgacaaagagccctaacaaaaccaacatctcttttttttagcccaatatttctcgatgatatctcgacattcaacctccttgcaccaagcttcttcgaaatggaagcaccctttttattgaactttgccacacttgcatccgagctcctaattggaagatccaccacctgtgcccaatggtcgggctcccaccaattaagaattttgatagtagctccttcgaatctcataaacctctcttcgttaaacaagccacgatctaacctttccataacaccacctctcccatggccattacaccaagtaatagttgttttatccgacccaaaatcaagcaacctataattatctatagcttccctaaaactctccataacccttagggctccattcctaccaccaacctttttagaagagctgataattccattaaaatccctaataaccatcctagccccactagtttcccccttaatatccctcaacagatcctaagaaattttttattgagaagcatccaaattaccatagaaacctgataggttgatattttatcttataaatatagccgatttatgtattaatattcttaaattgattctttaaattattaattagagtgactttaatttattaggctattttaaagatgaatcatgcacttggagtcatttggagagatttaagtacattttggtggaaaatagtggaagtcagcgagcttggttttacaagccagaacttaatcgcaaattttgacaaccttggaagtagaactagacttggagctaaacatgaaagttttagatctcgttcccagctttttggaagatcttgaatcgtttgattccgagttggattgaagaaattatggctataaaatactaatataaacacgtgacagaatttttttagcaacaagctattgccgtggtgagcctcagcgtggccgcggcaaggatgcgaattctgtcgaatttcaaatttttattttttttaaacgagatatttttaggggttatatataggacttttagggttcgaattttaggatttttgaacttatctcatgtaaagttatagagataaattggggattatcaattgcaaatgaaatatattttttattattaatttgttatctttattgttggtaatttatatagtataagaaatttaattaattttacaaatagttattgaaatacatatataattcttttataagagagtttcaaattcgtcatatatatttttgaagaagaagatgagaatattttaaagaggcaatgtatttcgattaatatgagtgatttttctatcgatcctggattttaagctctaatttctaattacaattcaaatactcaagatgaaattcaaagacattatttacaaaaaggaccttgtcaaccaatacttgatgaatttcctccgatttattacgggacagtgaagtgacgattcaacattacatggtataagatatactcttcatgctagaatatagcgtcaataaaaattctttattttctctatgttgttatctttttaaacaaaataatacaaagcaagttggtgttcacatatttgttagagatggtttgagaaattagaagaaactatcaaagaaacttggagatcatgttaaagatcatttaggttcacattatgagtgttacaaaaagtgtgaatctttgatgaatcaaaatcaataaattcaatacattcttatgaaggaaaacaagatggattgagtaaattatcgtgttcgattaactacattagttgattgtgtttggtttcttttacaacaaggtcttgcattttgtggtcttgatgagtctcaaaattctaataatcaaggtatttttttttttgaacttcttacttttttggctgatcataataagaaagttagagatgtagctttagaaaatgctcttgaaaatcttaaattgacttcatcacaaattcaaaaacacatcataaatacatgttttgttgaacacagttagtgttattatcaaagacataagagatgctgtattttctattttggttgatgaatctcgtgatgcatctataaaggaacaaatagttataatatttcgttatgtggacaaaaatggatatgtgattgaacaatttataggtattgaatgtgttctaaataccacgacaatgttactaaaaacgacaattgctaagttgttctcaatacatggattaaacatatctagattgggagatcaatgatatgatggagctaacaatatgagtggagagtttaatggtttgaaaagtattatcttaaaggagaatgaatgtgctttctttgttcacttccagttggcattaacacttccagtggcaacaactttagtggaaagggcattctcagctatgaatattgtgaaaaataagatgcgcaacaaaatggacaatcttactgtttatcttgaaaatgatgtattcgctattatagacaatgagtctctcattcatcattcttaaaacatgaaaactcgtaaaggaaaactttaaatatatgatcaaaaaaataattgtattattttttttaatagacaatttggatatttgacttcatctttaatatttagaccatgaatagtaaataaatctgtcactttatatatataaaattgaaatcctatcctgggatgtcaacatggacactgggtgtctgggctgactttcgggaggtcatgtcatttcgactctttttagctctcaggctttggacttggacttttcttgactttttggttcagaatactgaatgatactgaattggaaacaacttggcagaatttatatacttattttggagcccccgaagtcaacctgggcgcagggctagggacccttcccaaagttgactgctatgattcggacactcaactccatgaatattttccttcttgtcacgtgtcaaacattaatgtccacgtcatctggactaattttcgtgtaaacaaatccattagaaacaaagcctggcgaacatccccaccaaaaaatggcatgatcaattgattattcatagcattcaaaaatatattaggaacaacaaccaacacccaatcgaaagattcactagacgagcaatcaaaattaaataaagtagcaaaataattttcaaacactactccaataccatcttgtgacaaaatttctttattcagacaattaacaattctcgaaatactgttcttatcaccaagcttcatccaactagatttagcaccaaaagtccaatactcttttttttttttgaaccacatcgagttctttctcagtttctcctaaaaaattaagatttatttattcattaagttttggcattcaattgttttgtatctcttttttcacatcttattttaaaaattgtttttgtttcttactataactaaacaccaaaagcatgaatttaaatattgaatatattagttttctattccatttgtcatattttgaacaaatttgttagttgatacaccaactatcttgttagcatgtttttgtttaatggtattgtgttatcgtatttgaaatatctatattatatttagaagcccaaggttcaaatattattatagtatacaatgtagatgaaatttaaaaaacttataagcatatttgagtaagttacaacattgattttctagacatcatgtccatgattacaggggatgttgagtatatgctcccttctttttcattttttctttttttaaaaagtgaatcaaatatataagcttaagatttaaagggcaagcaaatattttggttgcttgaatatacattcctttcccttaaaaaaataatgacaataattaaaaaaagaatcctctctcttgctcttgactcattccaacttccaagccaaaatagagaaatacatggtaaccatttccaacatggttttcattaatgaagacatttcttctttctttggagacttcattctcataccttaacataataatcaacaatagaggattatgacttctccattaacttgggttgggatggatggggggaccattattattatgtttaatgatgtcaatcacattatcatgacacatcctaaattatgtcactcactacctattttatacacctcctttactcttctctgtctctctgtctcaaaggaaaaaaataatcttgttggatttaaaaattaccaagtaagatggataaggatgatggttaaagaagagggaaaagattacatattttacacttttatttacttattcataataccacaatgtcatcattgtttgaatttgaatcccttgagaaaccatgttaaaataaaaagtggttgtctcaaattttattgcagatttaacactaattataatatacatatatgtattattcttttataatatatacatattagtattaatgttaatttggagttggagaattgtgattgtgttagggttttcactttcatcactaaactttcttaatccttaagcaatgtctactgtttgaatgtaagttgagtaaaagcttttgtggcactaaagtaaagaatgaaagaaaacaaaacaacattgaaaaaggagaatagatagagaagcaaataggtggagccatctcttgtttttctacataagtgctatgtaaccattttttttttttttnnnatatatatatatatgtaaagatatccacatcacatattatacacactcaaactccaagtttgatttggatggctttggttggaactgtaaaagagataaaatatttacttaattggcaatggcagttgcaaaaggaatctgggaaatgggcctctattaattctctctccacacgcatatacacatatacatacatacagtccaaacatgaaaaagaaacaatctttgctattttaaccctcaaaaacatcgattttgggagaatagggcaaaagggtatttgtcaatatttgtttttttatacatattggctaagagaaaagcaaattattaaaaaaaaaaaaaagtaccaagcaagctagtgacagagagaatctgctcagcctgttcacacaggaaaagaagccaggtctctctctctctcagcctaatagttttgtttttagattattctagtaaaaaaataatataattggaaactcatttaggaaaaaaaatgaagtcttttgctttttttaaccataaatgatcaaaatactggtgggtttgcagctatgaaatggttgaatggaccaaactaataaagggtattcccctaacccttcaagaagaagaaaaaagttgaaagtgagataaggtttttttgtattgaagggttccatcacagatatcaattgtagtggctagaaagatatatagggttggtgagtggtctcaccaaagtgcagaagataatcagtagtggtagtagtagtagtagtaggtcttagctgttagagcatctcatctcatctcaatcttcaattcaatttcaatggtaatg

SEQ ID NO: 79068 - DNA, 3772 bp, Cannabis sativa
tgaatctttgattttgttctttttatattaagcttaaatcaagataaaatcaatctaatagcatatggtattttattttcatactttatattaatcatttcattttttttataatgatatttaacaagattcaaacaatctcttgaacgcttctagcttctagggcggatactaattatataactaaatacatgtgttttgtacataactcgaacttactatatatttatatatatttttatgtagtgttgttatcattctctttagtgatggtgatgatttaatgctattccttcctcctttatcatcgaggttccatattttttatcttcatggataattttggcaggttgtgttgggtttacgattgtataataagatttattgttgtgtgctatgttataattttgttgtaagatgtaatgatgtattgattatttatttttattttttttttttgtaaaaaagtgatttttctgacattagggaaagggaatttgaaattgagatctcatttgtaaccactaaatgatgcctatcaacaagtgaaattaatagcagaactaaatggagaaacaaaataaaagaaggagaagaaaaataaccttccaaaaaattggatttttttaattataaaatattaaaaataagttcttttttatggtaacaaaattataattttcatcttttatttacaaatattgatacagaaatggattgattcgtctagctaatgtgtgaattcagcacctgttattcctaataatcttaggctgaaaaaattctttataaaaaagtacaatgctcaatcaataatggggatgaagtaattattaagtatgtttgaactgatgatgatgatgatgatcacaccttatgtatttcgtccaccatatcgtctttggcgttgctgaaacgaaactatagcctctgtaaaaccatctttaccaaaatcaggccagagttctggtgcaaagaaaagctctgtataggccaactgccacaacaagaagttgctgactctaagctcaccactggttcgaataagtagatcagggtatggaaactctgtgcagttagtttctagctcttgttcaatcaagctctcgtctatgtcttctacttcaattagtccatctttggctttttgagcaatacttttacaagcttgcaatacatcgtatttaccactgtaactaacagcaacaatgaattggaatcttgagttttcttttgttatctcttctgcatcagctatcagtttctgcagcgatttcgggagcttagatgaatcgccaatcaccgatactcgaataccttctctgtcatttacacaacaagatacaactcaaactgttatttatagttccttcaacagattatcatctaaaaaaagaggcaaactatataagttggaaatagctaagtgacttatattacaagtcaaagattgattaaccggacatcatcctttttttgctaagtgctaaaattaatgttatgatccaatctatagcagcaagtgctactcaattgattgagaataatacaattatacttctcaattcattttcaaaacacaaaaagtacgaaacactaccttgcaaaattgtccaattctgactttatcacctcctcaaataaactcatcaaaaactcaacttccacctgaatcacaaaaaagctcaataaataaagtttactattattgtaaactttgtcaaattaacataatttttcaaagtttatttctacaaatgttgcaatcaatttctcctttttctaacatatcactttctaataccaattgagaaaggctacctttttatatactatttgagacttttatctcttaaatttttatatgtactaaattatgtcccttgaatttttattgtggttaaaaatactctttgaactattaagattgttaaatttaaaaacttttgtccaattttagtaaaaaaaaatctaacatgaataaaagtttaaaggtcatgatttattacacgtcaaagttcgaggggcttgatttggtagatataaaaatttagggaaacaatcaataaaataataaaattgaatgaaattaaacaaaagtctttaattctaaccatcttagttgagataaaaattttaaccgctataatttgatatatattaaagtttaagagataaaaatcttaattaccctttttatatttctctaatactatcactctcttacgaaactacttaccaaagtcaaacaacatcttaagtcataaaagaaagaaagagaggtgaagttagttaccttaggtcgaatccaattatcgtaagaaaaggcgaaaacagtgagaaccttaatcccaaatctcgcacaaagctctatcacagctctcaaagactccacacccgcctggtgacccgccccgggaggtaaacccctctgcttcgcccacctcccattcccatccataattacagccacgtgcttcggcatcaaatcttgccggagcccctccggaagcgcctcttcctccggcgattttccgtgcagatctctgctctcttctcttcgagaaacatctgcggcggtcgctcggggaatctgtagcttggcttcgggctttgccgcagttgaaggcgaatagtagaggtgtgtttgggtccggggattgtgaaagcgtggcgaactctgtttaattggagcaagaacgttctcactcggaataggtaagcgcaaggataacattatcgttgttatttgatcaataagatcagctccaattaatactaaatcaattcaacaagttttgaacactgttcgatcaaacaaaggtttggttggaacaaaatatttataattgaatgatttgaatatgtaatgatcactagttgagtggggaagaaaaaacaagacaaaacatcgtttttggtgcatttgtggtaattctacaatgcttagaaaaatcttttttgagaagatgaacatgatcagaaatagagaatagtaactatttttcgaaaccagaaaaattaattggagccttggagtgtaaagatagtccaagtgatggggatgttaaatttgtccagaaatgagagttttggaggttctaacttctaattacgtaatgcaatgtataaactataaagtatatacaccacaatatatttatattttaattatctgatttcattggttcggagcaaaatatgtggtacacacagcatgaaagtgggttgtaccttaaaaaaattatatatagtgacacctgcgattgctaagctatgaagtgaaattttccagaaccttcagatttggttgtcttctctctcactggtttttagtatatataaactattccacaactttatatgaaaagtcgacgccacgtgtttcattcacccaaccattgccctctgtaaatgaaagtgaaatagcatgccattgtattgaggactctgattttcataagcaaaatagggacttcttcaattcttcattttagtgcagaagcttcatacgcctcttgctatggatgattacactttttgtacaaaaaaaaaaaaaaaagaaaaaaaacattgctatgacgtagctaggtgtcaaacactattatgagatagcaccttaaaattcgttaaccatttttctataattttaattgaaataaaataaattagacttgatattaaattacatcaataacaatattacacctcatcaggatactagacactatgggttcttttggtatgtcgtattacaccgtattgtattata

SEQ ID NO: 79069 - DNA, 3491 bp, Cannabis sativa
  modified_base (3162)..(3187): a, c, t, g, unknown or other
  modified_base (3374)..(3375): a, c, t, g, unknown or other
atatatatatatgtttctaataatttgtacattttattataactacactctcctacctacaaattaaaaatattgtatctatcactatcattattttcttaaatatatattcggatataatctataaaatatattttgaaagtaattaatttttacctttctttcaaaatttattatgtttacctattttttttaatcattctattaattttacccctatcacttcaccataatctctattcttctctaattaatttttttcccaactttttcacaaacctacacattcatttacaaataacacaaatatattatgtttgaaattgtatcttaattatgtgagagtaatgataatttgagtataatacttacaaaatgagatatatttaaattatattttatttataaataaatttaattaatgtatatatatataaaaaaaaaaaagtattctttaacttctccattttacatgaactctcattgcaaatggcaatggaaagtactttagaaaactccaaacttcctctccttcctatgtaatgaatactttcgtaagtaagccaacaaaaccaagaaaattcattcatatatataacccctctccccaatacaaggaaaaatagttaaggtttgttagtaagagataacaaacacaaaacttaagaatttcttttcttttgtttttgaaaaagagtgcggtagtactatcaagtctcatcattatcaacctcacatgttttttcaaaggtttaactggtatccaatgtaaatttcccattgttttatatgattgtgaatttgggattaattaaaaaaaaaaaaaaaaagaatgcagacagctagacaaatttaactttagacactttttcacctgcatgagaatttttggttaaaaaaaataaaaggacaagaagaaatgggagttagattgtgtgtaatgtgtatgtatgcgcgtgtggctcgagacttgcatggctagtggcccacttacagtgcggcccacccagttatatgggccgatgatcacggggatcaagtgggcccggcgcaccaccacgttggatgctccccacttactctccaaatgtttttttccaaaagaaaaaatataaaataaaagataattaattaaaatcaagtgtatttttgtttaagttggtagtggaactttgcttttagctacgagaaactttattattatttccatttacaagatacatatgcattaatgcatgctttgtgcaagaaaataaaaagatacatatgcatgctagtatgctactgcctcttctcttttggcccatgaaatctttgatgtaaccccactcttttgtgttttacgatcacagccgttgattacgcccattcttctgattgaagcaaagccaacactcaatctcacacttttaaattttaacctatagtataatttgtttttccacaatttgcttatttctattatgatgtcacctaatctcagcaagaaaccaacatagctgctaagggcatttaagtcttaccaattacaactcagaaaacgcgttacgaatattctttctttaattgtttttgtctgaatctatctctcttttactttctttcttttttatcttttgatatttttgtttaaaaataaataaaattattttgaaggtgcggttacggagggaaaatcatgtgcacgtaccacttccctccaaaaaagccaaaacccaaacgagtgttgtgtgtatgtaacaaagaaaatttgggctacctctccaaaaaaaaaatatatatatatataaataacaaaatctaattaaattaaataaaataatttcttctctttcaaaaaaaaaaataatataataacaaaaatgttttagcactcgccctaggagcgtaccacacagtgtttccaattaatttggaaaataacaaggctatatttagtagacgtggacccctaatttttatctgcactagcccatagaaaaatgaatgacaaataagagtgtgcaaaaaacgcgccaaaattgaaattggctctctctcacaccccaccaaaaaaaaaaatattttatttcacaaaaaaatatataatagtttttatgaaattacaaaattaccctctctcagctaagctttcatctccttaagtagaggtaacatcctctccttgaacccctcatcctcaatcctattaccttccactcctctgttcttttattattttgttttctagttaaaaaaccagaggagttaggtaagaaataaaaagcaaaaaaaaagtacaacaatggcggttctaagagctgtgattgtgtccctaatctcactaatgttgactctagcagaagctagactcccaggtatttactctggaggtccatgggaatcagctcatgcaaccttctatggaggttctgatgcctcaggaactatgggtacgttacgtacaaacccacatttctttttggctacattattaagacagttgttagatttagcgaaagcccatttcatagtttctgataactcgaactgggtttgctttatgtttttgttatgtaacaggtggagcttgtgggtatggaaacctgtacagccaaggttatggggtgaacacggccgctttgagcactgctctgttcaataatgggctaagctgtggtgcttgttttgaaatcaagtgtgccaatgatccaagctggtgccattccggaagcccttctatcttcattactgctactaatttttgcccacctaactacgctctgcccaacgacaatggcggatggtgtaacccacctcggcctcatttcgaccttgccatgcctatgtttctcaagatcgctgagtacagagctggaattgttccagtatccttccgaaggtaataatcaccgtaactcactctcttttccttttaatttatattttctttttagctttaattagttttcgataattaatccaaattatccaaaaatatgtttctgcttttggaatagagagcttaaaaaggttcctacttctaagagataactgatctttctttcaaaataatattatctctaataataataataataatatccaattaggcattttttatttaacaataataattagatttagtccaataaaattgaaacataataataataataatannnnnnnnnnnnnnnnnnnnnnnnnnaataataataataataagtgaaatgctagagggcaccaatggtgtctagtgtttattggtccaactaagtattggatcccaatagtttaacataatagcttttagaaagtatcgctagacaatcgcaacacaacatgtcgagaaggtgttagtgtctaatagcaatactctaataataataataatnntaataataataatagtaataatagtagtagttttttattatttttggccccactatatttatttggtgggtcataatactcagatccatgttcctatgagttggatatggtatgat

SEQ ID NO: 79070 - DNA, 2531 bp, Cannabis sativa
aaaaaaaaagtctcaaggcagtataaaagttatttttgccgtgtggcagtatttttgtaaagagtaagttaaaatccagtatttttgtaagtttcccattttgtaaggccgttttcatgaatgggctaggtggaggcgtctggactttggaaatggattgagccgtgaagagcaattgggccgtagggaggcccacgtttgacacaaaaaggtggggttccgtctacaaatctgtaccccacaagcgcacgttatcacggtgcgctgtccaatactggaaagctatgagtgctcgactcaaacccacaaccagccgagagcccagactccctccgcttcgtgtccatgtctctcgggaccccaacgaaaccctagtccttttccgaaatatcacaatggcgaggaaagcctctctagccaagaatgcccttgccacagccgctgttctattcgccatctacgtcatcttcaacatatttcatggccctaccgccacctccaagcttggatcggctctacccctcggcaccggtgaatcgtattcgatctcactcaattccatgaagaatctgcagaacagtgccgggaatcctgtcagaatttacctctatgatctccccacgaggtttacttatggagtcattcagcaccattcattagcacgcggtggtaaaccggttgatgacctcaccaagctcaattaccctggtcatcaacacatggcggagtggcacctctttaaggatttgctccgacccaattcagagcgaactggatcggctgtggttcgggtttcggatccggatgatgctgaattgttctacgtgcctttcttctcgtcattaagtttgaatgtgaacccatctcggccggcagcggaaccgggtcttgaccctgtcagaccggcttacaacgatgaggagacgcaggaggcgttggttgaatggctggaggcccaggaatactggaagaggaacgatgggcgagaccatgtgatcatagcttcggatcccaatgcgctgtatagagtgatcgatagtgttaagaagagtgttctacttgtttccgattttggtcgtttgaggcgggaccagggatcgcttgtcaaggacgtgattttgccatactctcatcgagttaatatttaccagggagatatcggtgtcgaaaatcgcaatacattgttgttcttcatgggcgctcgataccgcaaagaggtaattttcataataattttcttttccttttctaatatagaggagaaaacaaagaaaaaaaaaataccaaaaatatgtgtgttgccaacattcaatgcacaccagctaacggtggagcatggggagattttagttttcttgccatgaaaattaaggatgttgggttttgtgtaatccggcctcaatatcctctaacttttagataatagggtttgcagtatcaaaattttaatcattcaagaacttattttgctttcgccatcctctgttcttcgagcactttttctttccttacatgaagcatgcttcatggattttaaatgtacacagcagaacaaaaaaagtctctttctttctctatgcttgctcactatcttagtattacattatggtatcatttatactgtgaaataagttgcgaagttctccagtcgtttatctaaatatgatatgatatccgctttgcttgatttaccctttgccatatagggccaccctttatttatttatccattggcaagttctaaactttatttagaacttgaacaaacatacttactctcttaattagtagcttgattgaatttaatattctagatgttcattggtagtcaaaagcttcattgtcaattaagacattcctctcaatgttttttctttgtgttttttttcttttatagggaggcaaggttcgtgatttgctttttcaaatacttggaaatgaagatgatgttacaattaaacatggagtacaatccagagagagccgacgtgctgcttcacatgggatgcactcatcgaagttctgtctaaatcctgctggtgatacaccatcagcctgtcgtttatttgattccatagtcagcttgtgtgtgcctgttattatcagcgatgacattgagttgccatttgaagatgttatagactacaggaagattgctatatttgttgaaacctccgtggctttgaaacccgggttcttagtgtcaatgctgagagcaataaccactgaaagaattctagaatatcagaaagagttgaaagaggttagactatttcccctcatttttatctctcttttagcatgtatacatgtagatatgcatgcatagaagtatattgagcttacattgctatgccttttttgggtgtaactttttatttgggtagcaaacgtactttgtatgttatattggggcaacttggtgaaactattgagaaagtaaacaggtgatgagatatgtagttagcaattctatattttactctctctggatagactataaacaataaatttgggttggctaactgctt

SEQ ID NO: 79071 - DNA, 10482 bp, Cannabis sativa
gagagagagagagagaaagttaacaaaagttaaagacaaccaatctgattgaccattatttgttttgtatgtatgtattgaaaacacaacatttctcctataatcatataccccattatttgggaatgacagaatctaaatttctgaatcaaataccaatcatcacttatcaactataataacatgagcatctttgctgttgggcaatgcacataattccaagcataagcatttaagcacctacctatattagcataattcatatataataaacaaatttgttattagaattgatggtatttatcacagctgaaaagatagaagctttgttcatacaaagttggtccattggttcgtttaggaaaaggaaccaaagaaaatgaaggcaacccatgatctattagtgatatttttgagtgacccagaaaccaaaaatattcttaagtagaatttgacaaagaaaaaacatttgatctgatacatacagagagagagagagagagagacgtaccctttatacgttggtgggagtggcagtaattgggattgggatcaattttgggtagaaacagaaagaggattcgaatcaaaacaagaatatagttgtggtgacagagtcagagagcaaaagtggagaagaagaagagagttggacatgggtgagatgtttgatttgaagccacctcactttttgtcgtttttttatttttagtaaatcgtaaatgtcgtttgggaattgtcagtttttcctaacatcattgtcgttttttttttttttttttgtaaaaaaatcattacataatatgaataaatcattgttattttagtgatgtcgtaattttgaatatataacgtcgtttctcagcagcaagcagcaaatgacttcatatttgcaatctgttataactgaatgataatgaaggaaaggagttatttttgagcacattattattatactgcttctgcctgtgctgtaatttgtcttattctaatcttattgtcattcttaatcgggttgatactaatttgtctttggatttgtattttataaaagttaacaattaaaagtttgttttaacatgtctcaaaaatttgacatgatgttagttttgcaaagaaaatccccttctcaatgatacataaccattattaagcaccgcaatacaacaacatgattttacacatgagaagaatgagatgaagaaaagtttgtattatcaattacatgaatttcacacaagactaagaagaagaagaagaagagtcatgacgatgatgatgaatcatatgagaagatatggaaaactgtggcaatgtcaatggattctgatgatgagattcagattggaaacaatcaggaggagcttgccatttagaatcttcaagaacagcaccaacttcaaatgtcataacatgagcatttctcccagtgtagaattcccaatgcacaggtctcttactcacaacgtcttcatagtaccatatgaactcaactttctcccacacattgcacaagaacccatccacatgtctttgccctaagtaattagctccatcaagccaattagggcggagaattcccacctccagctgagttgacctgcacttctcctgctggtcgtcgtagaagaagaaggaggtgccgttgttccactccagatcgtaaagaacgttccctagctggtgttggattatgttgtagtttcttccgttgctccaatcgtaccataggtctatgatttggagtgttcctgtgtagttcatcattaggatcgagtggaattgatgcggccatggagttggggttgggaggatctctgattctgtttctgatgaacaattaccaattccaattccacagatgacgatgaagatgataaggtttgaatattttgaacccattttttttctttctcttgatttgatttgatttgtttaatcacacaactgacaacaacagagtcaatgattaattaaacaaaaattaaattaaaataataatactattattagtattattatagttgtgatgatgataatgtttgaataaggaatatggattcattcattcaaatttcaaatttcaaacacagttctttctctttcttaatagaaaattcttcttttttctacatgtatgctctcattgcgcagggtttggaaaacagcagttcaataataattataataatttattataaataaataaataaataaataaaaaattgtgagagagaaggagaagaattgtaccaaactaagtttgtcttcctcttccaagaacaatagcgattctcagaaaatcataatcggaccagagttttactggagaaaatgagaagaagaagaaagaggaagaagacgaagatgataaaatttggtcacggataaaggagtgactgtgagtcaaaaatcattttgggccgacttgggcttttatgggatacagtattttctgtttgggctgatatgggttttcatgggctacccaatcaaataataatggttgttgttataatcaggtaactattattatgtcatgttttgttttgttagtgggagacaactcttgctatgtcatctttatggttatggtaatggttgaaacttgaaagttcaagttcaataattggagttatgtgtacacacatatctaatttgatacacatgtaacaaatgtacttattaaaagttatttactagataagtacatcctaaatttgtgttggagatattaatgcataatcaacaacgtaaaacacatcattttaattaaaaaagggaggttttgctttgtttcttttggttttgttatttagcggaaaacaaaatcatgatattttattttctctgaactgaactttatcattgctttggcaaatttaagttaataaaaaaagaaagacttgttgtgaattgtgatgtgttgggttgtgtgtatgtgtagatgtcatgaagtgagtccccacatcaactcacattcacaaatatggaatttattatgactccactcactcactctactcaccacatctcacctctttttactagtttttctttctcattttctaaaagtaacaaaaaaatagaccccaaaggcagtctttgtgtccagttcaccatggcagccgtcacacctccttccatggccaccccaaaactcactcccacactggatttccctattgggttctcctcaagttttgattttttcggccatttcagaccacccattcgcactaggacctctcaactcaacaataacctacttctctccgccacaaatagcaacaatgctgtctctatcactacctcactctcacaaccactaccaccacctactatctctaagtcagtacctttaaatttctttatctttgattcactatcacaatgttcatgttttttttacaatcctgcaactagctactcaacaaactaaatatacatatttgtgtttatatttaattgtttacatatatgtgtgttgtcaattcaccagggtgaaacggcatacgatctctgtgtttgttggggatgagagtggaataataaacagaattgccggagtttttgctcggaggggttacaacattgaatcccttgctgttgggctgaacaaggataaggccctctttaccattgttgtgtctggaactgagaatgtattgcgccaagttgtagaacagctcaataagcttgtcaatgtcatcaaggtaacttctttaattcctttttttattcatttctgaaagttttctttctgaaaatctagttttggttgcttttaacacaaatttgatctgaaaatgaggttttcatctttgaggtgttactattttgaaggttgaagctttagtatgatagttcaaagtgaactaccggtttgtgctgaactttagaatatttgtttgttaaagttaatatgagacaaaattgtggtattagactcaaacttcttcattccttggaactcaaactgtgcatctgttaatatgtttgcagtagctcctatgctatactcggttacgtgatgcctctttttctttaggtggaagatatatctagggagccacaagtggaacgagaactgatgcttatcaaacttaatgcaggtccaactacccgtgctgaggtagttctttaaatatatatatgtatatatattcagctaaatgtctaatggccatcatgttttaggaatctcatgtttcttattttaggtccctgttgctgaaatctaccatctttaagataggatacctttttgtacttctctttctgcaactggactctaatccataatcatatctatactgttccttttcactaaatattacttcttcatgaatatgagcgttgaattagatacaaaatttcttttagttttgtgacatctcttgtgtttttctttaacttctctttcagattatgtggttggtggacatcttcagggcaaaaattgtggatattgctgaacattcgttgacgattgaggtgatttttgacaaagccttgtactttttaatggttgtgtgtatctacatcctagttatggccgtaaatatagaactgtatttgggtttggaaacatagattcagcagctattataatcatataagaaattgcttaagtgctgcaactaactcccagacattgcaagacatcctgtttcagaaattgcgaattattcctgaaaatcatctcaataaagtctatatttttagtaggactagggcttagtgactcctaatgatgaaagtgtatgaatgtcaggtcaccggagatcctgggaaaatggttgctgtcctaagaaacttggcgaagtttggattcaaagaaattgcaagaactggaaaggttagatgctcacaattctaattgaacattagtgtttagtatacaactgcactgcttcagaaatcgattattataatatgtagtgggccttggggatcatatactaaggttatttctactagatgtcataatctgaaataaatgaatgacatcctcaatttcttaacatcaactgctattaggatgtaactgttagcatgaagatataaaactctaaatgtggggcctttttgatagtggtagatagattagatactagcatgaacctctgcaggaatggattaatgtgtcacggtttcaagtgaaaggtttagcacattactcaaagtactcctgcttcagttagtggctggtgattggtgattgggctagtgattacttgtatggaagttcaaggagttttatcttagataacatgtgctcctcgattatgcaagtgttgagaatgtaattaaattctgctggtcagttctgaccatgtaagggtaaccataaagattgtttagaaactcatgtcgcctgttataattttctatacaaaataatgcaaatgtcgtttctaatgatgatttaaattttatttcgcttatagattgctttaagacgagagaagatgggtgagacagctccattttggagattttctgccgcttcttatccagatcttgaaagtgcagttactgttaatggtgctgtagaaaaaaaaagtcattcacctgatattgacagtatatcatcaagtgtaagtagttctgcttgacaaagccaattttacctggctactatcataatgtaaatgcatgtttatttttgtttgtcataaataaagcttgatgaagctgacttccccacactaacatgcaaaatatgttttttacaccagatacccaatgtgattgtttagaaatgaagagttgtaaattctgcatcaatcaaatttaactgaaaaacttgttagccatttcttccattgtagaatggttgatttctagtcctatttgatgtgttataaggatatagatgaattgaaattatacaattagttggagataattattatggacttatggttctcttctcttttctcaccaacaaggttttcaataattttattggtaatctataatccatgaagatgaactgatggtagggcacatacattacttataataatcgatatcattacaatataaccatcatatactgaatagtgctggttatttattttgttttcatttcatcattgaagggtgatgtttatcctgttgagccttacgaagactatatgctgaatcaagttcttgatgctcattggggtgttctctatgatgaagatgtaagttttcgacatgctttataaaatccaccacttggttatgtatgtcatggtcattgtaccaaataaaagttccgatgtgacaaataaatctctttaaggcctaatgaaagttcaatgtgcgtgatcaaatcatgtgttcgcatgctctaagtaaattccattagaatctattcaaagcaaaagccataccagtataaatgctccaagagaacttaattttaattgtgtccagcaaaagtaatagcattgtaaaactagtactgaggccattctgacattctaattaatatttcagtcaactggtgttcggtcacacactttgtgtatgattgtcaatgatcaccctggagtactgaacttaattacaggtgtaatatctcgaagagggtataacatccaggtcagttgatctctctattcatacaggcatttttaggtgcagtgctcattgttttacttgtgctataattttcttacactttgccattgtagagccttgctgtggggcctgccgaattggaggggcgttctcgtataactactgttgttcccggtactgatgactctattgccaagttggttcagcagctttccaagttaataggtcttcatgaggtgaggttcttcattggcacgtgatttgctaagttggatgataaacatatacagccgaattcaagccaaaagctgccatgttttagttctacgaaatgaatttaacagtttgagcttgatcggcctgaacccgtaggcaccaaacccttctttggattttatctcgaatccgaagaagggccgtgagttagtctaatcattcattcatgttaatattagtactataatatcccatgaatctcttgatccctattggaacttgttatctgcacagaaaagctgaaataaaatggttgttgtttgttcaggttcgggatatcagtcacctaccttttgcggagcgagagctaatgttgataaaggtttctgtgaaccctgctgctaggagagatgttcttgatatagccaacattttccgtgcgaaagcagttgatgtgtctgatcacacgatcacccttgaggtctggtctaccttctcttgtcttccaattagcatcaactgtctcacacatttagcatacctttcacatttattaccaggtctacctgaagtgtgtcttttcttattattattattcttaatgtttttattcattttggatttgtttgtaatgctatatatatatatatttatatagcttactggtgatttgaacaagatggtggcactgcagaagttattagagccttatggtatttgtgaggttagtctttctttgtgtccagattaacaataacattgcatatatccaagagtttttatttggactttactatcagcctagtatgcatagaattcatagctcaagtaaacaaatagttctatatgaggtgaggtaagagaggctttatttggacaaacaaatttaaggtaattagaaacctattaagttgtagttttccagttttacttcaatttctgtctttgtttcttggaaaaggttgcaagaaccggaagggtggcactggtacgagagtcgggcgttgattctgaatatctgcggggatatcctcttccattgtgatcagtgatcagtgatcagcagcagattcttgttagctttctttttgtcgagtgagttgttgtattttgatgtagtctgtaattatctatctctattgttgtattattatgatggattttggttttaatttctcaatgccaaagataataataataataataacaatataaacttgcagttttgcaagaatactatgaaggcctaataagaatggtgatattgttgatattaccattgagattggatgttctaaccacatcaatagcatttgctaatcatttaacagcaattaaaacaagagaaagatgggcctcaataccattttcttttatcttcttaaatttcaaaatattttaatgtcatcgatgtaaattttagaatgaatacactcactgtatcaaacaaaaagcacatcagttagatgtgtaaattgtaatcatctatctaatcaagggctcagccgtcttctgagttcctcgacaacactccctctttggataacatcttcggctttggattcgacgtctttcagtctcactgttccctccttaacttgacgttctcccaccatcaacatccatgggatcttagactcttccgcatgacgaaagtgcttatccggtcttttggccaccaagtattccgcttttatttttgcatcccatagctcgctcgccagttctgcagcttgaattagatcgtctcctagtatgctcaccaacacttctgtctttgtagctctagttgtctgcttcaaataacacaaaaatcccacaagattggataaaataagtaagaaacgatcaatcgatggagatgaacaaaattccatcaaaacatttatctgataaaatatcatttcttcagtgagaaaaaacaactattcatcacctgattctgatccttctgaatctgctccataatattaaatactcgctcgattcctagacttacaccaactgctggaacttgctttgtaccaaacatgcctattaagttgtcataacgtcctccagcagcaattgaaccaacctaaggacaatcaacattagttttaacatgaaaaagaagaagccgaattgcttgtgtaaacataaacaagctcacctgtgcacctcctttgaaaacagcttcataaatcactccagtataataatcaagacctctggcaagactcaagtcaaaagtcaccttgtcgatacactttgatttatccaaagccttgaataagatctccagatcattcaaagcatcaaccgacgcattattatccaagaattcactcccctcacttttaagtttacttaacaattcaagaggagatcccctctcttttacaaaatcaccaattttatctgctgcctctatagtcaagcccttctcttcaacctatcaaaaaattataaaagatccaccagattaaattacatcaacaacatcaggagcatagatagcttctcttatcaataagcatttttcccaacaatgttaatgttatggggtacaagacagatattactttagtttaactatgtaggactccatgatcataaacatatcagtagatctgcctaattatacttattccttctatttatttttttattgtgtggccctggcagtggccccaagtttttgagtctagggggattcaaaccttggaaaattacctatcagcactttccagcatctccttccttaccactgggaccaaccctcttgggattagtaacttactctttcaaatgaagagtagttattaatacaacacatattaacacaaatcaacctttcaagatacatcacacaaatatacaccccaaacaaagggaacgggaaattgttcaggtcacaccaaatatatatgcgtgtgtcggtggaggaaagagagattaaaaacacaaaaatatgtgcagaagttcttaccatttctgtcttaatctggtcaaaaggttgcttgtctaacttgtcaatgcttgaacaaatagttctaaacttctcggggggaactccacaaatttctaacattccatctagtaacttccgatgattcaattttatctgtgatcattaagaaagcaacaacaaacattctaagtaaaaataaaatttaaaaattccatgtaacaagtcagagaagaatatttaatagaaatgcacaagtacaacagttaacattgatactttaaccgagataaggagatgaatgaatacaattgattggcactaatattccatttgcattacatcagaattaacaaatatgtagaaatgaagttaatgctcacattactgtcatgactaaagaatagtaatgatattacatcactaacagcatattatggtaacatctactataaaacctaccttgacatgtttgggtaaggattttttttatgctgaatatcaaaaaaagcacttttttgataaactacgctaaacagaaccatcatttatggttcaaaccttgggacaagaccttgagtaatatagcaaaattcatgcgtttaaatatcaaatagtgcaatccatagagaaaacaagattgttgatagcacgtactaatcaaagtggaaagaagaaaaggaagataggaaagagaagttacctcatacttcccaatttccagttcatccagtaat

SEQ ID NO: 79072 - DNA, 2690 bp, Cannabis sativa
agagaaaaaaaaaaaaaaagtggtcctcctaatcaatatataattttatctttggtaggggtcaaaaaacttaaccaacatatttaaaaagagaccaaagtaaaattgctcacttagctacctataaagtctttattctagcttatatagaaagtggtttaagatttgtgtggtccattttaggctggttatggcttttttctttctttttttcactctgtttctgctaaaatggtatgcatttcccataagagtcttttgggccctgtctcaagacttgattcaaactaaaaatggtcttcgataaggacactttcaagtgagtaacagggcggcgccgaagttggccaatgtctaaagctctatgtgaattaatcatacacgtatagtaaataaatatgtatgcgtagttaatgtcttttagactatataaatataaggcctttacttaaattatctaaagaaaatatattcaatgcaaaaccaaggatggtttgaacttaggaccaccatcaagagagtggactagtgctgcatttgcttagtttgaacaaagaaaaagtttggaaaaaggcagtatactttctgggttttgatccttttcctttattattatgagttgatcttaataatcattaagtgggtattattgccttgggaggaaagctcaggcgaacaaggatgaattgtattaatttgctgcttttacaggtaataataacaacagggctagtgtttaaatgtcaatagttattagggatatgattttacagctacaataactcaatcttcaggtgccttttagtataatttggaaggatgatgatttagaattaaaaaagaaatccaagttaagaggcacaaagaatctttaatctaaaatcttaatcactaatatcaatgggagttaagacactcccaaaagtttgactgatgttgctctgttcattcattagtttttccaatttctgtctatatatatatatatatatacagtataaatacagatatatatttatgaacaaagttctcaataatttggtcaaagaacagaagatacaaacgtgttggaatggttaacagttctgtttaaggtaatgtggacaaatgccaaagagttcattgttagaagagtggtaccaaacataatgtgtttcttccaaccatgataagtttcccaagtatgaatgctaaaaattaggccaacttggttcaaaatagaaaagcttataattcttctagctatgcccttatctttaaatggtgtcatagttcttatcaagaagctgagtcagttcaagtgttatagtatatatatgtctatcaataagcatagtataaaaaaaatatctcatctcttgatgaaaatctgaaagaatagtattcattaggatcctaagataataaaaaaatactttacagaaaccaactgaaaaaggggagaaaaagaattgatgaacaaatagtatatagtaatattttgacagttaatctgaaaaggtatagattgaaacaaaactggatcaaattcaatgaaaggaagactacataacaggaggatacatatgcctacaaaaaagggaaaggaaaaagaatacaaataagatgaataactctaaaactcggaaagacatttagaagtataagttgatatggaaaaacttgactacttatcttcttcgatcattaacaaacttatcgacgagtatagctacatcaaattccctttcttctacgttctctcagattactcgggataatatacacagaatctacacaaagtccacctttggaatgcgtacaatcaatctgcttcatcgaaaatctaacttcagtttctggttcagaattagtgacaataaattctcctactttgtactctatccagcaaccccgcttatgatttccatttatttcatcatgctccttctcatctaaacagaactggcatgatgcttgctgaccatcagacgtggacaattcaaattgcaccggtttgatgtcccaaccatgagtgtgctcaaaactgcaagcacgtcgtcctaaccttttgaaaaaccttccaaggtgaaggcgaaaagacagagtataaatgtcagccggaaaatggaacctcaccaccccatctacttcaaaccaccatatttgctgcaaataagcaacaacgtggaacctgcaaaagatgataaacaaaagattgatgcagactaattaaatgttacccgaatagctggctacagtttctgattacaactatataaagctgagttgctgctcacaagaacaagtataaagttttgcaaggccaaatctacatagttcttataaaatctcttttaagaaaaaatgatgaattccactacacaaattgccatgtttctcataagcatcaacagaaatccgtaacttgacatggcatttcaaaacaaattggtgtggattggaccatacaccgatgcaagacctcccgtaaccaacaaaagacaaatgggtaaaacaaaatagatccaaatccaaactaattactattatagtctccgtttattattattctttttatagtttcctcttcttattcttcttactatagtctcctcttaattcttcttattactaacaacataaaaagaaactacggccaagatgaaatacaacaaaaaaaaaaacataaaagcagaaaattactacaa

SEQ ID NO: 79073 - DNA, 1672 bp, Cannabis sativa
aaaaattctattttatatctctttctctttcctcactcgttccttctttctctctttctctcgatctgttggtacggtgccgagactagctcagggtgagcctctatcagtcggcgacaacccaagtaaaggtcaccatggcctttcccgtcgtcgaaaaccttcagcggctgtttctctcaccctcctcccgtttcctctagccaaatcgataatgtgatgctccggtgagcacctcggtcagcccatggcttatttgccttctgttcttcttccctgaaccacttttttattatttctaactgttattggcatttttgaaagggtgacgcatggcgtttccgactaaagatcagcctataattttctggcccaaaagtcttgctgtaaggacatatccagcctaaatggaaagatggacccaagcccatccaaagcccagaggatgcccctccaaaatggggatgatctggatcctagaaggcctcccgagataagtgattgtaaccttctggatgaattctgggatacatccaaaaagagcatcccaagaggcgcctcaaaagcctggtgcaagatgaagaagcgaccctctgacacccaatcccacaggattagaagtgtgtcccttatgttaaagcataagagtgagtgcaccactaaaaggaaaccactcctttatttgacggcacaaatctaacattacagtacatgagaacggcgcacatagggtatctgttaaggaccgtgtggtttccaaatgtacgaatcacctctgccccacgaactagacctcaaaaaatgggcccataatcacttatttattgtatttaccctattagtgagcctagttgacacaaaaaccttactgggccacaggtgaactcggatctggttcctagcctataaatactatactataccctcatgtaaagagtgtgtaaaatcattgtgaaaataccatagcaagaaattagggttcttgaacttgtgaaatcccactgtaatacatcaaggccattcggccaaatacaaattactcgtggactaaggttcattaatacctgaaccacgaaaaaatttccatctctactttatattaatttaattaatccctcaactctcattttaatcggtttctgaaaatcgcagtaaaaactaacatatgtagatctgtctattttctctgtatgtgaaccatggttggggttcatcgttgtcgtcagggtggagctcgcagatgtgggcagaggtcggatctcgctgggctgggatttcacttttgttttttattatattttttgggtttagttctcaagatgatactctatgcaagagttaatttgttttaatttcattaatggtggtagtaatttttgtattgttattgtagtggtattgattttgagcttaattaattgtattagcttcatgaaatcaaataccacttggagatacccaaaatgaaaaccttatcgttttggcttccttgtaatttaagaaacattctcatagtcattactatatgaatccttccccatcaattttgtttcaatgagcattgttattgagtatcaatggtgtccagtaatttttataggtgacaccatacgattggttaacgatatttcttaaaagttattttctaaaattatatgagacttaatactta

SEQ ID NO: 79074 - DNA, 2056 bp, Cannabis sativa
agcatacttaccatgtaaatgtatagtttaaatgatcctgaggcataactgaacttcgaatcacagtattcacatccttcggtaaaggataaggattacttggattaacgttttcattgatatcttcaatgtaaacagtattctcagcaagtccacatgtgcgagcgattgcaggaacatcaacatagaaccactgattcgagtttggttcatttgctggaacgaatatgcttggcttttcactctcgcgaactataccaacaacttcaacagaacgaacagcaggagcatgatcctgtcaagttttaaagatataatcttgaatatttcttcgtcgttgataattgcaatatgaaactgtaagaaaaactacctgaacttttgtaggctttgttttccatagcctccaccatgagcttctttcaccctcttgaacgtcgtgagtttcttgtttcgattgttgatcaccatgtgagacttctaagaacttttctttccaacttcggggaacccatcctctattaactagaatcggtgatgggacgctggaaaaaggcgatttaaaaaacaaaagaaaagagtttgagctcaactattagtttggtaacaaaatgaaactatttgcaaagagtgttaagttacaataagaacatgaaatctaatgctagtgagaacttaggtgataagctaggaaattagatttttttctaatagtaaacctgagaaaaccttgatactcattccattgagtagtagtggtgctcaagatttctcatttttatttgaaaaaagcagagatccaagtgtgcaatacttgatgatggaacttagaaatttactcaagaaacaaaccgaaaatttctatggttactgaagtatgtacctgtcagggcagttgggtattggcagaaggggtgtaatgacatagtaaccattttctgttactccagaaatacttcttgaacgaggaccgatatagattgatttttcttcgtcgaaatgtcctttgcatacgacctttctaaactccaacgagtttaatccttcatttggttgaaacacactgttccatttcaatggttccaattccaatctcttctgtctatattccaacatctttatctgtaacaataaacattttccttaaagtaagtccttgtctaactattgaaaatctttattatcagttgtaatagtttacattgcttctcaacaatggaaataaaaaaaacatcaaaacaaggactaatctgcataaagaatgaagaagacatggaagcaaattcctccaaaatacagaaaagaaaaagattatgaaaaaattgaaaacaaggctgcacaaaaatagagagggcctgtaaaatgtaaaatggcattcttcattacttagaggggtattcaactaatgtagaagatctcactacaatcattgtctagacatgcatattttttcatgacatttatccctaacaagaattatgattggagttatccatgtgttcttagaaatgactcaatattcttatattttatccatatgtgacactagacttaaacaatatcccctcgagatggtagctattttttgcttaccaatcttgaattactggatcacaagtgaccctttatctgctcatgctcgctcgcttgttttgttctcgtggacttaccttattttttttgagacaatgtggatcaaatatccgcttagggatatgactcttgacaagaatcttagagttccatgtcaaatctatttagtgattgagttaccaaattcttataaactactcaatattctaaaactggttccttccatatggtgagacactatactcaattgtccccattgaaaaaatacatagtctaaattatgcaattaaaacatataaataaatgacaaagcatgataagttgctggcattcatattacaaaaccggacgattattcaatatatattttgctcaataccataaagctaaaaccatagagaattataataactttcaatacacaaaaacaaaagcttacgaattgcaacatagtttgatataa

SEQ ID NO: 79075 - DNA, 3984 bp, Cannabis sativa
aaaactatatatccatataggaaacatataatagatgatatatttaacatatagctgcatttctttgggagactaccatttactgatgcctctgaaagtatctcagaattcaagcttgagagagcagtgagcaccaatgggtgagatgcaagcacacttcctgggaccctgaaaccagccaaactttaacgaatagtgaccatgaaatcattttttactttgctatttctgtagagtacaaaaagaacacagttttgaattgtagtactacaatttgcttattatgcataagaaaaaacaaaatttatttcctatcttcttttatgcagattttaactataagaatcccaattcataacagaattatactttcctttacccatgaaacaaaaaagaaaaacataaaatgtatgatgggaggtgagaggtgagagagaatgtgaaaagataaaacacatacccatgcttcagtcgaagccaagaagcaaacgcttctagaacctatattaacaaataagatgagatgatcaataggacacttaaaacatgcaagtatccgaacagaatcttttaatcaaaatatcctcaaatcattgtagattgatttatgaggtagattatgttgcagtaaataaataaatattcccacctgctctttaagctcattaatattcaaacaggctgttaagatattaagagcaatctcaatttgcaatgtcagctccttttcaaattggcgacgtctttctggtcgagctgctatcttataattaaaaacttcctgatcatgagaaaaaataagaaaacaaaagatgagcagtgaaatcatgtatacaactgcataaagctctgcaaatatgtattttataaagagataattgaggctaaactccttatgtcgtttcttattgcaattaactacctatgtaaaaaaaatagtggcaaaactaccaacattgtagttttatttctttcagttaactacttaactaagaactttcatgacaaaaatatctcagcagtagattttaatgcagttaactacctacgtaaaaacaaattagaataaaaaaaaatactcagtactagattttaaaaataattttatatttaatttaataattaactgcaaagcaatctactacttaggtacttttgccatcaattgttttacataggtagtagttgacttcaaaaagatctactatttagatacttttgccaccaaatattttacaaggtagttaattgcaatatatgaaactagatagggagtttaacagtaattatcccttttataaattatatcacaagtcaaaagatatattcttaacctctggcaaaactgtaagcagctccaagaatgctggtatgtattctggatgagtgttcatttcatcccggagccaatttacaatacccccatccccccaatcttctgcaggaacatatacagccaaggcagcaactgcaatgctaatctataattccatttgataagcaagatatccgctaagcacatcaaggtaaaacatgactatatatgaggtgatctgtaaaaaataagaacagaatcatacctgtgttctgacttttggagggcccttgtggaactttctcagcaaattctgcatttaaaacattcatttattgcgagtaatttcttgagctaaaacatttgtatagacaggatcaagcctgagtgtataacaatttggcgacaatttacaaaataaataactaaattgtaatgaatgcacaccagaagagggcagcaacttagactagctcattctaattcaaactccactatttctaatattaaccacatctagaattcaataaaatccaatagacaaatcaagacaaagtcatgtcatatgtaagagaaaagaaacaagcctaccatgagaaaccatacgcatgacaattttaccatataaaacaagattgccttaatgaaattatgatggtaatcatcttaaatacatcctaaggcagtagcaaaagtgctcctcctaatacattgtcacatgattgaggactcaaatacttcactcaagataaacagccattgtcattataatttcatgttaaactttttcagcatatatacataatagctaaccttctcctatgtggaaactgagaatgaatactcactcacatttaatgaatcccgcaatgggcgaaaagcttctgaaggtagttcttcaaaatcgcgctgaacctagaacaaagtctcaaaacacaaacaacagtcacacactaaattgaagtttagcagtttggatcaaagacatccagaattaattaattgaccgtaacttaccttgcttctaagagtctgactacaaaaaattaaggtttctagattgctagaggcatcatgaagcaggttatcagccacctatagaaagtttccataaaaataagaatgaacccaattagaatagatactaccgtaatattcataaaagtcacccatttgtcataaaatcaaaagctgtgcattctcaaggggtgcctgaatgttaaatttcatagcagataccaacttccagctcaaaagccttctacattgatattctttgtagtgaacccaactacgaagtattcgtttgaagaaagtgaaacttaaccgtcaacttcctttaatctcgtgaagcttatacataatcaaataacacagaatcaaaacaatgaattcgctaaccacattaccccttacaatttaatatcttataatcatctataactaaaaccagtaaaactgttttccgtatccaccattttctctacaaaacaaaaatcactcctcagctcaattaaaagcaatataagccctaagaactcaaagtcgccaaatttacaaactcaaacaataccaaaaccaatacaaaacaattcttttcaaaaagaaaaaagaaaaaacaaaatataatcccatctaatttcttgaacaataaccaaatcaatgctaaatcgccaagacaagtgaaggaatcaaagtccaatagaaatccaaatccgaaaaggtgaagaaaagcatcgttgataggtcaaaaatccccaaagaggagataaacgacaggtcacctgccaagcgtcgagggtgcgctgaaaatcctgaagccatcgatcggcttccatacgaaccgctgcatcaggatgatgatatagtgcatttagggcttgtttgacagagctctggaggtccatggttcgaaaactcggaccgataactggagactgactgaaccccgctcttcctggatttgtttctttatctctctctctctgttttttcttttcttactttctttgggtctttttttatttttatttaacaaaaaaaaaaagggggggatttttggcgcccggtgaggggagggttggggttgatcagagaagggaaaaaatgaaatgggccgtcggattggggtctgtggcgttttgactcttttggtcaattggagctgagggactaaagcaaggaagatggtttaggggctgtgtacacgtggcgtgagattaggtgggttgggcaatttgtaagtggatcccactggacagattgtcaatgttgaactcttcgttggaaaatattattttaaacttcagaaataggagtaacaatagggtccgtgaaattaaaaatttggaaatttgctagtaagagtactaaaattttccattaaaaagaaacaaaaaaaatccaaatttctaacatttttccgaaactaacaagaatctgaatataatagtgcctgtatgttagataatagtcctcttcgagacaggacaaatctccgaaatgcactcttcgagtcagtcaaactcccaattgaaccaaaattctatttactcaatttctatcccataatagctatacaattacatatttatagtgattcacaccctttacaaattactaataaacccctacactatttcatggtgtaacactttcccacccttcaa

SEQ ID NO: 79076 - DNA, 931 bp, Cannabis sativa
tatatatatatataattgaaacttgaacaaatttatgacttatattattacaacaataaatagtcttcttaatggattatatgggttgatctttttcagtttaatgaagctgaagctctggcgatgggtatgagttttcattattggattgcttattttgtttgattatgagtgtgcaaatgatgttgaatcgaggatattaattgtgtattgacggctgacgcatcactttggagtactagctagacttttcgagtgataactagttatcttttattttatgtgtaaccttattatatatcttttgttaatattattattttaatttgttacatattgcaatattgaagtatacaaattaaagctcaggcgtactcatactgtagaacctatttttatgagggggtcaaggccaaatacacagaaatcactaaactgtcattttgaagaggaccaacatcaccgcaataaaacacaaattcaaaacgtagttttagttttctttattctatttttacaaattttcctcatagtaggaaagatgaaaagacgataatagaaaaggaaagtacttctttggtatattgtttggtatcaaaaatattaaaagaataaaattactaaaattataatagtattttttttaatgtaattatttattattttttaaaaacaaatatgatattattgttagaaaagttctcattacaatttataagagagaataggaggattacaatcaaaatactcaaaatatattgatcaccaaaggctcgaggacttttgttttaaaagttattttctccctcgcatggacacttagagaaagggaaatttacatatatactgtttttggaccaaaattttacaaaaatactgggacacggcaaaaacaacttttttactgccccagcccattttctttactttt

SEQ ID NO: 79077 - DNA, 2299 bp, Cannabis sativa
gtccgtcactgattacagtgaaatcataacaaaatatttgaggcttaaattaaaaagagagtaacagtgcaaattacaccaactttaatatccaattgaaaactaattttcaatgtctactacggatgatacgagacaaatttcttaactatatccttcaactaatagtgcctcctgaaaaactatgttactctgtatagtgaaaccaaacaatgaaagacagcaggattacaaagtatcatgaatccatgtctttacaattacaataaccttagtaatctaaaaccagagaaacttacttttcttcctgaccactcccttccggcaaaggattcttatctgttgctgaagaaaaatgacaacttttctgaaagattgctcccctggaaaccttgttttctgactgtttaaaatgtttcaaaatattaacaaggcacaaacgtcatgaagatcggaaataaaggataactttaatctctctcaaaagtaaagacacctaagtcaacataacttttataagtgtatgcagcacagtatacgtatcaatatacaaataatgctttctttccaaactcactccccaaattactatattattgcaaacacttcggtatggatttttttcagtcttttgtaaaaatcaactttacactagtgactaacctcattgtaaaaaccaaaccaggattttgagcacagctagtgcaaagcagtgcagcaaaatacaatgcgtgtctgtgtatataagcttgtgtctgtgtttatatataagccttaaaaaacataatacaaccgttcactttcaatgaccacaggcaacgaataaagcccaaaagaacacaaatcatagacgatataacaacaaaaaaaggagtagagaaatacatttgctacttccaaaaggcaaaaataagataactaaccagtttttgtaagaattggcaacaacggctctgcgtatatctatctctacctactatactagtttttcctgacatagagagagagagaataaaactgtagttggcaaatggaaaataattatttccccacaaattctatgtggtgcgtcaattatttactaattacttacttcaaatagaatcagaatgtgatcaaaagaagccgaaatcgtaagaagaagaagaagaagaaattgggaattggggtttgagcattacctcttgatagctccttaaccatccaaattccaactcttaaaaatttggaattgaacataatcgttgaagctcagcgagtcactactggacctgaggaaagtgaaaactaagaaatgaaagttttttcttcaatgattatataccaaaacaacaagaatagagcccgtgtatggagttttctaacgaaaaaacgagcaattttgaaatttcacattctccataccatagaaagaattgggcgaaacggaagaatgaagataaagaaaggggtaccttaagcgattcaacggatattagcaaagcacgaaactgaaggtttcagataacgaagaaaaccttcttcaaagggtggtatgaatcgggggcgcgaagcttccactccagaataaccctacaaattttttcttcaaaataaacaattaattgccatataatatttaataaatacagctacttccatagaaaaatatttttcttgggcacaaattatctagtatattatttattttttaaaaaaaatttacggtgttatttcggtaatttttataatttttatgtgagttattatataaattttaattacaatttaaattacttcattaattgttatgtgagtttttatatagattttataaaaatataaaaagaaaaagtaaaatataaaaaataaataaataaataagtatcaaaggttaataaaagtataatttttctcaatagtatcttaaatataacacatgctagcctcaaaatttaaatcattaggtcttaatgaaaattattatgggttagttttaaaaaaaaattaataaatttaaaacataatttgtattgataaaatttaaccaaaattatacaatttcatttatattaaatatttatgcttaaaagttcaaaattttaaatacttatgccacaattattcctatttttatataatactatacttaatttgaatttatatcaaaatattatatatttatacaaattggtactaaacatgatagtgttactatatatatataaaaaaaaatatatatattatttaatacaattcaatataatacaatgtaagacggtgtacaaaacttaaattttaatatgatataatacataac

SEQ ID NO: 79078 - DNA, 1889 bp, Cannabis sativa
cagataagctttgccggcgcacaactgcgccggcaaagctttaccggcgcattcagtgtacttttgccggcgcaacaatgcgccggtaaaagctggatttcttgtagtgcgacttgtagctagaggttttcaataaatacctggactcgattttcttgagaccttcagtccagtcataaaaccttgcacaattcggattgttttttctctagctgcgattaatggatgggatatacaacaggttgatgtcaataatgcgttcctcaatggtgaactcaaagaagatgtgtatatgtatcaaccttaaggatttgtggatgctgactttcctaatcatgattgcaagctgaataaagcgatttatggtctcaaacaggctcctagagcctggtttgatacactgaaaaatactttgctgcaatggggttttaagaactcaacagctgacaccagcctattttacaaaagaacaaatggaaaattactgttgcttttgatttatgttgatgatatattagtcacaggggatcataatgatgaaatccacaatgtcatcactgctcttcacaataaatttgccttaaaagtgcttggctcggttcactactttcttgggtttgaggttctaagggacaacaatgctatatacttaactcaatctaagtatattagtgatctgctcatcaaaaccaacatgaccgatgcaaagcctcagcctactcccatgtgtgcaagtgccaaactctctcgcacttcaggcactcctctatctgatcctaaacaatatcgcagtgttgttggggctttgcagtacctcacaatgacgagaccagacattgcgtttgctgtaaacaagcttagccagtatcttcaaacaccaacttcggatcattggggcgcatgcaagagaatactgagatatctagttggtatacctacacttggcctttgtttcacacaaaaatctgacttaaatcttcatggatatgccgatgctgactgggctggttgcagtgatgaccgaaaatccacctctggatactgcatgtttcttggcaataatcttgttagttggtgctctaaaaagcagagtgttgtagcacggtcaagcacggaatcgggatacagaagtcttgcccttgcaacttcagagattatatggcttgagtctatccttactgaattgtctatacctgtgtcaacaactccagttctgtggtgtgataacttaggcgcagggtcccttgctgcaaatcctgtctatcacgctcgcacaaagcatatcgaaatcgacatcgattttatcagaaacagagttcttgacaagagacttgaagttcgttatgtggactcctcatttcagatagcagacatacttacaaaacctttgcataatcatcaattcacctatcttcgtgacaagttaacactcaagtccaacgagtgtaacttgaggggggatgttagagatagtgaggattagttagttaattgtattctgtttgtctgttacagagtttgttattcagtctgctgcagtcttgcctttcttgattagctactgtaactaactcttcatatatatataaaaaagcctcaagccaatctattcagagattgagcttctttcttaattcattctcagtttacactctgatatggtatcagacgcttaggttgccatggcgtctaaagacacagcctcctctgctcatagtgaaactccagaaccacctgaagctcccatcgccggtgttgaagcccctccacttcttcctaacaacaatcttcttccactcaaccttcgtctcgatcgcacgaattacaccttttggcgatcgttggttctggctgcattgcgtgcctacaatcttgatggccacatcctt

SEQ ID NO: 79079 - DNA, 2686 bp, Cannabis sativa
aacaataataataataaaaatccagtctttattctctctctctttcagctttctctctcacttatttattttcccggaaaacaaacacacacactacccattttcccatctattcatgattaatacatgtttgttagtagtaccattaccaaagaccaagaaaaaacccaaagaccaacaattccaaccataatcgaaaaaatcaaacaattttctcttctttccaatcatcccttaccttccattctcatcaaagtatcaaactttaccctcatttaagtctcatctcaaccgccattgttgtttcaccaagatctacaaaaccccacttcactaaactcctcactaacccttttctcttatgccaaaaccttgtgaagaagaagaagatggatctgattcaaacacactcaaaagcttcaagctttatctcaaatggccatatttaggcatacccattaacccattcgccggggatttcttctcaccgatgaagaatcgttcagttagaccccttttctccattttactccttatagtctttgctgccactctaagctgtagaacagcctttcaagatagtacctttagtcttctcatttcaatctcaactctacaacctccaccgccgccgttgccggtgccggagaaagctgttgtctttaatgaaacattgttgaaatatgcttccattgatatatctgaagctcaatcaaagaaggagattgatcaattattggagggtgatttcaatagtcttggaaggtacaaagcttttaaccgttggagaagatttaatcatagagatattagagctaaaagaatctcatcaaatggggttcctttagttctccattcaccaaatttctacagacattggttgagtttcagaagggttttacatgattgggcaagaagtaaaagattccaacctcaaatcatgtctgagctggttaaattggtgaaacaaccaattgaaaaggttcaatctttaaaccggtattcatcttgtgctgtagttgggaatagtgggattttgctaaagagtgattatggtaagattattgatagtcatgaagttgtgattagattaaacaatgctagaattgaaagctatgaatccaaagttgggtctaaaacaaacatgtcttttgttaatagtaacattcttcatctatgtgctagaagagagagttgttcttgtcatccttatggagaaaatgttcctataattatgtatatttgtcaaccattacatttcttggattacattgtttgtaactcttcacataaagctcctttgatggttacagatgctagttttgatgtgctttgttctaggattgttaagtattactctttgaagcttttttctgagaagaacaaagggaagtctttggatcaatgggcaccagcacatgatggtgcttttttccattactcatctggtatgcaagctgttatgatggctttagggatttgtgataaagttagcatttttgggtttgggaaatcagatttggctaaacatcattatcatactaatcagaaggctgagcttcatttgcatgattatgaagctgagtattgtttttatcatgatttggttaagagaccaaaggtaatacctttcatctcatcaaatttcaagattcctcctgtggttttatatcaatgacacaatgataggaagtgatccccttttttcttgggaagtgtttgctttagattgttttgtgtaatgtgttgttgtgttcctttgtgttgtaatttgtaatatgttgaatggaaggaaggaacaatcaaaggggatagaaagaaagaaattgttgaactactaccatttatttgaccctttgtactatcaaagatagtcattttggggttattaccaaatgtaaagttggattttatgaatatggttctctcatttattttataagatcaagattttcttctgtattctatataatataacactatatttgaagtgaagagtagtttgagaattgtgccaagttcaaaggcaccactttgcattggttgatattctattattccatatcttttcatatactcttttggaataagacattggcatatatttgactgagatttaagttcaaaatcaaaggtaccaactttgcatattatgatttatagtttgatttaaattccaatgcttgttatgtctctctcatatgactatattgaataacttattagataagtaatagctttgatttgaacacatttcaccatcagaatatttcttgcagattcaactttggactgaccaaaaccatctgcaagtctcttcacctggaaagtgctctaattttagttgtttttatctttagttcaaatagaataggttagtaacttattgagttttgtaacagtcagcatttttgtgaagtagttgtaatctgtagtctcatctttatattgtttagtgaatatcttctctcagttggaactatgttggtacacatcttcctaattagaattaatagttaattcctttggactgttctgttagagttgtgtgttactgtttgaggttgttgtaaatagaagatccttgattattcaatttgttgaaacttttgagtgtagagtcaagagtacttaaaatgcattgtaaaagtgcaattaaagcatgtaactaactgatatattacat

SEQ ID NO: 79080 - DNA, 2992 bp, Cannabis sativa
ttctcaaaaaaccatggtagagattatcaaactaccataatctctcaaaaatttccattggttgttatcttttaggctctaaaggatatgttaatacaataattataatgtgtacattattcatatatataattattcttatttttgtgaagataatattgggttgggtaatatgataaatattatttgggttatttcattaacttatatttttatttttctttccctcttgcaaatatagttcttctcctatgttcttcaagtggtaggatggagctctaacattaaattatttctcacttatatgctctcagttattatttttttacttaaaatgatagtgaacaaggtaaattaacagactcatacattctatgttgtatacagtttttttgctcactcttactaatgcacatgaatacataataatgctaattttttttttctttctttgcggtggtcataaaatggataagtgcatatatacatttgacaatcaataaaggtgagcaacttcaaactttcaagagttgaacatttatattcttaaaatgtttaattattaatatttaatattaaataatttatatataaatatataaaatttatgactgtgatatatggagaattaagatcacttagctataaataaaataatcaacaacacattaaaattatgaaacttgttagcactattcactattgcccattattcagtataaataatctcaattcacattgctaatataatatgacatcaaaattttggtgcatattttggatattatagagggatgataaatttaaaaggaatcaaatgagaatactttcacaatcaactttcattttcatttgcgatgtgcattaatacaattcacgtttgagaattaatcgtatgatattaattctctttgtttgttaaattttgtaataagaaaattagtaggatacacaaaaattaaggtccttacttttagaatgaaacattcgttttttagattctttattttaatttttttttttgaattaaagttggatcattcattaacaagataattcagctattacaatgttctttaaatctgttggagcattcagctcattaaacgtacaacttgacttaaaacaggaccttctaactacacaatgagcgatcctattttgcaatttgttttaaaaaaacaaataaaaaaattaatgaaagtagataaaacagaacggaaatcctccaccaataaaccaaactgaaatgacatttgaattgaactattaattgcttgaaccacaactaatgcatccgattcaacaatcacatcatcccaacctttacactttatccaactcaaagcctctttgatgccaattacttcagctatttcgggttggacgatcccacatctactaccagaaatagcctccagtgatctctcgttagtaccgcaagccacattcaaaaccaaacctttgttgagcttcaaagataacataatcgacattcaccttgaccttaaaactttctggtttacaccattggtcactgccattagttacatcagtaacaaataaggatcccaacacttgagattgagcaaccttccattggccgagaactatacgtgtcgattttattacctccttagtcgaacaagatttttgctgccagaacaacttgttacaggccttctaaattctccaacttatcatatcagcctcaaaaataatttcaaagttattaccattcaacaattcaaaagtcaactacttttttcttgagttgtaacagaaaatgaattgatcacagataaattccaacatgcgtgaaaaatcacaaccaagcaacacataaaatattgtaagatcaacattaacatgcttagtattgagttgtaccttggttggaagatacctcgagcaagctctccacaagaattgtagaactttagggagaactgctaactgcagagtttttttcagccacgatcatcatccacaaacaaccaatttcctgtagagaattgaagggatttatatgcactctttactgtaaagccagatgtctccatactccaaaaccagtgatcatcatccatggtattactcaactcaatgccaacaatcaactctctgtccctatcctcaaacatatcatcaataacctctaaatcccaagatctcttgccaattctcatcaaagtacaaatttttttatccacaagtccctggtgttgactagtgacatatgggttactcacattcgacaaccaaggattgagcaaaatactaacagatttgccacttcctatcgacctccttacacctcttcgaaccagattttgcgcaacccaaataccccgctaaatgaagcttggattttgtcctaactcagcccctaagaacgagccgttaggataatactgagctttaaaaattctacccacaagcgattcttccttagttaacagccaccaccattgtttttccaaaaacgagagattatagtcctgaagatcacgaaagcctaactcaccaacatgcttgtgcctacaaagccttttccatgataaccaactcactcccttaatagaagactttgattgcgatttccaccaaaaattagacaccatgccctcaagacttgtacaaacttcctttgttaagaggaaaacactcatagcgtaacttggtaaagcctgagcgacggactttaaaaaaaatttcttacccgttttagacaaaaactttgtctcccaactaaaaattctcttcttcattttgtccttaaggaagcctaaaattgcatttttgttccttctcataatgcaaggtcaccccaaatagcgactacccgcctcacccaatcccataagagcacacaaacgggcacgtagatccacatgcgtgttagtactaaaaaacattgaggacttagcaaaatttactttttgacctgacgccatctcataaacattaaggagatatagcacattctcag

SEQ ID NO: 79081 - DNA, 7532 bp, Cannabis sativa
atatatttttttttaacttttttgaatttttcacatatattgcacacattgtatataccaaaatattacacataatcattttttttccttctagtgaatggtattcattttaagtatcatatcatatagagtaatgattctattatgagtactacttcatagcaaaatgaatcattcagtggggatatgttaggtggtggtaggtaggtagagtagaagaagaaaattttctttagtactctcatctccatatctaccaacctcatcatctgctcttcttccaaacttaaccacttcttcaaaaacccacttcatttccagctcaattatattaaagctttcaactttcttaaacccatctgttttgtttttcatttgagtaagtaactaagttttgttccagtttctgctctagtgttttgatttttttattaaattacatgataaatgatgaactagaatgaataaggtttcaattacttgttttggtgcagccccagttaatcatatcaatggcacaagaagttggaaagccaaatgaagaggaggtaactaatataccttattcctgttgttgttctttacctcatttcatttgatgggtactttgaaaattttcaaaattatggagaatggttttgttaatcagaatgtgggttttgttgggaatggattgttaggttgttcttggagaagaaatagatcatgtgaggttaatcacactgaaccgaccccgtcaattgaatgtcatctcatcaagagtggtatatatttatatatatgtattcagtatttgagtcccttacttgcattattatcattatttggggaaatatgtttcgagatttctaacatttcttttgtttttttaccccataaaaggtttctctactagcagaatacttggagaagtgggaaaaagatgacaaagtagagcttattttaatcaaggtcagtagatcttatcttatgtgcttctgaattttcagaattggatttgcttagttatagccttataggtatagggtaggggttgcaattcatgtttgtgggttgtgttcgtgacgtgttgaagtttaggtgttataagcaaatgccaaatccaaactcgacctattgattttttcgaatacttaaacccaaacccaaacttgtttataaacgagctaacttgacttggcttaacccatttaaactgtttatgtaaagaatcatgcttaattttagttgacttgtcagtttaacctgtttacaacccttttatgacattcactagcgatttaacatatttatgtcttatttaactaacttaatacagcagcttacatgtaataaatataagagtgttatactttcaaataagccgttgttgtatcattttcaggttaggtgtgttaacctgaaaataacccaaactcatttaaggaaaattcaaacctgtttatttcgtgttatcgtatctgactcattttgccgcacctagtataggataatggtacattgttttagaactacttttgtttagttcttaaattgttttatcatttatcttatgtagggagcaggcagagctttttcagctggtggagatctgaaaatgttctatgatggcaggacagaaagtaaattttcaactctgaaacattcatacatacaaatgattttacttttatgtctgagaaaattagaagaagaagaagaagttattgattttacctttgaacttattggtggcagaggactcttgtttggaagtggtttataggatgtactggctttgctatcatattcatacatacaagaaaacccaggtaacaaatcaggactggtttgtgataaaaacaatatttttcttcatttttactaatagaatgtacaattgagatgttgatgttgatccacaggttgctcttgctcatggaatatcaatgggtggaggtgcatcattaatggtcccattgaaattctcagttgtcacagaaaaaactgtaggcactccatttcttaaatttatcttaaatatatactttgtaggtgtgattcattataatttctctataggtttcacattgcaaattgcttttctaaataggtcttttccactccagaagcaagtattgggtttcatactgattgtggcttttcctacattcattctcgtctccccagaaaccttggtaagcatgtcaatataaagggaaaggattctcctttgtttcttttatgcagacaataacagtggtagaacatgcaggtgagtatttggccttgactggagcaaggttgaatggtaaagaattggttgcaattggtctggcaactcatttcgttccttccgaggtaagttatggatctatgcacttctgccactgaaatcaactcattgaatcattcctcctgattttgttaccttaaccaaaaatacttgtacaaatatcacaagaaaccggaactctttattcataatcgatacaacacagaaatgtggagtgttgcttttgattttataaaagctagaacatgctttcacagaactgaataacatcaaggttattggtttgttggatcattgtttgtaaccattctttgttttgataaaagatttcttcttgttacattagaaaatacctgagctagaaaagcgattgataagcttaaattctggcaaagctgatgcagtcaaatcagcaattgaagaattttccgtggaagttaaacttgatgatgaaagtgttctaaacaagtaagaaatcatcaaatgtcattttatttacaatttcttacttagatctttaatagtaaaggtttctattctctaagttccacatattttgctgttaattttgtgctgacttttcaggcaatctattattaatgaatgtttttcaaaggatactgtggctgagatcatacaatcatttgtaagctcttccctttttgtgtaacagatgttagtgagttaacagtctttcagttttggttagacaccaaacggtccatatgacattgctgcatactttcaggaagtagaatccaaaaaagaaggaaatgggtggataggtcctgttctaaaagggttaaaaagatcgtccccgactggactaaatgtaacacttaaatcggtatgagtttcttctagttttatatttaagaagagatgcatactggattcatgcttccattgtctctaactcgttatttccagattcgtgaaggtagaaagcaatcactctcggaatgtttgaagaaggaatttagactaacaataaacatattaagagccaccatatctaatgatgtgtacgaggtaactattcagttatgatcatatttgattgcttaaatttagaaacaatacttatgactgcttctgaaaatttctttttctgttttggccaaaagggtatcagggctctgaccattgacaaggataattctcccaaggtattgttctttctattatcttctcttttctctattaacatatatctaaacacagatttggtgaaatttgagtaaacaaatttggtatgactaaatggtgttcatgaacaaaattcatctacattcaaagtcaaagatgatatgatttcattttctttcatttagtggtctccaccatctctggacaaagtggatgaaggaaaagttgaccttatatttcagcagtttgaagaaaaattagagcttcagattccagaaacagaagaatgcaggtaactgagtctgtttatatattattcaaacctcatcctactatattatattatatcactttaataaactaattcaacaatcttttggccaaaaaaaaaaaaaacaggtgggatgggaaatatgagaattcaacctatggcttatgtaagacaacaaaatgaggaataatcttcatcaacaacatgaacttgctcatccaagtttagcatcttgaagggttggtttgtgtgtttatgtgacacttttttctttagctcttgtagtgtcaaaaggaatctaagtcacaaatctttagctttgtaactttctagtaaaataaatgctcacttcagtactataggctgaagcataaagaagtgtgtcatatcaaataaaatcatggtatgtgatgtttgacaaaacttggaattggaaatatgttgtggccatcagtatgatctctctacagttttcgtactcatgtaatttacatgaaaattataatagtttttttatcaaccaaagaaaatagaaatagaaataataatctaattaaattttaaaaagttatttgaaacttatcacaatattgacacattaaaatcatctcttcctacggcaagaaacggatgcccttaaaagagtaggtcatgtcatgaatcacatgatacctttgaacccaaatggctaatgggtattcaaaaaaaaaaaaaagcaatctgcccaattcagtccaaaaaaattctacaaaagattcaattatttttctaatcagtccaattattacattgattgggttgagaatcgatgtcaaaccatccaatgcatctgggagcattcacattagttgatacttaatacttattcaaattgtgaaatatctaaaaaaaaatacagacagatacccgtaaaggtcatccaagaagaatagtcgaaagagtgtcgcaaaatgttcaccgtctgggaataatcctatgtggcacgccccccaacaaaaattccaaaaaattagtttgtctcctgtgtcagacatttgaaagactcagcaaaaaagatgatcacattttttccctgtgtccactagtgctcttattcagagcgaaaagaaggcaggatttgggtctcacctacccagcctaatagtcaatattctattatatttttcatatcagtaggcttatttctatttggcaaatcttaccgagttcaggtcagcctgagaacccaaccttcacttataaaaatgtcaagaacccttcatgcgaagggttggattttcagagttaaaaattctagagaacatacttgtgtaaaatactctataattaaagagtataataatattaattcatggactaaagttcattaaagccctaactacataaatatctcatctcatttactttctaaatattttttctttagcttaatttagttttaaattgatttcagaaaaactagataaatagttacactttaatttttttttttttacaataaaagaataattttaattaggttttcaataaattgctcaaattgaaaaataaataagtaaattaaattttatcgtgaatgtcacatcatctattctatacttgtagtatactaaattatcaataatacctgtaataaatgtatatcaactattagcaagtaaacatattgtatgtctttaatagaatcatcttatgtatgtgttcatccaatatagatgaacacatattttgttttaaaagatgcttatctttacatctgcaaacgagtttttacatattacatccatctttaaacaagtctaagaaaatctaatgaacttgaaaacatatcacttatagtattatcattgtaagttgttacaaccagtatagactatagagaagagaactgctccaaaaattgacccttattcatatttcatggcatggcaacattatccatacattaaaaacagtacgaaacacaatttattgttgatatgagaaacatcaagattaatactataatcgcaataaaagaaaaaagaaaaggcaaccaaacaacaccaaaacaaactctctatgaaacattttgtgctatacattacattttatcctgtaatatactacagtgttaggaaaagattatgcacacgatccacacaacaataaactttaaataaaaacgtaaaagataaataaatgagagaactatgagacacctaaacggtctcggagggtatcaaaaattgatgaagctgcagcgttttgtgaaaatgttaattttagtcttcccagcaactcgccatctttagcttgagaggcagcatcggcagcttctttcgccatgccaattcgagcgtaagactacaaaataaaaatggtcttaaggaagttgttcatacaatacagcagtagaatgaagtaattgacttaacactagttaacagatgagactctcgagagacgttttacctctgctttctctcgaggatcggcaagttttgggatatattttaaggcctctcccttctcatctgcttcaatgcatgcttcaacaaatggcctaaaacctatttgatgccaaaaggaagtcagcaagtgtgtcatgaaatggtcaagaaaaaacagtatttataccacgagggctccccaaaaattaaaattaaaaaataaaacatgtagtgatccccaaagacatccatccttacatactactttttttaatcttcatttgttttgcaattcgtttatgattcccaccatgaagaactcaaatatttaaaagagactaaaaatattcaaataataagaaaaattaccaatgggtggtctcttttcctttgagaacttttctagagcatcccaatctctgattgtagccaaagcaaaaactttaagccagtaccatctcttctcagaaacctgaaacaagttcagaagccaataataaataaaaatgattacagattatttgacacactgactatcgcagaacattgaaaaagtttttatcttttgtcattattacaaatatattcctgatgcaagacaaaccccttttcactcttccaaactcaaaagcagtaattcagttggtggcatgggtatgcgtatgcctacaaaccttaaattctgttttcacttttaaggcagctcgattatttcccaagactatacaagttcgaatggtatcactgatgcttgaatcaacaaaaatagcctgcttggtagcgacttctagctcatgctgtattctgcaggagcgaaagtgacaaaaacaagttagcagacccctttggcattatttacatgaatcttgcaattataaaactctctagtatacttaaggagtatagaagaaaaataaaacggtgaagctttcatgttataaaaatatgataagaaccgactatccttttgatcacgattaatctcaataacagtaaaacagtagccaaacagtagaaaatatagaagagtgatattgaataagatcagaaaactggttacaagctattggagcccttaggcccctttgatgcaaagggtaatactcatttcattgcataactctctcactccctatactgacctatttatactatctaatttcccactcaataaccaccaaaatacaattactcttataccctcttctactaatcctagggtttaacaaaaactattgcataaatcaatccagaagtagcacattctttctctcttcaatatcccagaaattgcaggcatatgcatctgcttagcaggctttagggcaaaatctaacacccaccaaaccctacaatttttaggaagaatggcgttcgagattattcactaggtggtggccctaag

SEQ ID NO: 79082 - DNA, 4861 bp, Cannabis sativa
  modified_base (159)..(172): a, c, t, g, unknown or other
tttttctttacatggtaactattatgagtgttcattcaattcaattcacactattttgtttataatgcatccgatcttcactaggtgacgtttagttaggaggaataaaagtatatataggaatagaaatgagaatgggaatagaaataggaatggaannnnnnnnnnnnnnaaatgcataaaaaattgataaaaaaatcattaatttttttctcttgttacattggaatggtctttccttcctttttaaaatggaatagtcattccaccaaaatggtagaaagagcctttcatttgaatgctattccaatactttaaaatgcaaccaaacaaagaaatggaatgaaaattgttttctttccattccattgcatttcattgcctccaaccaaacgccacctaagagtaatactaaattgacattcattttacatactcaaaacactcataatgcaaacaatgatgtaacatgcattaaccttaataacggtttaaaatgtatgtcacatcattgtgtgcattttgattgtgtaaaatgagtgtgcttagtatcattcgggatcaacatggtattttctcaatattgtgagtcggtttgatagggatttcgtgtttttcacgtgtatggaaagttgtatttaatatttattgaaattaatgatttatcaataaaattaatttactatgactattacactaaaatcaaatggtaagaatgaattcttctatcgatagcgataacaaaactgtcctacttaagaatttaagttaaatttctttcaaagcaaagacaaatattttggtcagttataaatctgctagctgtcttctctgtttcattctccactgtagtcgtgttcctctttgttcctcttcttatttctcttctcactgttcattttcatcgatccgcaatgctccccccctttgtacgcgttcctcccctcaacaacctttatgtgtttaaacatcttttatgcatatcacataaatttttggctaatcactgaactttgtgaaaattgtagcagaaggttttcggttgttatgcactgtaaatctgaactttatgagccagccattgatgtgtgaatatattttgcagattgaggagttgcagaaggagcaacaagaggtgcaacttttcttggacatgtatggacaggaaagtaatgacaacaggtaatagatattggatgatgaagagattgatggtttgttttgtggtcactgatcgaggcttatatgtactgattacctgcttactagtttctctgcaattttagggtggtatggattttgaatattaatcttgaagcaaagcaggcttttgtgaatcattaatatgctggtattagtgaattaaaactccagcaagtctatggatcatatttgtgctcacaaaatgatcacttttaaactgaagatctgcagatctaagggctttttatagtacttggaatttgtaagctaagcatctaggttggcatataacagggtacatgttgtattttgaaaacatcttaagaaaacactcattgtgcatattgtattttgaaatgttatttcttggcttgtggcttcactaaacataaactttgaattacatacttcatgagttctgtcccatcttttttattttttggtttttctttcttgtttttttagtttagttttcccattcctggtgtcttttgtcttctttatcaagtattctttgttttgttatatcaactcttacagactttgtaaacttaatttcagtaacctgatggagatcaaagaatcagaacgtagggctcacgctcaagctgaagtactgaaaaatgctttggatgaacatagtttagagttgagagtgaaagctgccaatgaagctgcagctgcttgtcaattaaggctgtcagctgctgaagctgagctaactgacttgcgtgccaaactggattcttcagagaggtgtgttcttaaagcaaaggattttgttacataaattgtccctaagagcaaaaaaaaaaaaaaaactaagaacgttattcacttttactgggtgcacaagtgggtctgccatattaattttaggttttatgttacataaatgtccattagaagatggtgcaattaaaattggtgcataagacatggtgtataacacctgatgattctaagaggaaattatggtagatttgtagtgtatttatgattttcatttccctctctcacacagggatgttatttgttgtgacaagagttgacaatatcttttcattggctgctaatatgtatatatcaaagttctttttttacttttggagttgagaacttcttatcagaagctcttgttaataatgtagctcttttttttctcttatttcaaaattttgagttaatgcattgagctgtaagagttagtgtttctcttttatattgttttaatgtgagagaacttatcttgtcaataactcatgtggtttcttttttattacaaaaaaagaatattatgtatgatgacatatttgtattactttgtaatgtttttcacattgcattgtagggatattctggagcttgaagaggccattaaaattaaagatgctgaagcagatgcttatatatctgaaattgaggtacttgatattcttcaatttcatattatcctcctggtcttgaactataattatattaaagtacttcacattatgctccagaccattggccaagcatatgaagacatgcagacgcagcatcagcatctgttggagcaagtggccgagagggatgactataacattaaggttattgtcattgtttgactccatatttggttgtcaccctcttcaatacaattggatatttggtctaattctttcgtgttatttgtgcagcttgtttctgaaagtgtgaagactagacaagcacatagtcttttacactctgagaaacaggcattgactaaacagcttcaacaaatgaatacattaatagagtccttgcggacgagaattgttcagggtgaagagcaggtatagtttcacttgtcttgcggacaaattttgcatctattagtcatttttaacaattgtttgaatgcaggtcaaggttcttctgagtgaagcgattaaagttactgaagaagagagacatattaaagtcaacctagaaactgccaagtgggaattagctgatgctgagaaggaggcaaaatgttctaaacttactctgtcatcttctgaaaaggaatatgaacaacttctgcgggaaattgacagtgtccaaagtgaactagacaatgaaaggtggtattctgatacatttcattagaattcaatggctgtacttgggaagatattggcaactcttgccaatttgagatccttattttatggtttttcacacgtgaacattaagttttgttttctttgaatcttccattgggttgatttccttggtaacacttccgaagtaaggtttttgtgctcactaactcactagttattatcgtgcagaaactcccggaatctcctccaggaagagtttgaggaattgaaagctagtgttgaggagatgagttctgaaacaggagaggcagcagtacagaaacttcaagaggaaatcaagttttgcaagtctatcttacagtgtcttgtatgtcgtgataggccgaaggaggtgagagttgttgttgaccccatcatttttttgtctcttgtttggtcttttttagtatgctaacacagttccaatcaatcttcaggttgtgattgtgaagtgctttcatctgttttgcaatctttgtatccaaaagaatttggagattcgccatcgaaagtgtcctgcctgtggaactgcattcggtcaaaacgacattcgttttgtgaaaatttgatcatacccttgtcttgtagattaaggcggggttgactgcagtttagtttcatatttcctagccaaccgcttcggagactctgcatatctgtgttggtatttatctaaataaatttagagaattgctaagggacacccgatgacggtgtgccatgtcatagcattttgggacaccatagggtgtcttgtagcaatgctcaaaaatttattttgttttcttggtttgtggtaattttctaggagaaaaaggctggtgtttttcacaaccaaaacatcattttgcttccttactataatacacaatcatctaagagaattctcttataggtgaaattgcccacctaacttcaaataaatgaactcaggattttgtccaatgtcagttgattggttttttcagcttaacccttaaaagatttatagagtatttggtgcaaataatttctttatgattctatttttttttagatttgttgtataacttttgggaggtgttgaatagatgtatcgatttttcagcatgttattttgacaaagtagtttatgctcataattttatataaaataattttttttaacactcatctaaacataaatgaatatgagtatttatggtagggtaatttttctacttttggtattacgatgacgaacactaagtttaaaataacttgttgcatttacgtactaaaaaatatacttattgaaaaggttccaaagacacaacaggaagaatcacaatatagtaaaatttttatttaaaaatattttatttaagaataactttgaatttgttataaaataattaagtctcctgcagacatctcttcggcaactaggggtgcacacgggtcggattttcaggtttttgggccattggattcgggttttcgggtatcgggtattgtaaatctacaaccgaacccggtgttcgggtttacgggtgtatcgggttcgggtcggttatgttcgggtt

SEQ ID NO: 79083 - DNA, 5539 bp, Cannabis sativa
tagcaacgagctgcacagtacgtacaaaatcacgttagcacgcctatgctagttagggtgttgtagtgtcctactcccattgtcactggtagatcaatatcattgacagatggagacgcactgtataatccaacaatttacaaaagtctcattggtgccctttagtatttatgccacacaagacctgatattagttttgttgtcaataaactaagtcagtttctcaaagctcctaccataatccattggagtgctgcaaaatgaatactcaaatatttaaagggtacaatgagtcatgggctgcatatcgattatagtgacaaacttgcaatcacagattattcggatgttaattggagatgttacattgatgatagaaggtttgttggaggctattgtgtctatcttggggatactctcatatcatggtcatcagagagacaatctgttgtttcaagatcaagcaccgagtctgaatataggacgcttgctcatgttacaatagaaataacttggatagaatccctactaaaagagataacgtttcctctaaccaaaacgtctatagcttggtgtgacaatgtaagtactagtgcactagcttcaaacccactttaccatgcatgcaacaaacacattacattttgtgcatgacaggatattgaagagagaacctatagtgagatacattcattcatcaaattaaattgtcaattgtcttactaaagctctatctcccttaagattctagctgctgattttcaaacttgtagtgacaccatcacacctgcctttgagaggtggtgttaagacttgagtctccacaacaacttattgtatagtgcagcaacaaggtatcacaatagaggagcacagaggacaactcaacattaattctagaatattctctaacggtattgtattagtgtgtgtgcaatgattgtacaaattcctatatcgatatttctgttattcattatcaaattgtacactgccatttgtcaatattgtagtggccattaattgtaaattcttctttaaaaggcaatgggattcattagcataatttaagctgagatttatcaaatcatacattttctattttttctctcattgttcatgcaaaatgcgatttgaacctagaattaaaactcaaaacgaagagaaagaaattaacaacatgaactaaagaaaataattaagtaatttaattggtaattttatatatattttttaaaagaaaaaaatgaaagcataatattcccatgtgatacatatagcaataaacaactattaactagtggcataattggattggatagaaaaagactccaatgttggagactttcttaacacccctatataaaatttttcctatatatagatttagtgattcaagatgacccaggtatgtttatatcattatgctattatgctaataatctaaatgtttgatcttggatggtaatgatcatgcttttgcgttgattattgatgagatcaatactcatataatgtattattataacatcacatacacgagaatgggaaaaattgacactacatctcccctaatctattacgattaatgtaaactactagccaaaagggaaaaaatcttgtaaataaaaaggaaaaattaaaaaataaataaaaaaacaaacaaacaatatatgataaggtacaagtagaaaatagatggagcttgagataaaagagagtagaaactatgtacaagttactgactcgtactaataatggatcaaaatggctcaatataggaagcaactagtacaattgtgtggtacgtttatgctcaaaattgtcataggcatgttttgttcttaagaataacatgacactagaagctagtcccaaaatcgaaatgcatccccaccaaacgaaagtcaagtaataacagtgtctccccatgcacactaccgagtcactcactacgtctcttagaccagagctcgcattggcatcataaaccgttgcagcaagaaaaccatacaacagtgagccaattgggatattggtgataagaatgttgtggttcacactcacattatttggcccaaacagctccgacgttatggacacagctgctgcaaatatgaaccctgaacttaaccccaccagcgccgtgcctgtgtgtaatgccgcctcacttcctgacatcgccagtaaaatgaaggcaactggggtcggcagaagtgcaatggtcagccatcctgttcttgcaaagtataacttcctgcacgaatcaaaattctgttaccactatgcccaacaaaacatggtgttaccaaataacaatgttgttaaatagcaaactaaaatatattacccgcgaatataatctggtacagccgaaaggagccgaccaaagaaggagaaagatgagtaaagcgtgacaagtgtagtggtgttggaactctgcccgagcgattgcgcaatctgtcctaaattgttactgaaaacaaggccgattgtacctccacaaaaatatgcaacataatataaccaaaaatcaagtcttctaacaagatctttagccgagtgctcttgaccaagcattgctagctgatccttcccaatcactgtctcacaacacccttcactttgtccgagactactatttttactcctcactaacccattgtcactacacaacaatggatcaagtaatccattttcatgattactagcctcacgagttaggagttccttatgaagctcaagatcatcaacatcaacaagaatgaagcccgagccatcaaggcggaaactcgaatggattgttcgtttaaaccaatctcgagcataggcaataccggggatacaaagagggaagatgaggaggacaattgcgccaccgaagaggagacgagcagaggaagcatcatgagtggttgttgaaccaaagaggaggaggtaaacgccagttagaacagctaagacattcaaaaggagaaaaatgaccgagtcacggcggaccgcttcaggcgggagaggatccagggaaggttggcggacgattgggatgagagcagcaaaagaggtgataagagggatgatggcattgagaatgaggtacagaggacttgaagaagggttgatggctttggcagcaagagtgtacaaggccgcactcacgccattgaagcttacggttagcgatattgcaagaggttggttcgatggaaaatttctaatgcatagaacgaagcacactgtgttgaaccagcatatgctacaaccggccatcagacaaagaaggaacacctgaaaattgttgtcaaacactgctcaacattaatctagctggtttagaaaggttcataattgataatagtactagtataattctaatttacactaccttacataagtgggaaaaatattaaattcatattgttctgtgctgaagtgaaagttgtccattgtttcatatataacagagaaagaggtctcataaattttcatatatgactgttatgtttgtgttgtgtgtgcatattaatataccattaccatcctttagttatgcttatcatcaattactagtttatattgtgttaatcacattttcttgagaaaagatatatgtatatatatagtaagagtggttaatttggatttttgctattgaatttttacatgatgtctcttatattaaaaatttaattaaagtcttttgtccaattttactaaacaaaatttgaggtagataaaaatttaaggggtacaatataacacatgttaaaatttcatggcataatttagtaaatattaatattcgggagcaaaatttagtatatagaaaatcgctataataataaaattgatgaaattaaataaaagttcttaaatttaacaatcttaatatttcaaagaaaatttttaactgaaaattcaaaaaatataatttagtgcatttatttaactcttagtattgatgtaaatacaaatagtattactatttggtatttaagatgctaatattatattgatataatatctaataattagttagagattttttattgcatagttcaagtgtacttggcacattaacctttagaatttcccacacatattttttactcaaggatttgaaaaaaaaaagtataagtacaagtgtacaaatagaagaattattcattgcttcaccaaaaggagaaactcaatctgaatcttttgttttggcccattatatattgatgacatattgacatgcatatgcataatagttgttagtttgccttttatttaaataatttcattaaagaccggagcagggccctactactttactggttacacttggttgtttctcattgaaagaggaagttgtggttgcaagaaaaactcagctttattgggtaaatttcttattttgttttgaagtataatagtaccacaatcaaaaggaaataacgttcctaactacaaaaagaaacaaaataaaaacatattctatacatataaataataaaaaaatatagtaaataaaacatcttaacactagatagaagctaagattgaacaaattaatagaaacaaacagaagaaatgaagttaccaagaaaacaagtattttttttattattatttttaaaaagaaacatgtatattaccgtggtacgtaaatgaaagaggcacgtggttgctgagaaatttcttctacccaaccttatttcacgtgcaaacatgcttcctttattttgtttgtatttgaacattttatgtcattattttatttaatttattcttagatacataataagaacatttttcgtctgaatattataataagaacatttaacaataataatgcatgagaattttttgttctatttgacgttcaagactattacaaaagttggaaaactatacttctgttagatttaatatttaagccttttcaaaaaaaaaaaaaaaaaaattaatatataacgaaataatgtctacagatttgtaaattaccactttgaaactgcttttcatttttactctatttgcacggtaatattttcaataatacccagcatcaaactagtttcatttttcttgcaaatattaataacattaatattatgtaagtcagactctatgatataccatttatttggctaattatctagatgggtaagtgggtaagatgaataatttattataattgtactttattattttataaattggactgacgtatattacagtcaaataataattcatttataagtagttgtttgatttaattcttctctttataattctatcagtagccagaccattcatcgctgaattaaatgctaagaatcgaccatgatagatccaatacgatcccagaatcagaatttgataataaaaactctatcactcaaagtaggctcttttttttcagagatatatgccataagtagttaagttcattaacaaaaatagtcgacatatttactagtcgtcaccatgattgatataaaagataaaaggaagcacaaaatagtaataatattaaaatttatcttat

SEQ ID NO: 79084 - DNA, 2546 bp, Cannabis sativa
aacaacaacaacaacaacaaagtgacaaaccttcaattgaccaatgatatactgaggtctgtgtaaccagacccaacaactttggggtaatccatttccaaaatacaacctacagaagtgcatggaggccgtgtgaaacaaaataaataaaaaatcatatcatatcatatcataaaatttaatatccaacataaaaatatgtcaaatggatgctatattaaaaaaatctctcacctgctcaggcactacatgcgacttcaatttagctttcaactcaatgttaaatatttgcaagtgatcttgactggtccccgggactagagctataaaattgtataatagaacattagctcaaaaatagtaagaaatataacaaacaaaaacccaagtaaccatatctcaaaaaaaaaatctcaagtaaacaaatttacaggaagtactgtgaaaagaaaaaaggaaaatccttaagcaatcaaattcatataatgtattatggcaataagtgagtcaaactttaaatttgagtagaaatgtcggtaaagaattttgattcacagtttcgtggcaattggagacaatactccactatctggctaaaaaagcatattattttctctaggagcgagaacatataataatttctggcaaagtatacagatcacagtggaaattatttatcaatagactattactagcaagatcaaacaactatataaataataccataaaagatcaccacattgccagattatcctttacagtatcaagatcctgagactatacgaacgtagattaagataaaagccataggaataagtcatgactcatgaataagttgttatcaaataatgtctaccaatgtttgctttcgtttacttgctgtgtcattgcagaaaataaaaccatcctcaagaagcaattcaacctactttaactaaaaacaaaatacagccacttctaagtaatatatcacatacagagaacacaatgaattgactatgtcaaaaatacagagaacacaaataaagcttaaaaatgattaagtaacaagaaaactgcagaatacacttataatgtgcatcacaataaagtttagacaaattctaaaagattcttgaatagaacaatgcataaagtaagcattacataactacaaaatagaaaaatctttaaaattaaatctcaaagattctgctgtagactaacaagtactggtagtaaactttatagacctaataaattcaaatacatattccagaatatatcaatcatgtataaatgatatcattttttaaatgcagctgaaaatcataacctacctttcaatgcaaggattttagaattaggattcatcagtgcagagtctgcagtaataggcctcctcagaggctgatttggcatactcatatcgattataacaacactattctgcggggaagtttccctcacgcatatgtacttatcagattccatagtgacatgcgtaaacgtgatgaattgaggactaatcccaacgctcggaagctgcaagcacatcagatcacaaaaaataaagatcgttcaatttctgattccagcttaaaacctaatctcaattttatcattactacacataaagaagctacattcgaatgaagcaaattgagtaacaatcatatcttaacgtgacagatctgaccataacgcccaagacaaaacagtatcagatctgaatgaacttttaaataatctaagcactcgaaaagtattccaattgagaaatcgaactacactataacatgattaaaagagaggaattgaatctgagtgtaaaaaatcggtaaatttagattgatttatcgcaggtagtacgactgtaattctaaattgagcttacgccaatcgaaccaaacaaaatgaaaaataataatatatacaaagaaaaaaaataagaataaaggtgattactacactaatagtgaaagaactgaccgtaagggcttccctcatggcgatcggagcgttagccgccgccatggttgctcagatcgagagcttaggatctagagatgcgatggaatcgcgaatttacacgtcgaaaccagaaaggggtaggaggggggcagcgtttcgaaccctgggcgagggattcgaatcgcttcgagatctgaagcagagaagggaaacctccgaagcttcttcaagagctgagtgagagatctagagagagaaggaagagttccgatattttataatcggaaatgaaatggaattttccagtgaaacgacgagaaacaaagagatctcgtctttaaaagccagataataaaaatgaaaattcctgctctctctcggagcaatatacgtgttagaatgtgactcggtgcatttgggttgggttgggttttatagacaccggcttacgcggatctgggttaacccggacccggatggaatgtttttcttagctggtgagcagttatcgctcatggctttttccgttagcctttcgtttcttattttagttttttttcttgaacatattctttaagcacaatgagttacac

SEQ ID NO: 79085 - DNA, 4287 bp, Cannabis sativa
cttagactaacaataaaggcccatcttgaggcccatatatacaaaaagtaacgaataggctggctttgatgcaaacaatagcaatctgatcagggggctcaatcaatctaaaagaaacccaaaagaaattttaaaaaattgggatcctttcttgtgtgaaaacttctttttcttttatctaacatcttttccgagcaataaaaatcatcaggctctctctctctctccctctctccctctctcttcactttaacattaaaaagaaaaagggattaaaagaaaaaagagggcaaagaccaacttttcttttttcacctctccctttgaaaacaccaattttctgctgttgattttcatgcaattgtaatataaaactatattataggggcaagttcccttttttgtgtaaatttcaaggcatgccagagaagagataaaaaaaaaaaacataagcttaggttagctccccaaacactcataggcaataataataataacccaacccaacccaacccactccacaccttaagatctgtttggaatatttgtaaatccctaagaaggtatgcctagaaattaccctgttgttgtatgcttctctttgcttttgtcttgctttagtaacatgccaaactatacattctttcttgggattccttcactctacttgtataatcatatagttcttttcaaggctatcataggaattgcacgagtaaatttctaggacacccatgataggtctatacttctcatatgagtaccctaattgccatatctttaccttaatgatgctcattttagccgtatcaacacatgaccttagcccttaggattcttctattaaatttattttaaatacatgaaatcaaaaatcacaaaacataaacattagatccaagggctaataatgattcatggggagcaatcagcggcggaaaaggggattaggaatgtattgttatctactatgtcacacacacacatgcactaaaacttttcaaatgattaattaaacataattaaacatgaaaattctcctaaatccaaagttattatgtgtatctgtccatgtgtataatggcataagacaatgtattttcattatagtgggttgggggggcaaaatgtgatcaattgagttttgttttacacagccatgttgttgggggtccaagatgtaggctttgtttaaagtggactatcattctatatatattgtttttagatttctttatatatgtatatattttcaaaaattgggcaaaaattaataaattttttcttttctttttttgaaaaagcctttgatttatattctgctattatctgtgtgtgtatgcgtgtggggtaaaggccagctctcaattcaattgtctttttgtattcattttttcttgtgtaatgatgagtttactttttctcttttttctacagttagacatatgatatttttctttcaaaaaaaaaaaaaaaaaattcactaataaaattcttagccattggtctaaaataaaacacctaaattggctctcatgagaactatatatatgtcactataagggaataactttatattcttcatatatgtgaatatggattacatgattatgaccaataataataatgttaataaagacaacataatttgatataatggcttctgcgaaatttgtggaatctattggatgtgtccatgtttatatgttttattaagttgatcatgaccccaagagctgtaatccaatctaaaattattcatttttatgatttttttaggagaaattatgacccatttaagataattaatgtatttgttgagtcaaatgattatatacttctaggttacattatggttaaaaatatacatttaatggatgagctatacaatatataaatagtatacctatcctaaattacattcaatttgaaatcttgtccctcaaatctttatgtaaaatatctatgtagagttagaactaggatcttgtaagtaatcacataaagtaataaacttggataaaaccaaaaataatatttctaataattaattaaagtacaaaaatattactcatacataattatatataatattgttaatcaataacaccttgtgcaataataataaataaaagtaaataaaaaaaatcataagaaataacttacacatttgaaaaaaccaatacctaaatcaaagaatatatttacttttatcgataatagagaagaagaagaaaaaaaaaagtgatatatagataggtaggtggtgggtggggatagagggataatggttttgttttatcagtttttttttctttccaatagatcattataagtataaataattgatatgaagatcattatgcataattacttcatataattatacttattaaataataataaataattttggagtagctaataaatatatatatgtataaaaataatattattataattaattaattaatataaatagtaaggttctgctacaaatgttgttcttgggaggagtttaaaatatagtgagaaagactgaatttttcacttgttgttttcattaagaaaatgacaaatttttaaaagaaggcaaagaaagctcattctcactgcataaagctttggtgagagacaaaaactattttagcactgcctcactatcgaatcttcacttctctcttcacaaataaaggaacaaaaaaattattataattcaccctcatatatatataaatatattatttatatttgcacatatatcctccaacataagtgatgatcggctcttttccatgtcatatcttatgaggaaaaaaaatggacacaaaagactgatacccttcacaaatcgattctagttccatccaataatcttcttcttcgaaagccctctgcatatatatatatatatatatatatacatatgacatatatagtgacatgcatgcaaatgcaatactatatatatatttatatgtatttttgtttgttaatgaatgtgttatcatttgaaaataccatgttcatataataatcataccaataattaatgatatcatatattaaacaaatggtataatatttaattaaataaatctctgactctattttgtttgtccaaaaaagaaaaatctagatgcagggatatgaattatttacttgcatatatactctctctctctctctctcttctaatttatttacttatttatatatttctaatatttgcacacaagggcacgttttctttcacatgtttaaaataatacataacagataacaattaataatttttctctagttatatatgcaaaagtaattagcaccaaaaaaataaaaaataatctagtgtatatctatttataatattcactttatatataatatgcatgcatctttattttgatttttttcttctgccaaatgccatatgtgcatgtgcatgagatttttagctctatggtttctagaaattagcaaaaaaatagccacaagttgattattattaataattaataatacataattaataagatgagataaaaaaatattttatgtttcctttttatgctttaaattaaaatgtagtataccatgggtaaagtatacctcgatcggggaccaaaagaataatattaattttcatgaatattattctagtaaatatatatcaattcaattcgtggagagccatgcaaattatatttataagaatagaccttacaatgattgatttgagaatgacatatttatatggcttatatattttctcaaactaatttttataaacgaaatatttacacatatatttggtggggactataatttaatatatatatataatatatgtcacaacaaagatgacatattaaaacaagacaggatgtaacaccaagataattatatacctgcaggaaattaatacatttcgaaaatacccctacaccaataccctaacagtcaaaaaaccaaggtcaaaaatgaccttccctctcttgtgcggatcaagagaatattccctcaaaaccctaccacctttaaggcagcataaagcctttttcagtttcaaaccctagcagccacaactttctttttctctaaacctagcagccgaatgtcacccttcagcctctcttcttcttctcttcttctttgctgcaaacaacaccagcccctttcttctccctgcaatatattgcagaaaaaaccagcaagttcttgctgcaatagattgcagaaaaaaaccagcaagtcttctccttctcttcttcttttcaaaactag

SEQ ID NO: 79086 - DNA, 1690 bp, Cannabis sativa
cctagcttgcccatgagcttgacaaaggatcttttctggagcatccatcttaagtggtaatctagccaatcgatcttgtacagaaaattcatctccgactacaagacaagaagatgatttagatattgaatagaaaccgaggtgacatgaattgtttagccatatataccagattccacaacattttcagtttctcttttgttatgcagaaactttcccagtgcatgaaatagagaaagtgtctcatctcggccgaagtctagaggaaatcccttgtccatgataggacgattgggtgaagatattggatgcgctagacttggtttcacacagaaaaactgtaaagaagtaattgcatgtctgatgtcacctccacttgcttttgctatgagatcaatctggtccacagacactttacactgctctagtctgcatattctagatagaatcttcttggttgaattatgcgtaataggattgaaagcgaccttcagatttccaaaatagttcatgtaagcacacagtaagagtcagtaacggtgctgtaagaaaaacaaaatgatattgttgaaggaagtaaaccttacaagccccagcattttcgagagacgattgaagttcttcaaggtattgtgttgtgtggtctcctgaatcagcttcaccataattggtgactaatatggcagtaggtatctgaactgaccgcacaagaagatagagactgtttctaagtctttcaaaagctaatttaccatttgtgacaggaagatcatctattaagagaatgattgattcttttgactccatattctcagttggtggtatcaatccatacttcctaactctctccacaaaatattcaaactcgtccaattttgacatgtaacgcaaccctggcaattgaccaaattaaagaatatccagaaattcatacgaacatcatcaacttccaacatatttcatgtgaagttttcccattaaagttttcggttaaataaactatctttaaatacctgcactggagttatgtagatgttcttgccaaattattggcgtaggcgtgttccattcacacaatctcgctccgaaatgacaagctatcgcatgaacagttgcctataagatgagaacaaacaggacatggataagcacccgtaggacatgtaatgggaccttcacaacaattctaacgtagccttttacaacaaaaaactccatacttcatagttttaaacacagtccaaagtactttaccaagagaaaagttatttgataagaaaagttcaaatgttatctgagtaactttgtcacatgaaaacgggagtagcaacaaatcaagatgtcaaaaccttcatttaatcaaaaaaaaacatgaatattttttaaaaattaaacatgtctacttgccgattttccaactccagcttgtccagtgatgacgataaccttgctagtgtattcatcctgtgagtaatgaagagaaattctcagcacacaggtagatttcatacaaaaagaagcagttagcaaaaggtccaaactggaactaatttacttctgaaaggatatattgtgataaaaatacctttgaagaacctaatctttcttcaaaccacaattttacttcttcaatctgcaattacaatgacaaaaattagctaatcaatatccaagtacaacacattgagaa

SEQ ID NO: 79087 - DNA, 4634 bp, Cannabis sativa
atgtttgcttagagttctaatattagagttgctataacctaattattaatttaaataataataataataaaaaattaaacctaatacaattcaattatattgttaaatatgtaaaatttgatctagttttaaatttatttataagaaaatatatgtaactaattttattaaataataaaataagtaaataagttaagatattttaaacaaaataactaataaattatttataaagtatgattaattaattaaattaacatctaatttaaatttaaatttaaattaagatatttatataaaaaaataattatataattttgctgatatttttaaattaaatttagatatttcaaattatttttttttaaaaaaaaaagataattaattgaataatttaacggtattaattttaatcgttaactttaacgaaaataataataaaaaaaattgctaaaccatcaatttctattagatagcaacatttattataaaagagatacatgattataaaattcaagatatacgtaatatttagagtgattttaaaatatcatatcaccgttttatatcttaactttatacataaaaatatttatatatataaaaaatttgtttccatcttagattttcaatcatttagctcaaaaaagtgtgcgtattgtaacaattttttattcttaattaaaaattgtaaaaatattttttaaagatattttttttatttttgaatttttaaaatgagaatttaaattttaaaaattaaaaaaaatatatataataatatgactttcaaaattatttaaatagttttctttttataattatagtctaattgtattctctcaatttggactttagaacccaaccccaacccctagcacgaaccttgacctcaagcccgacttggtgctcaatttcgacacgacccctgaaccctagcctagacctggacctcgaccctagccccgtcccgatactcgtctcaaactcggaccccaaccacaacccgacccttggacttggatcccaacccttggactttgaccccgaccttggacctagacctagaccttggcctccgagccaaaccccgaccctggccaaaacctaaatccccgcttgaaactcagcctagccctaaacccaaagcctagcccaaaccccgacctcaaccctagcccttggcccgatgtcggtgttgtaccccgacccactttctctaacctcaatttctcaattctcacttaaataataattaaaaaaaatactaacaataaaaaaatgaaatttactacacgtgttatgaaacacatttttactttcaaacaaacaaaaaaaaaaaataacagtaatacagaacgggcaaaaggttttctctgactcaatggtttatagatattttggttgtgctccaattcgtttgccaaatactaagggatgatattgtatacgactacaaacttcaatttactgcgccattggatatgagaaaacaggccttaaaatacaaagcaaagtccaatcactatacttgtaagctttgaccaacacactataatatatcaatgaatgatttaaagtatgaaatataaaatgaataaaattacttagctacattttgctccttcccagtctcttacacactatttactaaacataaacattaaaccatatcaaacaaaaatcaaaaggttcaaattgaacaaatataaaggatttccaaacctagaacaaaacaaaccatgcaaagatgaacatcacatagaaacttccaacatcacatattatgcagccataacagcattctgcctgtgtccaacaaaggcttgacgaagttcttgatatccgcttctataatgctccagcgaaaaacatagctgccttatcgcctctcttttctcctcagctccatcagagatcaacactctctgcctatcaacctcattttgcagctcatctacccttagtttcagctcatcaataagtttttgtgcattttggtactcatcagtcaactcctctcgttctttgcgaagctgacactggtgcgtctccattgcctgaatctgattgtcccgggtactcacattcgcaatgagtgtgtcaactttagcagttaagccatccttttctgccactaacatgtcatacttcagtttaaatttgtcgaattctttgttcaaaacttcaatatgttctcttcgctcagaaagctctaccagcagctgattgttctcagtcttcaaagccatctcttctgcaacacgcactctttgcatttcaatcttctcaactttagaaatcagtatattttcttctaactccttgatcctcaattccctctctttaagtttcctatcaagaagggcttgtctctcagtcaaacttaaaacttcagcttccaactctgctttctcttgagaaaattgttgctcagcatcatgtaatgcaacttctagttccctcaccatgagttcacggtcagatacatcggcattgtaccttacaatcctctcctccagttcagaaacaagtcttctctctgaatcaagctgcactttaaaagttgctatgtcttcttgagctaactcaagctgatgttgcaactgatgaccttcagattctctctcattaagtaaatgtttcagcttggcaatctcttcaactgaccccttaagcatatttctacttacttccaactcttcctccaacatcccactcttataatctgtatctgaaactcgagtctccatctcaaaaatctgcttttgcaaaaccaatactcgttttctctcagcttcaagatcagcttctcttgtttgtagcttgtctttcaaagcagaaagttcattttccagctcaatagtcttctgctgcagtgactggctactgatgatcagaggcgttcgcaagtaattgttgacaaaagattctgactcagagtctgatgatgatgaggatgattcattcccctcctttaaagaaaaaactgagccaccaccaggggagcttggagatgtatccaagccagcagcaagatgaccagatttgttcaaaccaactttaacatcaggagttaacagtggagagtcttgatcatatcctgactcggaatttccagagccttgcatttggtgatcagatgatatacttttatatgattcttttgtcacatgatcatagcgctcagccaatgatcgatacagttggtgaaactctttcacattaataatcaactctgattttctctggaagtacatttcaacattcagtgtcaaagaaccatcttcttcaatcagatttagcatccgccttacactctggtccatctctgtgaagaagaatcatttagttacttagtcaatgaatacataaatattgacaaagtttcagcaattacacaatctcataatgaatgagcaaacatactaggcatggtttatagaagtgattgacaaatttatcattacaagtattaagatagttgcttacccttaagattttctgccagccatttagaactatttggattgatctcccaacttgaaccttgagtgtttgattcagtcatattcatattaaccacaagtagagttgacttcaactactgtgtactgcacaacaccaaaaccagagctgaattaaaagaagggaaaagaaaaagtattggctttgttatttggttttactcagaaaatagtaaatcctgagaaaagcaaacaagcaatagatattatcataaatctcaataaatgaacataaacaagagaaaaaaaataactttctacccaaccaaacaaaactagatctagaaataactttttatttctgcatcgcagctttaatggttaattgaaccagagtaatgaataaacatttatttctcataatggttgaatagcttcaggattagaatctcctaagtagtttatcactacttctgactaaataaaaggtttaatgattgaaataaagctactttgtgttatactttttcctcacacattggtgtcagaaaattaagtatcctcccatgcttaaaattctacttttttggccattctgcccacacaatgtttagtactccatttgtccatcatcacacctactaaatactacatgtgtgaaacgcttcaatcagaagaacccatctcaccacccatgaaaagcaaaaaaaaaaaaaaaaaagaaagtcatgttcatgacagatgaaacaagcaaaacccaccacccacttggcttgcctttcaataaatacaccaataaggcactcatttcccatggtggtaacagaggcaactccttgttacaaaagctacatacatatttgtataatcaccaaaggttacattcactaaatgattaagtcatgttcatccttaacagccaaatacaccaaaactttccaacattttcataaaaccacctaagtaacaattaagatgaaggccagaaaaaacaaaaaaaaaaacacacacaggcacacactagaaataattcaagctaaaccctgaaagcaaaaagttttaaacaacggttttaatgtatcaaacaagaacattactttacaaaccaaatcaaccaaactcaaaaaacccagaaagcaaaataaaaaaggaaatcaagtgaatcaa

SEQ ID NO: 79088 - DNA, 2758 bp, Cannabis sativa
aataataataataataatagagtttctctctccatcaatggttttgttgtaacgtctttgttgtgtaactgggttcccttttctcacgaaaaataagtactagcgaaacgtttttcattttttgttttggaaaggaagtgattttcaatgctaatcttaatttaattctagaaccgattttttctttactaacaaacgttcccaagcatgttatatttcgtatgtcatgaaatttcatcatgattatagtgatatatatatatatatatgtgtgtgggggtgattactgtgatttaatcttaaatcaattggtgagttttgtttgagttaaatttattaagggtcccaactcccaattagctaaaaagattcccatactaaataaaatatcattttctctaaattttgttttctctgacctatgtctttatggttgtctagtgtcataggtttctcaaactttgatacaacaatgcaattttttatagattaagttgggcaagctttctcttttgaaagtaagggcctctagagttctcaggttgaacacccccacaaataacattaactaaaactagcctatactacatccttattagattagttaaataataattacaaatgtacttggtttaaagaaagtgcacattatacatgtcagcattattattagtagtaactagtctctcttggactgtttttggatggattaacattggaagatttgattgattagcttaaagaatctgtgtactgtatcttagacattccatgatagcttccgtcccacctgctgtttggatcctctttgtttttgtattagtcaattttattccttttgcttagaaatacatacgcagaaagtaatctgaatgtgtactagtttgacctatatttatgttacatcattaacacaatcttttttagcaaagttgatataaaatccaaaatagctttactttgaacgtctgttttgtatcaataattttttttttattattggcagtggataaatttgagctcaatttgtttggtaactgataaatatggttgttgttattgtgtaaattaataatatatttagtttaatggatgcactactgtttgtgacatcaaataaaagccaggctaaagggagatacattctggcattgaataatatatgtatatatatatataaatgtatatatgagaatggaattgacactatatagtacttgccaagttggtgggaagcagataatgcttgaattgatgtcttaagtgaatgtattatagaaaaatatttatttatacagttgtaatattatgtgacctgttatgttgagaacatttcagtatttatcttatatgcaactatttggtattgattaatggggaccagccagttcatttagaatatttctttattactcagttttgcttttgacacttaattttcagaatgtagaagggaaggaggaaacagaaaatgattggaaaaccccatcagagactgaaaagactactgaggaattatctgaaactaaaccccccaaagcggaggagcctgaggctaataaggttgatactttagaaaatgttgttgaaacgacagacaaagtgattgaagctgccccagttactgtagagacagaaaacaaggcaacatcacccgaggaggaaaaagcagaggaaagtgcccaagtagaaacagtacctgtggaaaaagttactgagaaagttgaggaaactgctgtaacaaatggcgaagctttgatatctgaggaaaaggtggaaaatgtgaaggaaaatgagcaggaaaatgtgaaggaaatacctgaggaaaaggctgcagatgttcagaaaactgatgttgtagaggaagagaagaaggaaaagaaagagttatctgaggaaaataaaacagaggtgaaggaaagtgttgaagaaactgctaaagtatgaaaattaaaaggattttaagttattactaaaatataaggaagaaagacaaatgtgattttgcatgttgttctacaggagaaggttgtttaccctattattgaggtggttagataaatcttgtaagaaagataaatgttcattgtttccttctttactttttcgggggactatgcgtttcttttaattttttctttttactttaagttctctttcatttattttttctgatcctcttaaatttgaattgcctttttcatttttttttaccttttgtgtggaaacatgggcttatacaaatatagattgctttgtttagaatgctactttgattcgtcgttttctcttatatattaattaatggtcatatctcatttcataattgttatgctgtattgataaaaatacttgttagtgaataacagtcttttcggcaactatatataggggccttgctctcacgcctgggcctgtcaatgggctgagaagcatcttcgaaactgtattgtctccaggtttaggataatgtattggtatagttttcttccccagacccaatagatagcaaaagataattatacatatataatcaaagcggtaaataataaaacacacaaaattatgtgctttggaaattagcctactccaccggaggccactgagtaaaaaatatatagaatatatatatatataaatttcctagtaataatattaagtgttaaccaaagtttggacatactctctctctctctctctctctctctcatttcccactgaatctaattgtaccaagttgtactctaaattgtacact

SEQ ID NO: 79089 - DNA, 4808 bp, Cannabis sativa
tttaacatagtattatataaaaatatgacatataatccaattcaatataatacaatacaatacaatgcgacctaatacgacgttccaaacgagccctatgtgtttaattcgctgtcttacctgaattctaatgtataatgagaattttcagtccataggtgatctcgagcaactaccggtattcctagtcacaaatcttgggtttttacacaatagggttaatcttaaaatcacatttaataatattcacattaaggactctaactctagatcaaataatagagcttgaaaaaaatcttatcaacgatataaagagcatccaaaacggagtttagaatcaaaagatatgctcgaaacaaattagaaaaaattgtactgtcgcctcgagattgccacgactaattgttgctgcgaccaaacatgtggtcaccgcgaccaaattgggcaagggcaatcccttgttctgtaaagtctcgccgtgaccactataaatctggtcacagcgattaagcttgaaaacctagaaaatctagaattttaccaaactcaaaaattatctattctaatcaaacttcaaatacatcaagaatatcaatgtcatgcttaaatcagagtataaataagcataaatcatacatatgcttaaccacaaatcctcaatcgattaaaatatcctttaacttacacaatcaaaactctagaaacatcaaatataatctcatgctcaaaattcttcattttgacagcaaatacacaattcaaaactcaaattttaggtctagcttaaattatcataagggatcatcacacaaaatcttgactccacctaaggaaacataccagaaactctaactcaaacgcttagtaaccacaacatgcaaacttagcaagtgaagataaaaattcagaaattaaaacaatagaaaaattgagttttcaactacctcaattaatcttcaagctacattttctagcaacaccaccaaaacctcttcaatttactacattttttcacaaaatcaaagaaacttcaacaaagaggaaaatagaggaaaatgggtggtggggtttccaaaatcagaaaaaatggtgtttatctcattaaactcagaaaaaataaacttataacttgattttactaaaatttggtcaaaagactattttgcccttagggctataaatcaacataattagtaatcaagggtaattcaatcatttcacatcacacatatacttataatctcttagatgtttcataatattaccctaaccacataactcataaattttagacccgaactcggttcgagccaaaatactcgattgtgactatactatgctaacttatcaaaattcacctgtaatataataaagtgaacatactacataataatgtagtatattagcaaaatatatcaaaattatcattttacccctttcatgacaaaattacgaaaatacgcttaattaagctaattaagattgctaatccatttctaaatttaagatattataatatgctggaaggcccagttacagtctgtatttgccctttctaccatgaaagtagaatttatgactgctacagaaacattcaacgaagtattatggcttcaagaaattttgtttaaattgaaataaataaaaagtggagtgacattgtactcggatagtcattcatccattaatctttgcaagaatctagtttaacatgaaaagagtaaacatatggacatgtgactatgttggattaggagaagacagaggagggattggttgaattagagaaggtcagattagaagataattctgctgatgttgcgattaaggtcttaacagtaaacaagttcaagcattgcttgaacttgatcaatcttaagtgttagtatactgagatatctggaataccaaccatgatggttacattctttcttcattcccgttaatattttaatttcaagaaactaggtagaatttgaggtatagttgctccaaataaaaagatctttaaaagttattcaggttatgaaaagttagatttcttccagaaaagcattcttaaatgtctatcgtgtccacccagaagcagtcttcaagaaatctagtctttctttggaaatgagtttcagatggctagctgttccttctggaagggagtttcagataatcgactccaactgttgcttttcctattcgggaagtcccttcaacgtatgctttggtctttcttccaagaagcgtacgtctcatttgggatcactttatcttatgctgacgtgaagatactattacgaggagtttgttaagtttgttatgtcgtaactaacttaacaacttagcacttgtagccaccgaatttaggatatgtatcctatatctataaataccaacacttatcattttaagaggacgagatcagatgagtttcgagaggtgatcctgattagagagaaagattgagagaaagagagagagggacatattgagtttgaattttgtatgaagaatcttctgtagatgaaaaagattattgtgtaagagtgtgagagataaaactttgagagaatctaatagagaattaatctcgactgtagttgtaccatattcttgttcaatcaataaaaataatttaaaataaataaaaataaaaatgattttggaggtgtttcagaactgaagtagagttataggtcacatcgatctatatgacttgtactagtatatgtcttgatgttgtttttatatattgtcttgttgctttaatcgtttaggttttaatacttgttcattcctgttttttttatcttcattattatttattgattaaattttagtttaacttaattctcgagtttagttataattttctcacatagagatatatagaatgattaattatagagttctaagatgagtcattatagtttgactgatttactttataattaatgtaggcgtatgtatgtgtactaaattagaatgcatacctattaatgcgtgtaattgagaatatgtataagagatttttttttttaatttttttgaaatgatatataagagacgttgagtgcaaagatagatttgaacttattaagtaattaattatattaaaataattaaagaagagtaagattttattaatacatgattgattgtatactcattgtcctattattatttgaactacttgtctttcacaataaattcaataacacaactacaataatgtttttttgttaaaaaaaaagtacaacaatgttttttttttttttttaaagagaattgctaaaatgtattttcatcggtgttatattgttattggtgtaatagtattggatcctatttaatttagcttttaaagaaattaatatcgttaattatagagcatacaatagcaatcctcttttctaaactatgtatgtgtatgacaagacttttaatattttatgaataataataataataataataataataatatatgattctaacatttttattttatttttgcttaagatatattatatcatctttatattatacattatcgttatgtttgtgcaaaataatatctatcaaattatatttttctcttcaagttagaaaaataaaataaaaattttcataaaattatgaaatatatttttgcacaaaatttttcatattaataaagaataatatagtaatcttaatacataaacaaatttcctttcattcataccaatcatcattaggaagaaattaataatcctccaatatttctatttctcatatatttaattatttattttttctctcctatttatatatattttcttccttcctacatatgacgactatattatatttgaattattataatgaaaacgttgacattgtacgtaaaatttatattatcacatcaatttataagatgtgtattcaatcaatatacatttatatataaagcatgaaatgttttgttgcatgtatatattaatataacatgatccacacgtacgtgtacacctatcatatatataatatataaatttatatataaagacatagaatgaaaaaattattagcagtagtatcgaaaaaatcaaattattaagattatcatgatgaggaggaagaattataatcttatatttttggtattagttgtaataataagttgtagttcaacatggatgatggtcatgatcccatgcatggctcaaaacgacactattccagtgaaagttggtgtcgttttggacatgaaaactcaaattgctaagatttggttaagttgtattgaattggctgtatcagatttttatggctctcaccccaattttaagacaagattgattctcaatatcagagattctaacgaagatgttgtcaccgcagcttcccaaggtacgtacgtagaaataatattagggtttattagatacattgtattagatcgtattgtaagtaattttattattttgatagataaaagaagaaaaataattgttattataatcttaattattaaattttagtcatcatttgagctgctatgagatataacctataaattgagttataattttattgactgaatttgataggtatatttaaacaagtattttgactaacgtaactttagttaagtatttaagcaatgtaacatataatatatattatattcctcctatatatatatatatataaaatattagtttctagatgtgcatcccaaaaaagattgcaccaatatactctttttaatctagatagttttaattttataatatttttatatgataatgtacaacataaatatttaa

SEQ ID NO: 79090 - DNA, 5761 bp, Cannabis sativa
attaaataattcagatgtaaaaaagtaaacatctaaatattttattattcaaatttagatataatatcttaatattcatatggaaaaaaaaaaaaaaaaaagaccttaaatcaataagaaaatgcaaaaaatgaattgagaaagacagctagaaaaaattgacggtaaatatcaaatgtcaatactcaataatgaaaggtagcattactaacaccattacaccttagtgccaatgaaactatacaattgactaacaaatggaaagagtcatctcaagtattgaagcaactgctagctatcgtcaatttctagaagttaggataagtgattatcaaaataaggaagatctagatataaagcttggaaatactttgcctgtgctattagattctagaatctcgattacatgtaatgtctatgcctaatgtcagcacaagagaactaaatttaaacatgtaattcatgttagtgttctgctatagatcaacttactggttgttagcaacagtagagtcaacatgctccaacaaaaaaccatatagcttcttcctcaatccttcaatcctttcgtcttttgaaattcctttcgtaactatgtcatccaaccagtggttaacccttttgagctgtcccaaaagagatgccacttcagtgccaccttcctctcttttcatcccaaaaccaatgcttaatgaatcctccaagtacttcaagaaccattctctagaagcgaatagaagtttttgagctagacttgctgcctcaattaatttgctcccacctttatacagctcatccctttcagtaatcgatttccttgtggctgatggcaaccgccttgacgcagactgagacaccttagtagttaaatctgatgtaagagttgtatgatttcgactttgtctggtagtaggtgaacaactcccaaaattcacttcttgagcattctcaaggacaacataatgggacttctcactctttagaatttcatcctcctcctgctttctgaacagatcaaatgtggacagattagtttctacagcagctttaacccatgatgtggcattattactagcagaaaaataaatgcttggatctgcaccagaaagccttgaattgactatgtaatcaatatcatttgctgaactctgcattttctgattaaggtccaaaaaatttttgacgagtgatcctgcagatgattttttagaagacaagcagagttctgcaaaaatcctgaaatgaaaacaataactatgatctttaattatttggatgtatgagtgagacaaaaacatatttcacattcacatgctgcaaatagtaaatgtgtatcatcactttcatcaccaaactaacaaccaacagtatctcagaaaacctgatcccaaagggaaaagagaaaaggcattgacatacacaaatagcagaatagaaacaaatatgacaaataactagcgaaaatccttttttttaacaaagattttcttattctttaggtgagattaccttttcaaatatgttaggattccagaacaattaaatatgaactaaatagtttaacacagattagtccttttaagggcaagttctgcataaagtgttgtaacaatagtaacagatagcaattataacaaccgcataagcagaactcactctcaaaatatgaggattcccaagtggttataaaccaccaactatgcctataaaagtggaatcttaatagtacaatatctctttagagttgatgccgcagcagcacaaagttcacaccttttgtgaccgtctaggtgacttcacccaagtcaccacttccagtatcgtcccactaggagatgttgaatctaatataattgttacaacgactttggtatagcacactgttaggatcccacattgactatgtatgggattggttggtgatttataagtacttaggcaccctcccctctagaagtggaaacgggtaggatgttcgtaggagtctaggagagtatgcttattctagggccctatcaaaaaaatgttgtacccatcgaataaaactgtcatcgttactcctctcttatgatagctttttggaagtaagttttaccgaagtgcgtgtaacaaatgatattaaatggaacgtggaaccgacattgtagagtcggggtgacctatgaaaggggtcacgtgtagaaaagcccaaagtgggagtaggctgttgtggacattgaagaagtatgggattggttggtggtttataactacttgggcaccctcctctcttaagctagcttttaggagtgagttctacccaagtggttgtaacacttacccacaaaagactagctgtggagaagagattgctgaagtggttacaaacaagctccaaaactcatacttagttgatgcgggatccaaataacatattatgcttattcttgttatagttgcttctttttgcaccctgtctccatggatcatatccccaaatcatgattcaaacctcatacctcatgcaaacacaccatggagcttgatccctcaacctaatcccgtgactcactacagcaagcaatttgaacaagaatggagaaaggaagaccaagcaacttgaatacacatacaacgaataatcaattacagatttgtgctgctgttattggacaaatgcagccataaaacgtaacctaacttacccaagctacttgaataataagtatacacttcctccataaaaacaagtgctcataaacagtcaaatttaagtttgttttgatttaaatattaagaaaaactaaaacgaccaaaaagcctctctcttaaagcatgacttaaatgatactacaccactccacacaaagagaaggtccaaattcaatttccttctctcccaatgtcaataaggaaaggtgaaatcttatgtttgatttttaacatcatctagttctagtcataacaagaacaaagaaaataagagaaaatctacaaacataaacatcttcacgctgggtgcaggctcaaaagctacaaattagcatcttaagcattataaaaacataaatatcagctgggcagtttgaaaaaacatcactgtctgatgcttactgtttctcaagataaaaacataaatatcataccccatgcaacgaatgactccatttgttgctgatgcttcttcaagggagcgtatagcagctaaatatgcaccatttctttgctgaagagcttgctgaaatgaacagggagaaccgagcagaatattaatatgaacagctcttttccataaaaaaaattgagtgggaaacagtaacctttccaagatcagcaattgtgtgtggcagcatatcccatgagatcttctgcccagacccaatcttgctactaaggggcacattaacaagacgaattggagtaatgcagtcaaatgatgatttgagttcctttttcgttagttttttcaataatggtggagatagggtattgttctgatttttcaagggagagttgataagatttctgcactttaaagtggaaacaatcttaggagaagtgtctttatcagaaatgacctgaagcaatcacaatttatcagcttcctcgtaatgcacagcatgatcttgctaatgtgtttagcattaacaccaaaagaagctacagtataaagcaaagaatacagaacccgtagaagtaacatagcgcattcactcatttgactaatagcattaaaaaaagaaaaagatgacattaactaaagtctatgcaaacaatgccaaacaattttcaccgagaattaagcaaaaaaaaaaaaatccttgatttgtaaaagaaacacaaaatgaggggaatcactaaaatatccaactatgttttaatatgctattttttcttttagcattttacaagttaaaatatatatatatatttttttttttgaatcttaaaattttattcaaacactttcaggcaagagcatcatactgactaaaaatacaatcggacaaaaaatatatattattaataaagtgatttggtaaaaaatattttttttttattattatcatttacataaacttttattattactttatggaaatatagtttcataattaatacacaaagaagtctcatcagtggtccaagttcaaatcctccttcccgcaatgtcacacacaaaaataaacaaataatagagaaagaagacattacgagttaagtttgtttatttattattaaaaattcatataccaattcacataaaaaaaaatttatgaacaatccaaaccatacattttttttaaaaaaaattagaaaatggtaatctccctaataataataataataataataataataataatattcaaaattcataatttacttttaaaactcttcaaacaaattttttttaaaaaaatacttttataaaagaaaatatatcttatccaaacacaaaaacttaacattatcaaagcttttctctatatttaattttatataatcactcaatatcaacaagaacgtctcatttgacccatggcatgaccatgagattagtaagatattaccaactattaccaagtggcaataaacaaatacgacataaactcaggagagtgcataaagacagtaaatgaaaagactataatcaatttaagagcagtaaatataccgaagtcgaaacgtgtttggacttggaacgtggaactggaactggaacacttctgtgagcactgtcgtctttgcatgccgacttctgatcccaagaccttctagccgaatccaaactcaatctcctcaactccaaaccctctgtcggcattctcttctctaacgaaccatttttggtaacccagttcctagccttgggcttaacaatgtcggattttgactcacttttctcccaactcttgcccacattcttatcattttttgttattttacttttggtctttgaaccctcaaaatgggctccaacttcccggagaggaagcaagtcactaggaaccaaatcaataggtttccctacacaaggagagggtctcctcttaggaatgggcttcagcccgcgaagaatcggaactggagaagccgcgtctagacgagtaacgtaaacgaactgacccagctgaatctcgtcgttgtatattaagtccaagtcctgatcagagatggaggcgtatgcagaatgaaccgagtccgaaactttgaggaagaaacctctgctccgccatggatcggcatcgtcggctccggagagtgacggtaagatctcgatgacctgaagaagggcagagcgatggtctccggtgactctgacgtccttgttggctgcattgttgagaagcttggaaaggacgccgggagtgagagagaccattgtgaaagattagaggaaggtcagtgaaggtgatgggcattggctttggcatgggcaagttcagaaagacagatgttctgcatttttgaaataatagaaactgagtaaccaaaagtgggacaagtcactatcgaatctcaatgaaggcattggggattggggagcttatagctatgaaactggcgcggaactaagcctttttcttttcttttcatttatttaatttttatttttacagtgttagttatcaaagcggtcttaaatattgtggaggtcctattctaattttaaaaattaagcctcttataaaaaaaaaaaatattaaattttgggtaaaagtttataattttattgtcatacaattttttttttaaagatatagtctttttataaaac

SEQ ID NO: 79091 - DNA, 5627 bp, Cannabis sativa
tagaggtaaatttgattaattgaagaataaaagaggcatttttcaacttaccccttttattcatgcattgaagcccaaaccactgaagggcctgccaatcaaataatcttcttgtattattattatttatttattttttttgagaaaaagcgtttaatcttcttgtattattaaagtatatgtttttattgttatgccacaatgtcagatatacttatatttaaaaataaataaacatacatttttacatattaaaactatataattattttttgtgataatgtattttaaccattgcagagatgatgagtgaaaaaaataagctgtttaaatgtaagtaataaaatgattatgaatatgaagtctcttatgttactcttaatttggaatttataatgtcattttattggaacagcatgttctaattaatatccatcttctttaattacttcataacaaaatcacataataaaacatgtaaatactattttagattttatgtttttacaaaaattaccgatcaaaacctctatcttatcaaatgataaattaaatccatattttctaaaaaaaaattgacgaaaattaaactcaataaactattttatacaatttttaaaaatacaatgtctaatttatcatttaacaaaactaaaattataataagtaaattttgcaaaacacacgagatctaaaaaatggtattaacccaatttaaaatcattacatcgttgtgactagtttgaaaactttgatcttaattttgttactacttgactctagtttgaaagaaatggcagaaggttattatcaccaccaccacccattgacacattctcttactcaggtctctttcttttaaaactcataattgtttcaaaaattgttttgacattaatcttaaattttctattattcattgcagagagaaataacagagccaacttattttgtggtacactccttagattgtgtgttcattttcattaatttacattaaaaaaactgtgtattgatgaagacactgagcaacactcaacaacagtttgattcaacagagtaatttagttcaaaaacaagcactgcaatgtagaaatggaaatcaggcatttgaaattggaactgttcaagaacaaaatcaaagggttagcttaaaatagtctctttcaatttcattatatgtacttatgatcagatgttttttttcctttcttaaatttcaaccacagggctatatgtatgaaaatgcaactaataatacagacaaaataggtaagaaataatgaaaacaatatagtaaattagagatattagaactcacaataaacttaatttcttttgtcatttaatgatatagattcacttgaatggataggttgcctcttcacaagcaaaagcataactttgtgctgccaattttcatcaaatgggaagtatttggcaagtgcaggtaaattagcttagcttaattaattaacttttgcattgattcataataatattggcagatttttgtttgggatgttggaactttaagctctcagtctactttaactgctcattcatctttcatcaccgatattcggtttcaaccgaattcaagtatttttgcatcttcttcatttgatggaacagtgaagaagatatgggatgcagccagagtaactacttaaatcttttctcattccattttaaaaatccgaataagtaataataataatgtttttccctattattattgtagccaaagcaatttctgtccaaccttgttggccactctagggcagtttcttcactagatttccaatccaacaataccctcttctcctgtgacattactaataaacttacacagtaatctacttgcactaatgttttagatgctaaggtaatagtttctatgtttgatattatgttataattccaaaataaaataaaatatttccttaaattatgtttaatttgaactgtagagtgctgcaaaccatattcgattccaacccaacaatggaaagctagcttttgcatcaggaaatggagttggttttttcaatactcagactagaaatgttgtgttcactaagaaggtattcatagatccattatcaagattagttttttattatgtatttagtttttttaattaaaaagtttatatttttattcaggtacataaggaaactgttcatttagtttgttgggattattatggggaacatgttttttctatgagtgaagatagagttcaagtttggtcattatctaaaggagaatgtatgtatcagatagtttcaaatggaaatacttaccatgcacaattcttatttttatggtcaaattccattgaattgatataatatttaaagtttattgccattactttcttgccaataatataattaaagttttttatttgagcagagcctgaagttatggaatgatattggccgaatgaggacatcatttggagctcatggtggaaatgttagagctctagctgaatcaaaagagactaatatgattgcctcagctggcgatgatcactgtgtgaatttatggaaaggaaaatccaccaatgcaagtaattattgacattgcattttgatccagattcttatttattcatcagtctttctaaaatttatatatttcaaaaagctgaccaaatacaaatcaggtccttaatgattcaatatgcggtatattgtatgaagaaaagttaaaatatgataagagaagaggtgcttctactgtgtacaccgaaaaatgagtgtaatgatactccttttgtgtttttgatattagaattgctataatctcgatttttttttaatataatggtatatattgtaattatctaaaatatttctctaagtttagagaaatttaaaataatttataatatggagagtgtagtgttcaaattgtctatttcacactgaaagcgaaacgaacatactttaaaatcaaatagttatgaatgatcttctaactaaaagcttaaaaagatcaaatattagtgatcaaaggcacaaacttcttgccatggcaaacacgataccaaatatgcaagcatagaacctaaatcctaacagaactaatctacaacaaatacagtgcttgcctgaagtttgactcgaaacaggttgattccgtggcgtcctactggcaagagtcttgcatctgtgcattctagcatcattaagtgagcaagctgaaggagggaaaatgtagaaatgtgatgaagccgataaattatagaagaaaaaaactcatactcaaagcttctaaggactatacacacaataccatcatcttcactctcagtttctgtgtcaacctcttcttcactatattcatacaccttaggctgaatacttaaccattttttcatcacaagggaaggccataaaggctgacagccataccaagaacgttgacaataattagcattgatgattaagcaagttcacaaaaaaggagagaccaaaaacagaagaacagagaaaaaaaaaaagccacattaaagtagtgtacctgggagtgctttcctctctttgttgtcattttgtccaatgtcaaaattctattcttgaattaagcaagatggaagttatgtgcaaaagaccatgaaacatgagaagaccttaaatatttgaagcaaccacagggctccaattatcactctgcttattttttttatatataaatatttagtactcaaaatttcagataaaaattaggtcctacataaagtgaaaattttatttctatgagatgaaatccacaaaactctcccaacttgcaatgaaataagaatatcaatgaatggtcctctctccccacctttacaactttctgatacaaagcaaaccagcaaatatatatatatatatattatagaaagtttcactattatgggaaaaaaacaaggcaaagcaaaacaaaacagctcaaacatttgtattttatacgggcttcattcatatcctttgctttcaatatggcagaaactttgagtgaataaagtagaagtcgaattttagtttttaccacctttatgatagatacatttagcttaaggttacgtttgaaaagtgagtttggattaaaagatataacataggataatgaaataagtttcttatcgaaaacaaattgggtgcaaagttgttaattttttgtcatattattgattatctcaagattttcaaaacaattaagttatatcctatgataagaaaaataatttagactgttagaatattcaattcaacactctctccaatctcataaaaatatcaaatccattctaatgcaatcccattttccaatttctaaacatgaccccttatgattttcctggtgatcaattaataatctcagtggaagcttaatgaaaaagaaaatcatcaggaacacaaagaatgtcactaagaatatgtttgataagtaccagatttcatctcatctcatgtataaccctataagtaagtacagactaaacatgtaaataataaaatcaatcacataaacagaaccagaaccaacaaaatgtttgaagctgctttattctgcaataaaacaaataaaagaagagtctgtatattcaatttacaatgtaactttgaataatttcacatcaaaattggacgtgggaatcagacacagatcctatatcctaatttacaagcgatatgagtatggaacaatcatacacaattgaaaagtaacaagtataaagaattaaaacatttgttgctgctaaagttaataatttgaagccaaaagcaaaataaatctgtacctcaagtaagtagaaaactttgaatgaatcataacatgttggtatgaatatgaagaactctattatgagtgttcttgttcagagcttctgatgagattcaatgagcaatgcatttaacatgatttgaagtgcagcttcataaacaggcaaatcataatgcataccatcgatcgtacacctaactccacaactccaactcaatgatgccatatcaatcatcaaaaggggtcctccagattgtctcaaaatcttacttttccataactcagtatcataaccccttctcatttcatcagtcattttaaccctcttctcctccgtattcaacatcgagttaatcaatgtcggcattccaatccagaaaaggtgcggcgatctaaccgaaacggacccactcacgggtccttcggttacgagctccggtgaaaatggcagtaacgaaaccactgagtctctcaacacctgtaacgaaaccccgtaatccgattcgttcgtaaccctaagcatatgccatagccctgaacccatgatcaaaacatcgggagagtttctatttcgcttgaatgccgtaaccaaatcggtcaaattggattcgtacggagcccatacgaaatccaatctcatcccaatctcatcaaccacagtccgataatcactatgcctcttaaaaagatcgcttttcacggactcaacagcttggggtttcattaccaaacccaaaagcgatagggcgaagaatcgtgactgtgagtcaccggcgactacaacccacgacccgtttaggagatccgaagcgtcggatcgggtgagtttccgaaag

SEQ ID NO: 79092 - DNA, 4703 bp, Cannabis sativa
aaactgttatggcctcatttctttacaccacccctcaaacgagagggtgccatttgtactccgagtttggaaataagcattcgaaatctatcatgtgttaagcctttagtgagacagacagctacctgatctgttgagggtatgtacttgacttccaattcctttttcagcactttgtctcttacaaagtgtatgtccaattcaatatgctttgttctggcatggtagacggggtttgaggctaatgctgctgcactcacattatcacaccaggtcattgagctagctgccaaaggaaactgcagctctttgagtagagactcgatccatgttatttcagccgttacatgtgcgagcgccctgtattctgactcggtacttgatctcgatacaacagcctgcttctttgatgaccaagacaccaaggaatctccaagatagacacaataccctgccactgagcgtcgatcatccgggtagcatgcccagtccgcgtcagagtaaccaacaatagctagttggtcacacggtctgatgtgcagtccatgttgaagtgttcctttcaagtaccttaggacccgtttagctccactccagtgagtagttgtggggctttgaataaattggctcaatttgttgacagcataggcgatatcgggtcttgtgtggcataggtattgtagtgctcccatcaagcttctatagacagttggattcgcaaggctttcaccatcagtcaaagagagtggtttcccagcaacaattggtgtggggcacggcttcaaggttgtcatgtcatatttgtgtagcagctcttcaatgtatctagcttgagtgaggtatatccctgtctcatcacgttgtacttcgataccaagaaagaagttcagtggtccaaggtcttttaatgcaaatttcttgttcaaggcagcagtgaattgagagattctattaggattgttccctgtaattataatgtcatcaacttagatgagtacaagaatgataaccttttctttgttgaggaagaacagtgagttgtcggctcttgaattcttgaaaccccactgctgtagtgtttgttttaatttctcaaaccacgcccttggagcttgtttgagtccatacaaggacttgtgaagtttgcaaacataattcggcttggttggatcaacaaatccctctggttggcacatatagacatcctcctcaagttggccatttaagaaagcattgttcacgtcgagttgttggattgtccaattccttgaaacagctatagttaggacaatacggactgtagatgccttgataacagggctgaaggtctcactatagtcgacacccggcctttggtggaatcctttagccactagacgcgctttgagtctttggaaagatccatccgcattaagtttaaccttaaagatccacttattccctatcaaattatagtaaggagatggaggaacaagggtccaagtttttttttgctttaagagccatgatttcggagcccatggcttgattccacccctcaatcgcaagggcttctgctactgtacgaggttcagcaaagagagaagtccattgggattgacctgtaaacacctttggcttgaagataccagccttggaccttgttatcatgggatgactaggttgagagggagctggtggaggttcgggtgagacagtagagggtgtagcagaatctgtaggactgtggcaagatgtatcattaggagcagaatcaagagacaagtgtggggaaattacctcatcagaagagtgagaagaagtggcaggaccaggtggtgctactccgtgagggacaagtggctcggtgggaagagatacacctgcagagttgtgaggaagtggtaaatgaagccaagaaacaggtgctgattgttcagggctgtaagtgttcaagaagccatgcttaaacggaaaatcattttcattaaaggtgacatggcgggagatgtaaacacgacctgttgagctaagacatttatagcccttaaacatttcactataccccagattgatgcacttgagggaacggaagctgaatttgtgagcttgataggaacgtaagcatggaaagcatgcggcgccaaaggtttttaaaaaatgatagttgggtttgcgatggaataaaacttcatatggagatttgaatttcagaacaggggtaggaagtctattaatcaaatagactgatgtgatgaaagcatctacccaatatttcaaagggatacctacttgtgccattagggtgaggcccatgtcgacaatgtgtcgatgtttacgcttagctcgcccattttgagctgaggtaatggggcaagaatgttgaaaaacaatgccactttcttggacaatttgaccaaaggaagtgtactcacctccccagtcagaacgcaagctttaatttttgagtcaaattgattctctgctagagatttaaattgggtgaaggcatctagtgcgtcaaatttattttttagtggaaaaaaccatgtgtaacgactgtagtcatctaggaagtgtatataatacttgtaattagtattggattggactggggcagggccccataggtcggtgtggataagttcaagaacttttgatgctctgctagtggaaactttaaatggaagagcatgggatttccccatttggcatgcatcacaaaaagagatttgttcattaattggaactcttacactagctgaagcaagaacatgctttaaaacactagacgaggggtggcctaagcgtctatgccaaaccccctttgtggaatttaaagactcatcagccacaggctggtttacactgttttgagctacactagacatactaacatggcactgagacacttgagaagattggagagatgacacaaatttggagaatggtggctggagttgataaagaccatctttaagagttcctcggagtagcaccttccctgttttcttgtccttaacacaacaaaaatcagaatgaaactccatcagtacatcgttatcagctgtgagtttagatacactgattaagttctttgctatttgaggagcatgtagtaaatcttttaaaatcaagggtttctgtgagaaagatggtaaagaacaacaaccagtatgagctattgaaagagaggtaccatctgcaatagttaatctctccttaccaccatacggagtgcgctgaagcagttggtttgggtcagaagtgaggtggttactcgctccactatctgcaaaccaagcttcatggtcaataacctctggagcagtcacaaaggcagtaggattacctgagccttgacccgtttgtgagccttgtttgttgcgaggatcacttcccatgaacgactcatcatagcgattgtagcaaacggcagccgaatgaccatatttaccacacacttggcaagtgggacgaccattgttgttagagattcttccacctctaccacgagatctattgcttcctccacgatatccaccatgacctgtgacgtggccatgagagggttgattgttttgccttttttgtggattagaatggttggtagtcttatcagcaagattggcagagggagctattgcatcctttagaagttttgatttggaactgtgagtattcaagcgttctaagcggctgtcgaagctcagcaaaacatcttgtagctctaaccaggtgagtgaggctccatgggcctcaagttggacaacaatggtgaggtattctggaccaagaccatttagaacattagtgacaagatgagactcagggtaagattcacccgctatggcgagagtgtctgcccaagtgcgcatctgacgaagataggcggccatcgtcatgctttctttgtgagttgtctgtaaccaggtgctagtgtcatccaccttggcttttgagtacgcaccatagagggtttcgagtgcacgccatagatcgaaggctgaggtgcaacccatgacttcagaggcaatggcttcagtcattgagccatagagccagcccataagaagctggtcgttgattatccaggtttcgtactccggatttggacacatttcagatcttgttgtgccatcatttgtagagatggtcataggtatgaactctggagggcacattctggttccatttagaaacccatcgagtcggtgacctcggattatagtggataccatcgttctccaaagagtgaagttgttgcgatctagttttagcacaaagggttggctgagtgtgcttccaaacggtgagactggtgtagattgatggatgtgagtattggctgaactttggttggttgcagcagaagtagcatcgccttgggtagcagatgcggctggaggtggagtctgattattccctgtcgacatggcgacgtaggccttttagagctctgataccaagagaaaaaaaacagagtatatgaatttaggaaatatcagctcaatcatggctcatgtattcatttcattatatagccaaatgggtgagtacaatataatttagtgaccattaaggccttgacacgtatggtacagtacataacagaaatagggaatattctgataacaatgattacaaatgatttccttgggaccactgctaaattgctcactggtgtgacacagcagaaactgttatggcctcatttctttaca

SEQ ID NO: 79093 - DNA, 2320 bp, Cannabis sativa
  modified_base (525)..(536): a, c, t, g, unknown or other
tgtatgattttaaaatacagagtatcaaataagtattattgaaaatacaggatactcaacttgtatttagataaaacacagggtaccaaatgtgtagacatcctaaaaggaaaagagctttttgcagctaaactattattccacttgcacttaatattccaagctcaaattttagtagtaaaacccttcaaactactaaactattagcaaatttaaagtgacatttatttttcacagttaactaccaacttgatatacttatgtatacacttttgtacacgtgacacgtatatattagtacacttaatattattatttaaaaaatatagaagaatatttcaaaatttataatattttttattttttataattttatttaattttaaaatgatttttaaaataataatattaggtgtaccaatataaatgtgccacgtgaacaagagtgtatatataatatttttatatgtgccacgtgtaaaagaatatttcaaaatttataatattttttatttttataatttnnnnnnnnnnnnaaatgaattttaaaataataatattaggtgtactaatataaatgtgccacgtgtacaagagtgtacatataagcagtctataatgtcagttgaccaaatgacatttaaatttgctaacagtttagtaatttgaaaggttttacagctaaaatttaaacttgaaggattaagtgcaaataaaagaataattaagagggtttaactgttaaaaactgaaagaaaaaaatttgtttaaaattttaacagaaaaacttaaaacaatcaataagactaaacaagaaacaaaacagaaatacaacttccaattaactaaaactaattttgttaaacaaaatttaactaaagctaacaaactaactctcaatttttttattttattttttaaaatatattaccaaaatttcacttctattttatttagttatttttttaaatagcttatcttatgagaggcctttttatcatttcttagctatatttttgccccttatctattattaaagtaggtgataggaggagtgctctcctttattagccatcttacttatcaatacctatatttcaggatagagggggattttttgtttcttttttttttttttttgtgtcatatattgatttgaagaataagaaatgaaatgtgtataaactcattctttcattaatgcattatttataatattattttttattttaaaaatattataaaatatattttcttacactttgagttttgccactattaaaaaaaaaagtgagttatgatcaaattttacatatttttcaaattatttgttgatgtaaattgatttagagctaatatactgcagtagttcgagagtttatgtgaaaaatatttgatggataatattttacgataaatttatgattttatattctaatttctagagctattaatatttacttatataagttagttttttttaaaaaaaaaaataagcgtattcgtactattaataaaataaaattagacctcgcgatcattacataaaaggttcttcagaaccgaagaaatcggaataatcccatacatctttgtgaataaaagctcaattagccacattatgggcagcaaaattacaagttctactaacatacacgaaattacagcaaataaaagagggagatgacttagaacaaaaggagatatagttcttaatcacccaatgagactccgtcccattgagagcattgataactaatctcgagtcattctcaaccaaaagaacttaaaaccttcctccagagccatcgaaaccgctgcacaacaagccgctgtttctccacataatacctccgagaagtccaaccgagccgtgtgaatctgaaccactttacccagatggtttctagttaccaccgctaagcacatgctttctaagcccaccctgacatcacagttcaattttatccaatcctgaggtggcgacctccaagtcccccttaaagatggtgtagggcaaggcaagaaagcatcatgaagttctgtataagaattacaaatctggtcaatacatttcaaaacatccggatgagagttgttatgtagaaaatcatttcgcactctccagatagtttcaacaacaatcgaagcatacaggaaaacttcttttacttggatccccctattattgagattccatataaatttgacccaaccccaaactcaaatcccagtattgcaaataggatagatgccccaaggtgaagatcgccataaatgcatcgccacatcgcaggacaagaaaaggtgttccatggat

SEQ ID NO: 79094 - DNA, 3874 bp, Cannabis sativa
actcaatttgatctagaggtagagcctatggatgtaaccactactttcttagatggagaactagaagaagacatatatatggaacatcctacagagtacattaaaaaggggataagaagacctagtatgcatactagaaaagtcactatatgagaagccattatgaccattgcttgtactgcaaaaggaacagaaatctatacaacaatcttatctacttatgtatgtagatgatatgcttataataagcaaacaaaaggccaaagtaaaaaacctaaagaatctactaaaggtagaatttgagatgaaagactttggagaggctacaaaaatacttggaatgaacatcagaagagatagacataagggaaaactagttttaaactaggaagactacatccataaccccattaagagattctccatggaagaagccaagataaccaagcaacttatcacctatcatcatcaactatctaaggcacaatttctaatagaacctaaacacatagaagaaatgaaagagataccctattctaatattgttggatctgttatgtatttaatggtgtgcactagacctgatctaacacacaccatgagtacataagtaaatccatgccaaaccctaggaagaagcattagaaagcaatgaaatggactatgaggtacatagtaggcacaactaaggtaggtttggtgtacaaaaggcttaacactaaactactgataaaagggtacagtgatgctaactatgctggtgatagatatagcagaacatgaacaataacctagtactttaaaatacgaggttgttgtgttagctagaaggtacaacaccaaatagttgttgctttgttaaaacctaaatcagagtacattactattactgaagcaataaaggaaacactatggcttcaaggtctcctagtagaggttacgaaagacaaaaaagttcctactgcgtattcaaacaatcaaagttgtatacacttatgtaagaacccgattttccatgacaagactaaacatatagaaatcaaatatcactttatcagagacaaagtaacacaaaagttagtttctatacagaaaataccaacaaaagaaaaccctactaatatgggaactaaaattgttacccttcataaattcaagctttgcatgagtttgttaggggtagacaatggaggatagacctaaaagagacaagagttgggaccctcaaagaagagaaagttgatactaatcaacttatatgagaaataaggtagaaattgttgaaattaattccccatataagttgacctgtcacaactaacacttaaataaaacaaaatcagagcctaactaacctaattgtttacaatccaagattcaagacttcgttagttgctctcaaacccaaaaataggtagatccatgaggaacaaacctagtgatagttgctctcgtgttcaagaaaagaaaagaagagagttagggagagaagagtaagaggattgattcaatccagagagaaaataaaagtgtgggagagaaaaaacatacatgtgatggtgaaaatgagctaccagtcgatgaatgtgtcttggagctctaaaatctatgatcttaatagtagattgtgaactgagcttctcaaaggcagctcactaaggacgtaatccaaatttggtggtgaaccttgtaaaatctcttagtgcttgcttctctcttaccctcacatcttttacttgatttattgcccattgttgttgcatgctttttctcatcaagctcaagaacaggatggtctctcatttttcttcaaacttttgccttaattgtttttttctttgaagcttgttcagataagacatttggtaaagattgtaagataaaatcaaaggcaaaatcttaaagtgatacgtgtccattttttgttcattaatttagacaaaagaaaggtcaaaatttaccttgtgcactaatatgtgtgtgagagttgtataggaagatttgtcaaatttcctacaatttctatatttattttctagcatcttattaaatttttaacatagaagaggagtttattaattcttatatgtatgcaatatggatatgggtggattgacttaattgagagaggaggtggccaaattaaagcgtgaattgaaggaccttgatgagagattgctttcaaatgatgccaaattgaatcttatacttgaaaggaatgctaggagtggtgaggagagacgaacatcaactaagttgctgatgttaaagtatgttgaggttgttgactatgttcgtggtgctgccaattgcttgaaggaagataaaataagtaatttaagggaagaagatattttaaaagatgatattgagaagcccaatgttggcatttcctccgatcaattcggtgttcttcctagttttaatttcaatcttcctaggaaagaggaggcaaagagcccgtatgtagatgaaaatttgaccaggcccactaatttaattgattactctcatgttgatgctaaatttattgataatagtatgaagcgtccaaggacatggccaagttttattgctatcaacagtcaatttggggagactttgtctaatgtagaatgtgaggaaatcgttagtgtaaatatacttgaatgtttaagattatcctttattaagattgatggtttgtgtaattgataaaaatttgttactttactttgagttatgtttgaaatttaattgtccatttaattttacaaatattgcacaataacttttgaataatattgtacattaatttagaaaattttgcacattagtgaaagatattgcatattaatatggaaattattgcatattagtgaaagatatttcacactaatttttggaaaatattgcacattaatttagaaaatattacacggtaatttttggaaaatattacacattaatttagaaaatactaattttttgtacttttaagtatattttaccaaagttaaaagttcaatttagaatgagaaaataataatactttaaagtatacttttattgtatatatgtataaatatccttattagttttaacaatatataattaaaaaagggatgaatttagaataaatttttgttctagttttctaacaatatgcaactagaaaagggatgaggatagaagaaaaaaagtatgaaacaataaaagaatcctaaacataaaattataaagactttgacaaaaacaccatatctttatataaatttaatctaattaataaaggtttatagaaaattaaaatatggtatttacaactaggcattgcaaaaataaaggtttataaaaaatttataataccataagcaacttctaccttatcatcgacaaattttttacctcatatcatcttgtcaattctagcttcacatctccaaaataaattaaatattttttatttttgccaaaattagacttttatcacataacaaatgaattaaacaaaactcattgacatgatatattaattacacatcattattacctaagacacaaccactattgttcttaatcaatccatcatctactcttccctcatctttaggggtgagcatcatcttcaaaattttattcctccttcaagttgataatgtaggaaatcaagctagctgtaaattagttgtaaatttacatttaatgtttttttattaatctagtattactaggtgttcacattgtattatatatatcctttgtatatactaaaatacatcatcagaaataaaaaattattttctctcatttgcttatggtatcagaacatgtgaagcttctcaaagcatattattttttctcatcccttctattgatgtagtttttcatcaac

SEQ ID NO: 79095 - DNA, 3650 bp, Cannabis sativa
ggaccaataatatttcgatacgtgacgtgacaattttaaaaaaaacaaacgaacggctcagttaaaattaggactaacggataaataagaagcatgatcttgaaaactattgccgctatttttgaagattggagactaatctacataaaagtaatctttttaaggatttttgccacaaatttcccacttaaatattatggattgaaatattataacaacttattaacataaaaaaaaaacaaatatatatttaattaaatgtcactttgtcttagtttattaaataaaaaaaaattataattatcaaacaatagaaaaagttgaccactttattatttcaataaaaggaaaattaactaatggactaaagggcactgtagtcctcaaaaataaattatatatattaaatattaaaaaaataaatttgtatataattattaaggatttgtctcctttttcagccaaaaaaaaaaattgtcacctaaattatctttttcttcacaatttgcccatcatcttacaaattcaggctcgaggtcaaagattcaacaaaattccatagatcataatagtccatatttaatatattaaattaaatagtcaatgcatgcatggacgatgcaaattgaaaagattttcttttttctttttatgtgaataaaatacaacaactttaagtttattataaattaataaataattaatgaacaagagagactatatattttaatacgaaatagagtatatattatggattccgttattttcccatcttaattatatatataattaatattgaaatagagtagtataaagtcaagcaatataaaaccataagataattacttgatatatatatatttatatattaaaacaaaattattcaataaaataatcaatccagaatataaatgacatgcagatatgcaagattggtaaagaattctctccgttataggctagttatttttgataaaaagagagtgaataaatatattcttttcaaacttgcatgttgtgattgtgaataaataatcaatatattgctgaaaggtcgagttagctatttctatacatataaatatatatatcccataatagagaagtgtcaatttttgagcgtttacaccaataataatgaattacttgattaggaaatttggtaatgggggccatgaaaaatgctcaaatctatattatttaaaagtgatgatcaagttgcatataaaatcatcttatattctttattggtatatatgtttttctcatacaatggattaatttatgtctcgtttttgtaaaagtggaaattgcgactattaatttatttatatatataaaatagaaaaggaaattcaatccataccagaccatcatatcaatattggcgaggacccatatataccaagatcagccagcccagatcaattttgttaatattaattaagaactaattaattaataataccatgagatcatatatatatataatgtataagaaaaacacaatatattcattaattatattataataatagtgttacaaaaaggctaagtactacacagtacacaccaagtagtagattatacatattatatatatatatatatatatttagctagctagcttactaactactttcttcaaaaaaggaaaaagtagtctaattaagctatgcttattattattattatttttataataacttaattaaagctcattctataagctattttcatattccgttatatatataatattaatatatatatataatctcttaaaactctaaacttacgtacgtgaaaggtaatagggttataagaaacataatatatattgggattaattaaacccataaagctccaacgcttttgagcattggaattaaggacctcttgagatgaaggctcatgacctcattggcaccaccaacgagctgaccaccaatgaagactgcgggtacagtggggctgcagccgagcatggtgagggcttgttcgatctctctccctcttgggatctcgtctagctcgtaaaccgttgggttcacaccaaaatcacagaacaatgtctttatggtgtggcacatgcaacaagtgcttctgctgaagatcaccactggcttctctgatgccatcttagtcactctctccattataattattaataatatatcaaaatgtaacaatgccaacaataatatttgacactaagaagaagaagaggaagaagaagaagtagtagagctaggctggaatggtatgaaagtagtagaagttgttgtagtttgtagtaagaagagttgatgatgtttttgttgtgggaaatttaggctggtaaggatgtgtttatatagggtcttgtgatggggtgttgtgttgtacatgtgtactttattattattactagctatatagcactataatactatagctatagattggtattacatatgattcttattagctagagagagaaagagagagagatcatgaaaatcgaaaaagtttgatagcgaaggaattaaaaaaaagatggatgagaatgttccattagatatttctgtacgtgtttttgtgttattaatattgcaacgcttccaaatcacactttgatatcattttgatagtgaaccaaatcatatatcgctctatattataatatatatatacttgttatatatgtatatgtgtatatagataaatataatcataaacagtcgtcacaaccacacgattctattgcatacggaacttaatacgacgtgttcttcgtacggcttcatattactacatatatatttgatccaaaactatatactaaatcatgcatgatatacattattttattatttttttcctatctaattagctacgtccataatttttttttattaatttacctttttttgttcatatcataaaataatcaacatattatatagtatatgttaaaagggatgttttggttgttatgtatggataaactacaaatttatatatattttattcattcatagtttgcacactatgattatccataaatagtaagtttgtttttaaattgagtagcctaaaattttccatatttagagattatatttacaaacaaatattattactctgtttctgtcgtatctatctatatatctataaattatttatatatatggatgaatattattaagttattaattggggtgtagctatcggtagaggccagagggcatcttgtgagttggagaaactagttgtatttatccaattgggacctcctttttcgtaaaatagagagattcgcacccaattcacgaaagtgaaattaaagacaaatgaaatagaatactacagtccaaatttgctcacccaagccaaaacccaagctataacatagtaacacgtgtcctcaacatgcatattattataattagtaatgtagtatatattcactactataaatatactcttcatcatcatcatcatcatcatcataaattgatcgatgcatatacaatttttttttttgaaagcaatgcatatacaaattaatacaaccacaaacataaacatattaaatatatactttatccttttataatataaaattataataatttaactaagttttaattaattaatatgcaaaa

SEQ ID NO: 79096 - DNA, 2546 bp, Cannabis sativa
tgtcacttgtctttgaatggtgagggatcaacttctgattgtccacgattctcacaaaattatgtttaatgcattgttgcctaattgttagattttagaaaagagaccattcgctttgtgagtatggtgtgatgactgtatgagattctattatagttttcttaagatagatttatacttataaacgaagattcattaaactagtgttaaccacataatacacaccataaaaattgatttaaaagcgagtaaaccagaattgtttccagttcaattatatacgacgcatcacaattttatcacacagtttagcttaatgttgtcaaaggttttaatactgggaaaaacatgtccccatgtaagaaaatccattgcacataaaaatcatagtgacatttgttgtttaatggatttgggagtgtgtttatctaacccacaaatgataaacagcatccaagaaaaccattccaacaaaataactgatattcagttttgtgatatcaccgaattcaaatgaccatgtttctgcatcactcttctagttgccaaagctgcagcttcactcgcacgcagggtacccgtcgccataattgcagcaaactcggcagtgatctcctcttgcaccttgcttcgcgcatctcctagaacgtccaccaccccattgctggcagaaccctgctgtgttcctgatttcacctcaactttctctgaggttttcgacttactttgagagttctcgctagtcccctctgacttctttcctccagtggatggttcaggtttaacgcttgacgatcttgtagcactaggaaacggtactgtagccggcctaaattgtggaacttgaggaacagcaccagatctcaatgtcgactccagattctgtatcatgggcactgcaacaaaaggaaaaaggaccgacaaatcaaatgaggaaaacaatagagttaataggaatccccttctgcaatatatatataagaataaacacttagttcacacgggagaaaaaaataaactacagttttacactctattgaagtttctcactatatacagtagtaaacctatggaagtaccgataagtactattttcagcagtttccttttattttcaatcttagacactacaagagaagtactactaaatatttccaacactaaggaggaagctgcaacaaccatataactagtgaagttcacatggaaaagaaaaaattaagaaggaacggtgacctaaaagtaaaaccagatgaagctaactaattattcaaccaccagtttgatttaaataccatgttagtaatctgacaataagttcatttttgtttttaagagttcaagcgtttataatgtgttaacagcattagtgtttggttaccatccaatgaattatacgaaaaatcaactgaaacgacagaatcatttctcaagaaaaattaaaccgttatcctagataattatctcacgcagcattataaaaaataaacacatgatagaataacagtactcaaaggaatagcacaatggcacttacacattagtgctcccattggactgctcatgacttcgttaggaaggtgcaagatatactctggtattgtagtacctaccaaaaattgagcaacttcgttgctaaagttgttgcaattgtgagttagtaaactgtaagtttcagccgtgtaccgaggactaatctcttccaaatacgtttcaaacacatctttgggcacatgagtgacacccaaatctactctttttaagggtgttccatatggggtcgatccagccggagaatgttgtataccaccaccaaagtaatactcattgccataaacaacaactccagtgtgcctgacaaaacataaacttcaaaatcagcaattctgtaattcttcctctgtagccacaagcattgatatgttctactctcactcgctcaaaacaaaacttcaagaaaaactcaccaaatgccctcaatggctttccccaaaaatgtggtggatagttgcctagctaatccttggctaaggtcatacacgttaagagtaactttgtatccgtcctgcaacgagtaagttaagattcttaaattttacaagttttaagacaaatgacaaatagttttagaagcaaaattacattgtacacacaaataattaagttccatacctcagccatctcaaattcaaatgtccagaaactcggaagttcagtaagactcgataatggtcccccaaattaactgacatcgaaaaatttacaaaactaattagcaaatgaattgatagaaaaagaactcaattgctacatggttccaacatgggttaatcaaactaaattgacctacattacttaaggaaaaaacaaatacaaaattaagcgccaaaatcatcaactttcagcaatcgaagtacaaatctcgttcatgttcgcataacctaaacgtaagtacacatacacaaaagcaaaatacagcttcaagacctacattgtgaaaactccgtataaatcgaaaaatcctccaaccgcagttagagacaaac

SEQ ID NO: 79097 - DNA, 6953 bp, Cannabis sativa
ttatataaataaaatttaaaaatctttaaaaatattaaaaattccatacaaacctaatttttataatttttttttttttttgttattttttgtgtgtgtttatctttttaaattatccctttaaataagatgtcacgtgaatatttaccttaattcatccttaaagtattcaacttttcgtaatatgcattaagcatcatttacaatctttttattaaatattttggaaagtttgaatccgtattacttaaattatattttcacatatacgtgaaaagatatatgcccattacccactcaccttctttgatatcaatacttcttctaaagcccccaaacataattaagtttgttttttgaaataaaaaataaaactttacttttaaatggtaaaccaaatttgttaagcaatttcaccctttcattttgttttaacacaaagtcaatctttcattctttcttgcaattccttctatctatatgtctttttctggatagactccaaacttgaacctcacaattactgaatcacatcaggaggtacactccaaccattttcacacctatgaatatgaacctagctttaacttaaagggtcagaaaccaactttgccaaaaacagctactgaatcagatgttgcaagtattaactggttctcttcatcatttccttggccgctaattcctctttcttttttttcctttaacataaaatgggaagttttgcaattggcaaataagtactgataatggaaagaaagaaaattagaatttaaaaactcctcatccaacctatcatgctcagagatgcatcaagaagcacatgtcaatatgtgggacttgaactggtccagctctgccaggacctcttcctccggtcggtatatcaaatcaatcatccgccatatctgtgcaaaaacagaacaatggacattttctagaattagaagatatactaaccacaaacaaacattccttaagcttccgtagttaaagggaagacaagtgtgttcaattgtgcttgttcatcactagaaaagaacagcttatactgtacctgtagtgtaccacctcctccagtactttcacaatcatcagacacactaacgatcgtccatggatcagatacattccagtgaaaatcaacaaccttgtccctacaacatattagaagtaatcatgacaaatgaaaaataatatgaacctttaaaacttatgcatggtcatgaacaaaccacaacttatcactcgtgtaacagcacacatacctatgtccagcgtgcctgaagaacaagcctgcaggagcatttggcaactttgatccagcagaatcttgctttttgccaatctagaacaaaaaaaaataatttgagtctttcatattcgaatcgggcccattccagagttgacaaacacgtgatctccttaaaaatgaaggctagtacatacaatgggcaacaccaatcaaatagtattagatgatacagcaatgtttagacagacattcaggtgatgggttgggatatatcagaacgatgatattgcagttaagctgaacattatcaatggttgcctacaattaaggaaagaggcatctctaaagactaccagaaacaaatacagtaaaaaccatagcatcaaaccttctcaagatcccagatatttaaaaccccatcttcggcagaacttccaaaaacagatgacttgtctggtgaccactggaaacacatacacatgggcgttatagtgaaacaacaaacaacaaacaactaacttatttctataaggcgtaaaagaaaaatcagataacatataaatacaaaagcaattacggtacctgtacacagaggacggctgcattatgaccctcaaatttatggactggtgttccaacaccaccagaagtgagattacgtcggtcaaacattcggatagagttatcagcagatctgagtttaaagaacaatgaaacattcaaaataacatcaagatctgaagcttgcatgagataaaacttcaccacacaaaaagaaatgtagaagaagatgttcaaattgaacttgaaatttaaaatacaatatgacatcatcaacatgtagcagcttatataatccataaaatcgaaaaatataaataccctgttagaatgagattgacatcatgacggttccaatcaacacaatgaagatcagcatcatgagctttttcaacctgcccaaattttttttggaagagaaaaaaacatacaagcaacatgattaacagcaatgccaagaagcaccaggaaggagaagtgtgtgctaaatatcatccattcatacaaaacactaaagtactgaaaaacaagacaaacataaaaggctatttgagaaaaagggataaacataaatatctatttcagcaatgcttcatgtcatatagaacagtttttttcaaaatagttatgtgattttaaatatatatatcaaaaatccaaaatataaagtcactgttcgtaaagaaaaaaaaaacatgcctggaataagttatgacctgactggacttgtataaaattgcaatggaaatgactagtaaaattacatgagtttcacgtttagctatggtgtcatgcacattcaatgtgaaaatacaacactaacattttgcattctactgtttcaaataaaacttttgcaattcacccaagaggatagctcaaatgctcagacaagtactttgcccccacaagatctgaagttcgagtccctctgggtacctacataacaattgttatagtttcttggtccccaaatattatagggttagtggggatcctaatttttttttgaaaaaaaagtgcaattgcaactgcaattccaaatctaaaatcttgaataattttgttctaaaattagaagtcgcccaagtatgctacccttccattttcactttcattatcatttattctattactttgaagaaaaacaaaaaacaaaagcaaagtagtgcagactaaatgctatttattgtcatcagacaaatagatttataaatagccagtaaaaagccaactaatcaaagaaaagaatccataccttcacagcgggactagagccagatctagaatcccatagtatgaggcaggaatcatcacccacgctacagaactcctgagcacttcaatgcaataaacaaacaaatatatcacatttaataattttaaaggcgtgttaatgtttattaatgcaccctgtttaggtgaaaatctaaaatgaggatacttcttgtaaaaagtggagaatgagagggagaagaaaaagcatcatcattattgaaatattaatcactgggaggacttcgaatttcagcttattctatgtgcagaaacagttgaagttgtgtgtactaccaaggggaaatagctaccttgatgggcaaaactgcacatcctctacagtatcatcgtgccctagatagacacctcgtggcccaatagaagggctgtctgtaggtttagaattactcccgccagatttagacccatgtttagaattggttccaccagatgatggagatttagtggctgctaagtctgacgaccctaaagttgaaatatgatcatgaatgctccataaaactaccgacttgtccttgcctgtcaaaaattacttccaataagaatcgcatttgagaagaaggaaatagatatgtagtttaaagttttagtagtcaggcacaataaactaacatttccagtcatttgtagaattgaatttttgtttaaatataacagtatttatcaaaaagccgtaacacttaatacttactcaagacttcatatcctaacaaaagggagagaacaccagcaacatgactaagtagaaccctatttaacagtcccataatgaagaatcgacaaagatagacagcataccaaatatacttcacttacaactttaccaaacattatttgtttgtgaccatatcagggattaaattacgaagtacattacaccaagaaactctaacctccagagagtacaaaaggttcagttgggcacatggcaagtgcaaattcagcattatcttgatgcccagttagtagctgcaaaatagcaaaacttaaatcaataaacacctacctgagaaaagggtagcatatatgtgaatgaataatatagctacttatatgaaaggacactgactaatataatatagctatctgaatcagtagataaattaatatatgtacacataagaaaatagaattggaaaagatagtcaccaaatcaggacgggaatttgtagctcccagtactgcatggcgattaggctgcgcttccacgtcccaaatgaatacctgttttacaaattaaaaataaaacccacattgagtttctataaataataaagttcaaactgtctaagacagccaattcctatacttgaatggaactcataacattaaaaataaaacccacacattgagtttctataaataataaagttcaaattatataagacagccaattcctatacttgaatggaactcataacattagttcttacatcaggactgtcagtatgcgtagccactattttactgttctgcgggagctccctgattctgttcacctacaaatcataattacatattatcttttgtcaaaataggtagtaccattattatgattgataacatgacaacaaaagtcattgtctagacaaactacatgctaaactaatccataaaacgcaatataaataatgtgaccgacacgagtaacagctcaaatcccttatgaaaaatttaaaattattcacaaaattaaaactaatgctttaagtttccaatcagaaaaaataaataaattagtacttccaaaattgctaaatttcctttattgttacgaggcaatttacgttacccacttcgcaaatgatgattgtgaaaatttaaagatctaaaaggatataaatgtaatcaactacaggaaaacagtctttattaaaaatccctaaataatccataaaaataacttgatatgaatgaaagattaaagaaaagatggaaaggtattaaaagataccatacctcgcctggatgaataatggttttatacttcttcacaaagggcgaacgtgcttcttcattgaactgtaacaaaacaattaacaaaaccataaacaaagcagttaataaacaggttagaacttcaaactacagtgatacaaagatggcaaaaaaaaaaagaggcatactattttttcatcatggcatcacctgagatatgtgttctgcagcagcaaccctaggtttgacaacttcacagttcgctataaccagtgtatttgggacactgccatcagtctgtgtgaagaaacaatcatataaataacaaaaagagaccaaaataaagcaaagtgacaataaaattcactcttgaaaaattgcaagcagccattcctattagtcttatgtactatttaagctttaaaaatttaaccccacgaataatacatgaaactctcagctccaaatacctataagctacaatctttccttaaatcgcaaaaagaacaattcatttcccatccacgaaactaacaatacaaccctaagagattgataaaaccaataaaagttacttattactaaaaagtcaataaaagtgtatccaaatcagtccaaaaataacatatcaaaataaataaataaataaataaaactgggtaagggtggaaggtcatctttttacctgttcagaaagatagagacgctggcggttcttgtaagtagcttgctctagttgcggaccccatctatcaacatcaaaaaccaaaagacaattttcaagtttgaaccaatgtctacaagataatctaaactaaatgcaaaagaaaaagaaaaaacaataaacaactttttgaattgacagtaaaccaaacagcttgaaccttaacaagagcaacgagtaaaaaccctaaaacacaaagaataccataacggcatcaacaacaacaaggcttataatccacattccatcgtttatttctcaacaacatcttccattatccacatgttcctgacttcctccaaacagactacattgcaatcttgagttaaaaataaaataaaaataaatatatagatggatggagaggacgaaccggcaagagagagaaggccaaacgagattgtgattggcgagccagtcgtagagaactgggaccaaagatttccactgggtgtacctctcctcgacggaagcctcagttcctttccctttctctctcatctccgtggagttacaaaatgagtgagtcggatcaagcgagttggtttggtattggttggcgtgtgggctgtgctgtgcctgtggggtttctcttcttcgagttttcccgccactttagagtgaagaagacctcgtgggttttcgtgtgtcccgggtcctcacactgaagccctgactctgtctgtactatttatttactctcactcctctgattctgactaccttgtcaaacggggtaagttgaaaaatacatcttactagatggttaacttactagatcaatcatttccttcaaaaattggtattttcacgaatataaacaaatattgaccttgttaatccctatttatgaacattttgagaattgaaccccagcccatcccatacaattatgggttgtgccgaaagtcaggcccagtccaacccataaacccattgagcacgaggccatgccatattttaaggaccggttttttttttaaaaaaaatatatatattcctaaaatgtaacatgcgaaaataaaagtaaaaattacagaatatatagaaaaattataaaagtaaaaaataaatgaggaaaattcaacaatgcactcttttaaaatgaatatattaatgtatccctatctgttttagtacccgaaataattttttagttaaattttttctcatagt

SEQ ID NO: 79098 - DNA, 9653 bp, Cannabis sativa
tgataccacgatgggaatcatgaggctccatctcaaaaccaattggtgataagtggagtagcccatattcttatatatggctcaatacttttatatttaatccagacaatattctccattaatagtgtgccatgtcgaaaccattttgccacctctaaacctataatagaatgacctctttttaagacacattaattcaaggaccaagggctggaaaattcaagaggcacaataatacaaaagttataattcaagaaggaaaatcttaaataacttaatcattttagagaaaaatgtagagaaaacaacactttccaaaataataactatgtgctaaaaagaaaccatgttgtataaattgtatacgtagaaaattataatgaaagcaaaatatatgagagacaactattgagtgaaacggtggtcaaggtttcttacctttcaagtttaaattccttacctcctccatatattgaatgaagaatatgtaaataagaaccaataagatataatatttgatgttaattcaaaactaattaaaaccataaatatatataaatgatgatgttttgatgacaatcatatttgtcatgcaaacatagatatgattgaagcaattatatgtatacatttattatattatgaaaaacatgtaataagctatagctgcagttacagtatgaggggccttgagaagctttattaattagccatctttctttctttctttccatccaacaaaatattaggtacgaaagatgagaaatcaccttctcacattttcaatcaccactttatcatcatcattcaatatcacactccactccattcaattgatcaattcattgtatttttcttcttcttctttttttcttattactttctctccaaatcaataactatataagaacacacacaacataatataagtgtataattaactatatatatatatgtgtgtgaaactcttcacttgtgcacctatattttacttttactatttatatcacttcttcaatcattgattagtagcttctatatattaaatcacagtttacttcttcccttcctctagctggtttttattatataatattataaatagctatatatataatgactcatatatatctatatgtatagatggagttatgagaaaaatatgggctaattagggtagatgttggcatggttcaatcaaatcaaagctctcatcttaattgatcatcatatatgagttcttttatctgattgagccgtgccaatatctatttacgcccaccaaatttttattacttaatttttacttataaatgaaaaacgttttttcttttttcacatgggacaaaagtctccttaaaaatttagataataaaattatgataaaagtttgtatatgtaattttttttaaggatttttatatcatatattaaaattttttctttttttcttttttactgtggggtaaaattcttttaaaaaatattgtgtattttttatattttgtactgtattaaatttttacttttgttccacagttattttttagttggtccactgttatttttaattgttccgttttgttgttttatgaaaagatagtatttctgtaaaaaaattcgtgtggcagtaaaattataaatttttgctcaaaatcaatatttttgtaaaaaccccaactttttaataggtccgtccaacaaaaataattgggctttgtaataagaggagaagggcccataataactgcgaaacgatgggcctaaggcccatagacgaggagttgattggagaattgtctgaaaatcagtcatcgtctccgattctgaaaaaggaaaagctctgtaaaaccctcgaataagagattagggttgtttgtattgttgaaattgagaagcaaggagttggattcaatggctttgaccaactttatcctaaccgtggctggtgttagcgccgtcgtgcttcttctcaggtccgatgtaaagcagtccgcctccatcttcaggcgaaacgttaagcaaataagaaattggcttgaagaagagtccgcctctgctaccaagtaaatatctttctttgtattttcatttttagatatgatttgacataattatagttgtagggtttatggtttataattcagtagcttagtgggaagatccaatggttaaatttgcttttcaattttgattgttagttcagggaaatcaattgtgacatgtttctaagatctttttatgctattttgtattggatatgtatctatgtgtattgtatgtggatctatgtgtatgtttggcactgaaatatggtgattttagaattttaggtcaattcagtcaatagttaaggagcgaaaattgctcctttttcttgagttgggattgtttattttggcataaaattgaggtgtgttaatgttatgatatggatcaagtgagtctacattaggacttacattgattttatgggagcttctaaaattacttggtttctttggcttatatataatatgcctcactcacatattgaatctactgcagaaatgcttgaattagtttccagggaattttgaagaaagttttttgttataatatggagaatcctagatatgtaatatggttgacatatttgataagtttttttctcttgttcttctttattcattcattaccgttgattggttacccagaacaaagcataagatccagcataagttgttaaagccatttatttaggtagtttgttacttaatttcaagtcttggctaatctctggactttagatacttattagtcctgtccaggttaaagaggtttgtcaaggtttctggtcttggctatgatttttaaggtagaagagcattgttgttgaacatgtcacaagtgtttggacatgagatacttactcactagttagtctaagtatcagcatgaaaaatgaccacatagcaatagttcataagtataaattttgaattggatgtttttttttggattttgattatctgaaatgaaatttcagggctgcagagaaaagggttcctaaggaactagaatcaaaggcttcaaaagaagatattcccaaaagagacaagcactagtgtccatattgttctggtggtgcttaatcattcactcattttctttttcttttctttttcattttccttttctggtttgttcgaatagtcaccacttcttttccctttcaaatacagatatgtaactatctaataaattgatatttaattttgttaaacaatattatcttcaacttttgttactagcatatttctgtaattggaattttgggtggacaaatcatgtctattttggccacaaatatggccacttttgatgattatggattaatcactattgtattcaaaggtaaccatcccacatgaccaaacctaaattgtctttaagtagtgaatctgtacatacatttatatatatacatatttatatttataaataagttgatggctgacaaggattctcatcaacaagattgttggcccttgtgtggtcttctgtgtaatgagctcagctatgtgtcaacatgctcatcacttttattattattattattattattcaatttctgcttttgttttccaaaatttgctggaaaggtctaagcaccagctgttaactcatgcactgatcagaataatatgatcttaatcttgaatagcaccttcaaaaactgtaagtcaattaagctataattacttggtatgttttgaagttcaatttttttttatttatttatttaaccaacaaggttagttggttagaaacatgtcactatttgacaacattaaagatattcggttaatgtcgttgtctgatctcttgacttttggtcctcaatcatggtttttgtgttgggttgcatccactattataaggccacgattaggggacttatttgtaaaatgtaataacatattattgttgattaagaattcgaaactattttgtacaaggacaagtttcaaagagtcctaaaaggcaagtttacataagtagaaaaatcatatctttagcaagaatatcaaaagaaaagaaacgaagaccatttgttactagctaaaataacaacatttctttagagcaattctttaaactttttttgactttaattgttaatttatgttagttagtagtacaaatatacttataatttacacttgggtgaacgaaagcaacttactttgtttcttatcaataacatttatgtgtctcaaaagctccgacacatgaccaagtatagcaaaagcaacattatgcaaattcatagcaacacaaaacatctcataattgagtttagaaaaagaaaaaccagttcttgtccaagtaactatgccaagttgacacattgaagctttcagagaaaactaaacttcttattagaaaaacagaacatataagataaacctcataattaagactagacaaggcaactactccaaagaaattggaagcatgtgcattgctgctgcagcaccaccattttccaagcagtcttctggtcccatcctcagcatcatattgccataaatatttgttttgttaacatcataagctggaaaatgatgatgatgatgatgatgatgatcgaaaggcttgtcctttccatcattttggtcaagaagctgaaatggataagggaaactttcattggtttgggcccctaagtggctcacaccagagagttgggtttgatttgttgacagaagatagagagcacgaccacccgagtcgatgggtagtgatatctcttcagaagacagtaaatggttaccccttccttttcctggtggcttagatgggtagttcccttgtttggggtcatttttctgcaaaagaaaaacccttttatcaactccattgaaggaagttggaagaggactttcctggttcttgttattattattattagtattgacctgtaaccgtttgtgatgaggaggatgactgtaaatccatgattctgttcctccatttttggtttctaatggccacaaacttttcataccattagctgcatatatatggggacttccgaaatgcaagattctggggcctgaacatccaaaagtatagactgatttgtacataaaagagtgatttttgtaaagacgtgaaatttagctaaagatatgaacttgatacatatatacatctttttctttaactcttaaggtataattaaccaacgtttcaaactttatgagcaaaaactataaaaagaaaagttccaacctttgtaaccagaaagaaacccctttgaactgaagtagagaggttcaggctgtgattttctccggcgtctgttgtgtccatcaaggcgttttctgcaactcctcttgatttcatcaaactcacccaaagagtggaatctaaacaaacccaaaaatgatattatttgaagaatgaaaatcaaagtgaggtcatcacaatagccatcatcatatgtacagtacctactacactgttggcagaatctcttctcttctcctttcacaacaacaattggggttttcgaatggtgctcacagaccctatggcgcttgtgatactccctacaattgctgagatctgctctgcaaccatctactaaacatgacagcttttgagaaccccccacaatcccattaaccctctttgatgatgacccagatggtgaagacaccaaatttgagtcccccaaaacttggtttggtcttttcaatgagttttgctcagttgggtcattcatggtggtgaaagaacccaactttaagctctctgaagatggagctgtagtagaactactactagtagttgttgttgttcttcctgagctaatgaagtcaaataccaaatcatcatcatcatcttctttagggtccaactcatgagttgactcccaaccaaactctctaaagtcccaatccattaatgcaccatatatctcctcaattcggtccccacctttcctacacatgtataaacaaaacaactaaatttcatatggaaagaagaacaatatggtatatatacttaagaacccagattttattttttgtttattaatttgggtttcatcgattgaagcaaaaatgtaattcaaaacaagataaaaatcacatctttaactaaaaaacaagtagtttctataaatattggatttaaggtttgagattgtgaacatttaaagaaaagaagaggaaaagacatacatgaacattgaagtagttatcatagattcatttagttaactatacactttgttataaatatatatatatatatatatatacatatatcctagtagctagttggtacttaagaaaacttccaaagaattgggttttaagtaaatatatatatacatatagaggcataatatccttgtttcctccaataacagagaaggtcaaaacgatggttggaaagtcgatcatgttggaagaatccagtaaaattgtttttaaaaaaacagaaaaaaattagttaaggagctatctaaccattaatgctgcaatagaaaataaaaattagaagaaatagcaggaaaaaaacagaagtacaaggaccacctgagacaatggtatgggatttgtttatagtgaggtttacttatgtttttctgtttgtccctttctttttctttctttctttttttttttcagggaaagtggtccactctattcaatatctaaaaataaggtgagatggtgaataatattgaaataaataattcaaagaaaaaggaaagagagagagagagaaagaatggcaaagaaaaagacaggtataagttactttaaaattttgtaaaagaatagcaaatagttaatcatgtaatggaagaaaagtatcaagaaaaagggttggggaatccagatgtgagcttgggaaagcatatatttttggttatctaataattatctcaattcttagagcactcacaatagctaatgtaaagctacaaaggttaaaaaaaatgtcaaaaaagctcatccaatagatgagttaaaatagctcaaaaatttactttatgaataatacttagctaaatggagctaagaattatcttgattttaatgcttagctatatctttttattatttttatagtgtattttatttaattgtaagtgtaaaaataaatagatattatgtaatttataataatttattatttgtgtgtattataaatatattattttaataatttagagaaaattataaaaaaactgatgtatgatataatataaatatctgaggtaaaataaaaaaaaaaattgagttttgataaggtattttaaaaaatagagtaaataaattgttggaagtgctcttagtagtataatagtatctaatctaacatcatcggttagatttatgttaaataattaataattttaatgtatgatcaccattatattttttctcgcgaactttaactattgttttatcacactactttaaaatctgttaaataaaaaagatgtatagtcatgggcggactcacataaaagcgagacaagacagtcattccctgaaaaatttcgagaaaaaaatgtatatttattttagtcagttgccacatatatttttaataaaaaatgatatttatagacataatattaactttggtaaaattgttaagttagattgcatctaggatagaggttaatggtttaaattccactaagatcattttttttttaagtttacttttattcttgtcttataaaaaaattacactcttcctattactttaaatcctgagttcgccattgggtatagtttaacaattctaaaaatttagaataaaatatgacagtgatcataattaaagtgtaaaactactagttatttaatggaagttccacactttactaatgttgagtgttttggcaaaatatttaaccttagtaatagttcaagagtgatgataattttttttttctaaatttcagaaaacaaagtacctatttattagttctttaaaaattaacactacaaaaccccatttgggatttttactttaaaaagataaattaaacaaaacaagaacaaaccccaaaaaaacaaataatttagttagagttatatgatgaaaaagataatacaattataaaacacttgtttttctctcttcttaatatttattaagaagaagaaaaagagaaatgaaaggcacttgtttttatggtttatgttcaaactagtcgttattaatgtgtgaatttttaattagtaatatccttgtccatcattataatgtatcaaaaaatatataattaagcttattatgtcattctctgcatcatcattggggacctcttattgtttagtataggccaacaaggttgttaataaattacttcactacttctcttgcatgcatcatatacttcataatttgtacaatttataatgtgtttaattaaattttattatgttttagattttggtttagatatctaaattaataattaataattaatcatctactcaataatctattttctgatcagataaatattgattaaatgacattatctctttgtaatctgaacctcaaccccacatataatctaatgtcatttttctagtgttcatgtcacaatttatgtacttaagatcataattttaatgtaaatttttacatttttttaaaaaaaatattttaaaattttgattattaaatttattataattgatttggtaaaagcttacatacaatatatccattatgcccaccaagcatatcccatgtagagtttcatggctttttttttttttttttttgaaagtgtagagtttcatgactttaatgatgaaataaccacttgcaagttgcaacattataatttaatttaaaatttgtaagcacatgatgacctaaaaaaaatgtgaccacatgaccctctgaaaaaaatgtattgtgtattatcttcaaaagttgccacttttttttttttcttttcgtttttaatatatatctaactgcattataaagttttttttttcagatgaacttcattataaagttacatgtctaaaaaagtttgatttcttcttaacagcacccatcaaataagctgatattctataaatttatacttggaaaattattagataaaatgtatgtgaaacaaaatgattatagtaatatattaaaaatttgtataaatactattttggactctgtattttgaaaaagttacagaatggatcatcgatctgttttgttcaataataaaatagaccatgtatttactaaaatagtacaaataggattctgaactgattttttatcaaaataaaatttactaataatcgacctagaggtggtatgataaaattagttaaattttttgcatcttttcgtgttaggaattgtctttaaatcggttatattaaaaaaaatgaattatcaaaaattaagtttaagatcctatttgtaccattttaaaaaatacaaggtccattttattatttaacaaaataaatgatctagtttataatttttataaaacacaaagtccaaaataatattttggaattctaactcaaaataagttgctaatgaaagtaaattagggtcttagaagtggattgacactcatatctatatgt

SEQ ID NO: 79099 - DNA, 3218 bp, Cannabis sativa
cccataagactcttccttttcatgaatacactcctttcactttggtgttcttcttcttcttcttctaaatcagctttatctttattagcactagtggagagagaaactgaaaacccatctcttgatttcatggatccgtggatctgattgtgtttgtgttgttgccttttcttctttttcttcttacagtttccagatccttcttgtggtgtgtttatacatagttgattttcaagaaacagtcaaaattattaggtatgactctttctccttatctattgtttattcatggtttttgaatttagcagaaagttgttgaattttcatgatttgggaaattcgtgtaactttaggttgtttagcttttcaatgtgaactgaggtaaacccttctggattttctaaatggaaaattacacttttttttttttaatgagaaaaaatagtaccctttgacccctctttgtcaaacatctccttctgtattatgttgttttctattcttatttttcatcgattgcggctatgaatggtcatgattttctgtttaaagcaaaaataatagaaagaaaagaaagatggggtttcagattatttggtcctttgcttttctttgacttaataccaactgaaataacctgtaaaaggggtagttttcattttgttgtttttgttgttctctgccatttgtttgatctgtcaggtttcattgaagaagtgaaaattgaacgatttattaactctattgtgtcttggttctgatctttgtgtagtttaaatcaagaagctgagaaggaagagggtcctttttgaaaatcaaagctgtttattttattttgtttagtactttgttacatgtggagattttagatggttgtttgggtgagatgagggatgttatcagagttaatgaacttcttgaaggcctgttttcggccaaggtcgaaacggtatgttcacacgggttcagattctgttggtcgccaagaagggttgttgtggtacaaagattcaggacaacacttcagtggtgacttttctatggctgttgttcaggccaataatttgcttgaggatcaaagtcagattgagtcaggtagtttgagttcccatgaaactggcccttttggtacttttgttggtgtctatgacgggcatggagggcccgaaacgtctcgctatatcaacgatcacctctttccgcatctcaagagtaagtgtcttagaagaagacatttgaattgatttgagtatttgagttgtcaagttcttaatttgaatgtcatgatgttgcagggtttacttcagagcaacagtctatgtctgtagatgtaataagaaaggcatttcaagcaacagaagaagggtttttgtctcttgttacaagacagtggccgatgaaaccacagatagcagccgttggatcatgctgcctcgtcggtgttgtttctggtggaagcctttacattgctaacttaggagattcccgcgctgtcttgggaagagctgttagggcaacgggagaggttctcgctattcagttgtcagctgagcataacgcgagtatagaatctgtgcgacaggaactgcattctatgcatcctgaagattcacaaattgtagttttgaagcataacgtatggcgtgtgaaagggcttatacaggtacttgtttcactgcaaaaagaaagattatatagtattgggatataatattattcgaaaacagaattaaaatgctgtggctttatgtcaatgatgctttcagtatccattttcaggatctacttgttcttggctaaaggaaggatgaatataaaatgacaggaacaccttgtgtagttgctatataatatgattcttgcatcaattactttggtaatgacacttatagctaataggtcatttgttcagcaagtgtgatgatgttttttatcatcaatttgttgataaaagattatgatttaattactatggaggaactgtgatgtgatataatatttttttgttggtcaagtaagtatgaaactgagtaaagttggttgatgtgttattgcagacatgttaatatcttaagatttggtttgataattcttgttcttgttgaatgatagtttttcgaaatctttgtgttgcagatatctagatctattggggatgtgtatttaaagaagtctgagttcaacagggagcctctttatgcaaagtttcgccttcgtgaacctttcaaaaagccgatattgagcgctgatccatcgattacagttcatgagttgcagtctcaggaccagtttgttatatttgcatctgatgggctgtgggaacaccttagcaatcaggaagctgttgatatagttcaaaaccatccgcgtagtgtaagtaaatcattactcgacactaaactactgtttttcttcgactttggtcgaaattaaaacatgatttttgctcctatgctcaaaacatttctcttcttacatgtgaatttcttatgaatttaaattgaaacaaaactatagctttacacttgttatgtttttccaactcatttaagtaacaaaattataggttgtaattgtattactattaaatacagttaaaaaaagataataccaacttgattttacatgattatatgcatttcattagtaacaaaatcatcttttgttgggtcattcttgaacaaaattattgacaattaggtgacatgaagcagtttcaaaatcatttggtttttggtgatattttaagaagagtaatttgcggtataaatacttaagtttaactcttaattgcagataaatacaaagtttaatttttgacggtaataatacttaagttatatttctaaaacttcagtaggtacttggccattaaatgtcaagtcaatggctacgtggcaatctctgattggtccaggtagataataacttgacacttaacagtcaggtactttgagaagttttgaaaatataacttaaatattattatcgtcaaaaattaaattggagttaaacttaagtatttatgccgcaaattatttacatatctatagatttttatatttttcttcctctttgacccacttattcttgtttttccctttgtaagacaaaacaaataacagtttccagtccaagagagtatgaggatccattggttaagttctggtttgaagtctataatctaaaaggaagatccccaatagcaaattgaccaa

SEQ ID NO: 79100 - DNA, 1654 bp, Cannabis sativa
acttctgttaggtacaaaccatctcatttggtgactgtgtccaaagattcaaaggtatttccagttaacatgtaaaacgttaatataagcccaaataaaagtctaacattctaagttcttttttcggtcttcattaggtgagggtttgggatacaactgtatcaacggctgcaaattcatcaagctgtgtgggaatgacttcagttcccggcttgcctgtaaacatgaaatgtcatgaaacaatgctgttgattgcttctggtacctctgtgactgtaattgatttaaggacaatgaaaaaagtcattactgcagcaactcatgaatcaaggctatgctcatttgaagctcttccttcaaaatacttaatctgtgcaggcagcaaggacaagtaagattgaagaaaaaaacaccatctcaaaaccaaaccagttgataacgagtagagtagcccatgttcttgtattattgtaatgtaatgtgttgatatgttgcagggcattgttgtgggatgtgagaagaaaccatactgagcaaaattcaaaaccagtagccgagttggatggacaccgcggaccagtaaatttgctacacatggatcagtacaaagttgttaccgcgggccgaaaagatgctggtgtcaatgtttgggaggcaaatactggcatccaaactaattcattactatgtgaatatggtgatcagggtgaaaatgctgctcctaatggttgttctgctttggctgtgagtaaaactcgtattgtaactgccagttatggtcatggttatgggcttatgcgttttagggatttttatcaggctttttcaccaatgtttgaaccaaatcaaagatttgattaaaatttttaggcttcagagtttggtattctagttatcaatgagtcttttttatggagattgagaaatttccaagaataaaaatgaaaataagagactggggatgttttaattgtttatttactgttgaattatctatgaacaatcattaaataaatattattttataattaagggaagaaaataaaataaaaaataagagactggggatgttttaattgtttatttatttgttatatgtaccatttgttggtttttgttaaattcaatttttatagctaaggaaatgtgttgaaaatatctgaagtttgacggaaacttttggttggaatacgtacgtacgtacgtataaaaacataagaatagcatgagtaaaatattaaatatgtgattaattataactattcaataaattgtagaggttgttctattgaaaataatgtaatttcatcttactttttcaaaggatttttttttttgaaagttttttgtaaattgtgagtattttgccaggttggagaattaattttttttttcttaaaaaagaaaaaatgagtaattttttttttcctaaaaaaaagaatgagcaattctgtgggcgcggttaaaaagttttaaatttctgtatgatgataattattgtagttgagcagatattttgccttttttttcaagaaaaaaaaataacttacaaaaattggattcagataataaattttaaaaatttatgtaaaaaaaattgcaaaaatttttttttttcacttatttttcgataaatttcaattacagacataat

SEQ ID NO: 79101 - DNA, 5217 bp, Cannabis sativa
  modified_base (246)..(246): a, c, t, g, unknown or other
  modified_base (5173)..(5191): a, c, t, g, unknown or other
tttacttttaattggtttaaataagttcctcatgtcatgaggaagaatgggccggccctacatcagaacttccctatatatatatattcacattatttggaaacaaatgaaagatgcgtaaatattcttttggatcttgtgttttgtaaaagttactgattgaaacttctattttgttaaatgacaaaatggaccctgtatattctaaaatggtaaaaatgagacctgaactgattttttgtcaanataaaatttaataataatttgatctaaaaatgttatgacaaaactgtttacattttctgaatctgttcgtattttcaatttggttatattaaaaaaagttgtcaaaaattaagcccagagtcctatttattgcattttagaaaatacatgatccattttatcatttaacaaaataaaaaatctaattggtaacttttataaaacacaaaatttaaaatagtatttactcgtaaaagttttcaattttgatggtaattggagcctaggagggaggtacaagagggaagggtacgtactgaaaaagcctgtaggtcttcgtacgtggagatatatggtaaatataaatcgatgctttatggcaacactgaagaggcagagcttcctaattataagtctttttacttcacattatataagcttttgcctcttgtggatagttccatcatctttcatagctactttttaacgaaacttcttttttttcctttttttattttttacaaggagaaaataaaataaacaatattatatattttataatgagtgaagagtgagtgtagacgaattaacactatgtcatcatttatatgctgtcacatcaataattattcaaaaataataaatgagaaaagaaaaaatggcccatgcaggtctcgaacctgcgaccttcgcgttattagcacgacgctctaaccagctgagctaataggccaggttgaaatgactaaaactatttaaatacataaactaataaacgttagcaagagaaaacaatatagtgaatataaatataacacgtccaagctaagagaattgggttctagcttttgataatttattgagttatatgatcaggagagcatgaagggtgtacacgagccccgtgcaagctcttcttgtgctgcttgcaagttcttgaagcgaagatgcatccccacatgcatcttcgctccttattttaggtccgacgagcctaaaaagtttgccaaagtacacaaagtatttggcgctagcaatgtaagcaagatcttgatcgaggtgcccgaggaacagcgcgaggacaccgtcaattctctagcttatgaggccgaagcaaggctacgagaccccgtttatggttgcattggtgccatagctttgctccaaagaaagatggccgagctgcaacatgatctagcctttgctagagctcgtctagctcgctgtgcagccaattcttcttcttcttcttcttcattttcttctaattatggtgttgctttggatggcagcaggcttattagcgaggctagtactggttttagtggtcttcctgctgctaattgggctactcatgatcatcatcaagctttaattacccaaagttcgtttgaattttgtcagaataattcatcagttaattatcatcatgattttagctttgtcccgtatatattataatgatcagtttgtgatatatatatctatataataatatgaatcatgatatatgatctgctctttaatcatctattttgtggatgaaattaatattggtgttttagaatttatcccttttccagtcagaatttaacgaaaccagttaaatttcaagttccccaacattaacagtaacttgattaatatttctatattattttgagtacttttctagattattaatagaataatctcttccctttgatgctttttgatcatcacaagttgggtaggtagaacaaaaacaatttgggtagccattatttacttattaagtttttactgctttcaagtacaacagaagtttgtgggagccaaccaattgaagccattattcgaggtaaggaagaaaaacactagccatgatttcagaagccccacaattaataataacaataataataataataggcctttcttcttttaactttatttgctgcagtgagaatccaaagatttatttgcttctcatcaacactagagtagagataacagttcccgtgagtgaatgcctacacaattttcagaatgttcaatgatacaatggtttgattttctttactactctttctgtcaccaaggccataacatagcacagcttttttttttttttttcccaaaaatggttttgcttgacgagaaggaaaatagaattttttaccatacaaaggtcataacaacctctttaaataatttggaaaaatccaatataaccgtgtttatcaaattttgccttttttctgttcaaggctaatcggaatagccatactcaaaagtttttggataaaaaaaaacactattttgtttctccatttaaagatggaatcgtatcctgtcgagttagcatataactgctaaaacaaataaacaatttaccaacacagaggaatagcttgttttcttcaatttaaaatgacaagacactttaagaacaattatccagtgctgaatttggaaaaccgactaatttatagtggacaaggtgattttgaagagatcacattatactttctctcaataattcaacggtaggtgcaagatacttgttaccaaatcaaaagaaaaactatttacataaagacataaagacactacaacaattgatttgaactttaataataagatagcctgggaaaatgtgtaatttaactacataaatccaacgtggactccacagatttccagatttagacatcctttatgaacattgatttcttcacatctcagctaattacttcttccctgttaagaagtataagcatagaaaatgggttactataagatcatagtttaaaaccaatttcaagtactatcatttagtccgcacaaaataaagcaatggcgatacaaacatgagaaaatagcagcaaaaaatagtatgttctctttctaatattttctggatatgcttatatgagagaatgccaacattattttatccaacatgttcaagaagctgatcactgaaaatagtcttgttaagccatggtatgccagtatttgatagatgattatcatttgcgggtttggcctgcaatttctactcattcttctgaaagcttacttacaactttggaagcttaatcaagtattcaaatgcagagtaaacgccaaaaaacatgcagcaagacagctccatacttaactcaaacccgggtacactcaggtagaacaatcaaaccccagcttaagcttctacccaaaatactaaacaaatcacaaacaatgcaactcctcctcaggtgtcatttagtttaatttgactatctcctgtgatcaatcctaagctgttttagttctcttaaaggcaaaaaaataaaaccgggtacatgctaaactgggaggtgagcatgagtcaactctggatccaaaactaccataggtcaaaaatgctgcatagcattgattataatttatttggacatatcaatctaaaattcaagcacctaatcaaatcttcttgcctgcacataatcctaaacctgaaatattataacaagataagtgcacttacataaacaagtatctcagaacaaaaagtaaaacttgcttccaacaagctagcaaaaggtaccaacaacttaggtaactcaatttcttgaatgttaaagcataatgtataatgtacaaaaaattctttaacaagaatcactccaagtcaatccaatttaatccaacctttcaatcaaatttactcatatcatcaaagcaattgtttcaactaccaattcaaatcaaatgcataattgttcagaatttcgaaatttacccgaaccaggggcgtacttcgctcgtttcatcttctctagctctaattgagcgtccatgaacatgttcaacctctgcgactcaaggtccatagcaaactccattctctgcttctctagctccatcatcttctgctgttttgagctctcgatcctctcgtaaatctccccgaattttaaaatcgccctagccaattccctacaagcagacccatccgataaatctagtgcctccattcgatgcttcctcaccaccactctagttccgtcaaaccctccgtcctcctcatcctcctcctcttccaggttatcatcattcaccggcaaactatccggcgatcttacagcgtagaccgggggctttggtccagccctggaactggtaggcttagcggacttgatcgttaaggtaacggtagtaggcttggtgttagagccgatgaggaaatcaagccggggatagaagacccaagccgagggaagaggcttagacttctcaagcttgtacttcttcttcaaggtgtcgactcggttcttgcactggacgtccgtcttgtacgccttaacgccgttatcacggccgttgacggcttcggcaacctccttccagtccttctgacggagattgccgcggttaagctgcaaataacggtcgccccaggcttcgattagggtctcggtggctccttcgctccaacaatcttcacggccaccgctgtggggtcgagtggccgtcgttgggccgggtcggtccatggattacaattgggccgggtcgggcggtggttattacggttgatcggaatattgtagagagagagagagaaatgaaagtgagggaaaatgagttagagagagaaagatgaggatggaaggtaaaggatcggattcgggacgaacgaaagagaaaatgttggccgtgcattgtgaccggcggtgacgtcatctacccgtattgtggttggacggaaccactcacacactaataatttagtccaacgaactaaaaccaagtccaatgcccttacttttgagtttccaaatagtttcacttagatttacttttttttaacaacatcattttttggggacttacgcatgtactagaaaaaggcccaaagtttacatttgatattagtacggcccaaatataatatataatggaaaacttacaaaaatannnnnnnnnnnnnnnnnnnttacaaaaatactgtcacacggaatt

SEQ ID NO: 79102 - DNA, 2671 bp, Cannabis sativa
  modified_base (27)..(58): a, c, t, g, unknown or other
aaaatttcaacataaaaagaccgtatnnnnnnnnnnnnnnnnnnnnnnnnnnnnnnnnatatttaaaattccgtgaaactgtatttttgtgcatttgtgaaattaaccctaaatagaatttggtatataattcggctagcaagaatattcttgctctttccctattagtgttttttatttgagttttcgagattttaacgagaccaaatattctctaaaaagccttataagaaatcatcaattcacaagcaataaaaactataattttctcttcaaatggttttattattattatttttttaaataagtcatttttattgtgatgtgtcaaaaagggaacaaatggaagactttatacaaaaagaaatgttaaatcgcactcgtggtgattaatacttttataaggtgtaatattattagttgcaatttaaaatcaaatcttacttattttattttaataaaaattataaaaatcgaagcaattatagtgggtcacctcgtaataatgcaagtcatttgaaaattgaaaaacccaataataaaaacccaaactttttctacaaaaattagtggaagtcaattcatggaaactaaaaaacatagtataatttacaaccacacatttatatcatcattttgcaatctaccattgacccctaatatgatagagaaagatcaaacaaaaccagaaacaattttcaagaacctattttttcttttgatataatattccatacattttcaaaatcactaaacataacagatattggattttactgcaatatagaaaagacaaaagtaaccattacaaacactctaaaaaactcaactttaggcctaaactggaactgttctattgttataaccagatggttgttccaactcaacttgatcactctcctcttcttcattctcaccagacatttcctccaaagatttccctttcgattcgggcaccaagaaagtaaacaacatgcctagaaaattcacaacacccaacacaattagtgagttcctcacaccaatcccagcagagtaccctgcatcaaccttactcttgtcctgattttgagccaaatacaagaacccaaacgcgccaaccatagcaccgagcttccccgatgcagctgagattccatgacatgtagacctgagtctagctgggaaaatctcagctgggacaacaaatgtagtggcatttggcccaaaattagcaaagaaaaaggttagtgaatacatagctacaaacccaattcggttttctttatgagtccaatgattgtaaggaatagctaaagcaaacatgaacactgtcatgaagaagaatcccattaattgaatggcaaatcttcctattctgtcaattaaagcaactgtaaaccagtaaccagggacagtactgaaaagggcaatgagtgtttgagctctagcaatcttgtaaacctcttcaagtgcattcattgactttgcatttggtatccaaccaattgcactaaagatatctttttggaaaaggttttgactgtagaaagcaatgtcaagtaaaaaccaagtactcgttgttccaagcaaatgaagcccatgtcttttcataaactccttagaaaacaaaccgaatgtgttagcatttttcacatcagaagattgaccttttttctctgtttcatcctcaatctcaacttgtaaaacctttgacatgtctgaggctgcttgtttcatgttcttagcaacaagagcagtgtaccgcgctgtttcgggcatcttcattctccaatagtaagtcataccagcaggtaaggctccaaccattagaataattctccaaacaaaatcagcttgtggaacagttgaaccaattggatcaacctcataagaaggagcactaaattgagttttgaaagcagttgacacaataattgcaaacaaaccgccagctaaaatcccaaaaccttgcatagcaaacactgcagcaatgaaagcaccacgagttttcttgttagcatactcagacatgattgtagccgaaagagggtaatcgccaccaatcccgaaaccaagccaaaatctaaagaaacaaagtgttgccatgacagattttggtgtgtgaccaaatgaaagacctgaagcaacagaacataaaaccatcatcataagtgtcatgccatacactctttttcttcccatcttgtcaccgagccaaccgaaaaacagttgccctgctaaagttccacaaaaggccacaccattaacagctgcagacacatttggtggcaatgtaccaggcttctcagcaccatcaacatggtagtaaatacgaccaagtaatttggtcacaagtgatatgcagaagagatcatatgcatctgtgaaaaatcccatcccagctatgatgattgctgtgaaatggtaccattgtgttttggccacatctagtgcattaagtacttgtaattgttctctagccatggctgcctagctagctagctatagctacaaaaaaagtcttcacaaacttttgggattctttctctgcaacaaagtttaaactatagttagattatatgacaaagagaagagaaaagaaaattgatcaagaaatcacaattttgaactaagctaatcacatggttttgactaatagtaacaaatttagtcatatttattcaacaac

SEQ ID NO: 79103 - DNA, 2761 bp, Cannabis sativa
  modified_base (39)..(61): a, c, t, g, unknown or other
acagtatttttgaaaaaatttccgtgtgacagtattttnnnnnnnnnnnnnnnnnnnnnnngtatttttgtaaatttctcattttctatccatgcgctattgaatagtggtagcgggcagcattaatgggccggtcatagtaagatccagaaagcccaatattgaatcttagagcccaccaagcctattaactatataaacgaacaaacgaagcactccttcaaattagggtttgtaaattggaggcttcttcactatcttaacgcaccgagacgagtagcagcttcagatccgaaaccctagccatggtgagcaaccttactttctttatttcttcctctacttctctatctctttcttctattttagtttttactttttattgctattaattcgtactctggtttgtgggcatgtagtcgcttgttgcgaacgaagagtttcaacacattcttcgtgttctgaacaccaacgtcgatggaaaacagaagattatgtttgctctgacctccattaaaggtattggccgccgtttcgccaatctcgtttgcaagaaagctgatgtcgacatgaacaagaggtaaagcttatttctttccccctagttgttcctcacttgtgtttggttttacccatttttctgtagggtttcatggattttattatgttgttttataatatgttattgtattatattttgtttaaaatcgaagaactttacggtatttttactgcaattttcagttttcaagtgcctttagatgcttgccttttttttttattatgaactttcgatgatattgtttatttttaatgttgaccctttgctaatgcccgacttttttcattttgctcattcatttgatttgaattggcacgttaaactgatttagcaaataaactaacagtaagttagagatgatatgtttttctgttgtgttggcgatttgtttttgttaatgtagtacttgtggatttcactttgtaaattgtttttgcagagctggtgagttatctgctgctgagcttgataccttgatgaccattgtcgccaatcctcgccagttcaaaatcccagactggtttctgaacagaaagaaggattacaaggatggaagatattcccaagttgtttccaatgcattggacatgaagcttagggacgatcttgagcgtttgaagaagatcaggtttgctttttcatatgttgttctatgctatactgtgttcttgtcttttatttgtttgtaatgtgtaatttatgatgaatgtacctataggaaccaccgagggcttcgtcactactggggtcttcgtgttcgtggacagcacactaagaccactggccgcagaggaaagactgttggtgtctccaagaagcgatagattggttattcacttctcttttcatttgggttgttttgtttcaatgttaccagcattactagtttagcgtccaggaatatttttggatatcccgtaattttgacttcagatatttcctttgcttctctcataaaattttaatggattttctatttcttttagtgtcatttagttttacctgtttggaaggaagtatgtagagaacaagcaaacgcagttgctcgttatctttttgaatgttatttaagaaatctgagaacggtcaatggttttctgtgagttatatttcattggctccaactggtttaatttttttagattcttttgcaattctgtggattttttgtggatgattcataaccttttcttatcatgattgttgaatttgaatctttctgttttgatgttttgcttgcaactttatttgaatcttgtgggtttagttttttcttatttgtgataatggctctatagaacaaaatcctatggttaagattcttattttgttttgctaaatcatggttcagattcaagaaaactaatctagttactttgtgtacagtagtgtgttcattgattggtttggttaggttaaagagattttttctcgtccattcaaacaaaaattagtaccaagttaacctaattaacttgttttcttactacatctaaaaccgtaataaattgaaaattttacattatagatatatgataaaaattacaaaaatattatggatttattttttatattgttttttaattttttggcaaagtgtattttttattttttattttgaaggagaattttacaataatttccatctgtctttttatatatatgtactgttgttgttgttgtttttgttttcttttttatatatatatttcaaaaatattatactacttgttttagtagaatagaaaaataacttaaaaataaatttaagataatttaacaaacaacataaaaataattataaaataaaaaaatataattacattgggaaattttattttctatacttaaaaaatttaattttttttttaaaccaatatatatatttttttaaaaagaaattccaaaaatatcctcctcataactcaaactctttctctctcctccctcaaactctctgcatctctctctcgcacactctcggcatctcttcgaccgcaccaccagccccctctctcggaccaccacggctcaccaccaccacctccgacccagcccccctctctcgaacccagccctcctctctcggaccccatggtccgaccatcggacctggacctttttttttcattcgattttagagagaggaaaagagagggtggggctgggttcgagagagggagctgggtccgaggtggt

SEQ ID NO: 79104 - DNA, 2918 bp, Cannabis sativa
  modified_base (259)..(268): a, c, t, g, unknown or other
  modified_base (315)..(315): a, c, t, g, unknown or other
  modified_base (425)..(429): a, c, t, g, unknown or other
tttttattctccgaactttgacatacatgcagggcaggccctaggcgcgggctaggctcacgcctagggcccactcattttaggagcccaaattaaaaaaaaaaaacttacaaaaatactgaaatttgaattaacttttacaaaaatactgtcacacggaattttttttaaaaatactgtgtttctgtaaaacaccagtaaaacacaaagcaggacaactcaaaacaacagtagaacaccagtagaacactagtgaaannnnnnnnnngtatactgcagtatgaaacttatataaaaaatacagtaaaaaagtanaaaataccgtctggcagtatttttataaaaaaattacaaaagttagtataccatgtaaatttcccttaaaaaaataccttttaaaaaatatacatatatatttttttaannnnntttaaaaataccatttatctttagagtaagggctcaaaatattttatttgcctatggcccattttaactcatgggtcggccctgcatacatgtatcaaatcttaaacttttaaggccgttaaaaattctccttgaattattgagattgttagatttaaagttttttgtccaattttagtaagaaaagtctatagctcatggggcataatttgatacatgtgaaagtttgagggatacgatttggtagatatcaaaatcttagaagcataatttatatatggccaaatcagtataattgaataaaatttgacaaaagcccttaaatttaataatctcaataattcaacaaaaatttttaacagacacaaattcagaggatataatttattacatattaaaattcagaaccaaaaatcttaattagctgtaatatataaagatagaagtttgagagtaataagttctaataaagtgagctggctaacgggtaacattactttgaaaagaaattatgtaagaaaatttgaaacataagtgtatactaattaatgaataatgatatatacagatataaatttcacacatctaccattagtttgaattttttgtgtccaactttgtttaatttattcatgcacaaattattactcttatttttttttaaaaaaaattagaattacctagagacttcctccttcacattttttgtggcagtttcttatacactctgcacgattatctctgctacaaataaaaaattaaaatatcaaaaattaaacttcaagattctattttcaatctttgaactcacgtgacagtatcacgcgagatcatcaaatactagttagaacctgtaaaagattgttgtgttggatttggcaatcctatactgttcaacaatcttttacaggttctgactaagtaacaatgtcatatatgtttagcattattgaactatataagttaataagttaacagtaatagtagtaatagtagtaattattaagttaagagagtacaacttactcttttcggcatgcatctgagcaagtgtcgacgcaacttgttctacgttgaggtggtgggttcacgaagaatcttcgtggtgctggcggtggtggtctgtattttttattgcagagtctctgacacaaaaccacctcttcttctgcattacataaacaagagatttaaagaagaaaaataaaaattgatgaatacacagattttagtatatagttttcaacaccatatatatataatcaatattatgcgaagaatccattcaaaagaaaaacaaaataatgcaaagaataaattaaataaaatcaaacaaatagaaataaaaatagacttaaacctataataataataattatatagtagtatcggatcatatttggaagttatatttgtaatactttattttttaaacatacaaactaattgattggtgtgtgtaattattttaggtatacgagatttaaaaaatatataactaattacaatttaaagattatttttattcttcaaattgagacttaattttttataataaattagaagttattcttgaataaaatatttttaaataaagattctaccgtataaacaacttaccgttacccttgcagagagagatacaagttatgatgttttggcctacactttcagcgtaagaaatcatgaacaacataataagtagcatagccataacaacctgtactgctctctttctcattattctttttttttttcctttttcctttttcgaattataattcttttacttttcaattttcttagaatatgcataaatgtatatggactatttataagggtgtagtggagtgggaatatatatgccatgatattaaattattaatgctactcatttaatttctacgaaaatatatggctgtgtgaaaataaaatacaaaatgtcaaaattgatcaactacgtagtacgtatactatatatatatatatatatatcattaattaatggtcaaagtcttcaaacaaatactaaaatatcggttaatatacatgagagagaaggaattggatgacacttttttttttcttaactttaatagtcaaaaactatagtctcgatatttataaaacactccataaatatatatattatcacagatttaatatgtatatatatcacaaatttaaacctattttaaaaattattttaatataaaaaatcttaaatcatattttataaaagctttgctaaattaaagaagaaaaagataataatgagatgagcggaagaactaatctgaaactatacataaaaaggagagaatacaaccatagtgtttattggagaccactacctatttatagactcatcataaaatgagttttgcgtattataatttagcctctcaacaaattataaattaacttatggtatctacacattatttccataacaatttaatgatacccataacataattggtcactta

SEQ ID NO: 79105 - DNA, 759 bp, Cannabis sativa
gaaggaaaagaaaattagaaggaaggagattgtttggtttatatatataaggaaggaaagaaaattggtatattgaaactatattatctctgaaattactaatagggtaaatgtccatttcgtacccttttaatacattatcgaactatctgataaatataattctttttgtaagagatttaaatataaattgtgaattaatgaactacagaaactaaaataaattaatatttcaaaaacaaataaattaaaaatacaataatatagatatgttcgattgaagccctccatagcaacacaccagcatcgtcatcgtcctcatcacacagaccccttcccttgcaaattcaacaaaactctttttggaattacattaacatttcagagcttttatcttactgtgttgttgttgttaatgtttttcttatgaagcaacaaatgcataagatctttttacaggtttataaattgtttaaggaacctcagtttctctaatctatttgtaaaatacatcatcaatttttttttttctatttttcatcacagttttatatcatatcaaaaattaccttatttaacatataccattcaatatcacaaccaactactttactttggatgaaagtggcggaatgtagttctatctcaaaatcaattgacaataagagaagtaattcatttatcttatatatgacaatttattttcacacattaacaatatgacactaactctaataactttagagaaagaaagcatgg

SEQ ID NO: 79106 - DNA, 4283 bp, Cannabis sativa
actcatggtcactctctccaacgttgcccgatttttcaagagcgttttccaactgtgcgcccacctcctaggcccaacaccaaccagtcccaatccccttccacccaccagatcacccctcaagcctatgtcgctactactggatcatctaacccctcttctccttggctacttgattctggtgcctcgcaccatgtcactcatgatcttacaaatctagctcttcatcatccttatgatggcacagaagaaatagttatcggaaatggcaagggggtccctattacacacactggttctatttcttttcccacttcctataaatctctatctttgaataatgttttatgtgctccttctatgaaccgtaatattatatcaatttcccaattatgttctgataataatcttctcattgagttttcctctgattcttttgttataaaggatcgtcctacgggggcacatcttctcaagggtccaactaagcatggcatttacgaatggccatcctttacacctatcctagctctttctagcattaaagcatctgcaataaattgacaccatcgattggggcatccatccccctctatttttaagaatttaatttctactttttagcttaatgtctctagcaatttttctttcaattgcaatgcctgccaatgtaataaaagtcacaagcttccttttggtcaaaatactttatattcctttgctcctcttgatctcctttatactgatttatggacctctccagtttattctcttgatggatataaatattatattatttttgttgatcatttcactgagtacatttggttctatccacttaaacaaaaatctgacacaaaattggtgttccctcgcttcaaagccttagttgaaaatttttttgaaaaaaaaaatcaaaacaatttattctgacaatggtggagaatatcaagccttagagaaatatctcataattgatggtatctctcatctcacttctccaccccacacaccagagcacaatggttatgctgaacgacgtcatcgtcacatagccgaaataggactctctcttcttgctcatgctaatctgccactagatttttggtctcatgctttcactacggcagcatatcttatcaacagacttcccactcctactctctcgaatcaatccccatttcatcgtttgtttgggtcgccccccaattatctcaaactccgtagttttgggtgtctttgctatccttggttaagaccttatgcacatcataaaatggactcaaaatctacatcatgtattttcattggctactctaaaactcaaagtgcctaccactgcttagaccctcttacacacaaggtctatacctctcgtcatgttcgatttgttgagacagaatttccatatgctactcttactgctcaaaagaatatttcacctacaccttctccagatcagtggtgtgccatgtcaattcctatacttccaaattcacctataatatatgaccatgatgccaactcactctcacccacacacaccatccactccccacctacacccactgaacccataaccccatgctctagcaatgactctagcctcccatcaccaagtccagacacatcccagcagctcactagtaacacctctacaccccatagcccgccagctacccagtctaacaccctccctccacccattggtattgttactcgtgccaagaataatatccacaaacccaatcctaaatacaatcatcacaccactcttcaaccaaaacccatcgaacccactagtgtctctcaagctctcaaagatcctttatggaagcaagctatgcttgaagaaattgttgctttgcataaacttggcacttgggatttaatgtcacctgaaaatattagaaatctcgttaaatgcaagtgggtctttcggattaaatgcaatcctgatggcagtattcaacgataccgtgctcgcctagttgccaaaggttttcaacaacgacccgaaattgactatactgaaacttttagtcctgtagtcaaaccagctaccattcgcactctacttagtcttgcggtaaccaaaaattggcatctacgacaacttgatatcaataatgcctttctcaatggcacacttcatgaggaagtttacatgtctcaaccgcctggatttgttgatgtcaaatttccctcccatgtgtgcaaactctgcaaggctatctatggccttaaacaagctcctagagcctggtataccgagttaacaaattttcttcttggctctggtttcaaacggtccattgctgatgcatcactctttatttttcatctttcctccacccctatctatcttattgtgtatgtggatgatatcattattactggtccaaatgctactaatcttgatgtctttgtcaaaagtttggccaacaggttctccttaaaagatcttggtaccttgtcttactttcttggcgttgaagttacccctacaccgaagggtctctttcttagtcaaaagaagtatatcatggacctccttgaacggttcaatatgcaacatgcaaagcctgcttccacaccaatggttgttactccatctctctccttaatggagggcaaactaatggatactccaacaaactatagggcagccattggtagtcttcaatatctcactcttacaaggcctgatattatgtttgccatcaacaaattatctcaatacatgcacaagccttgcaatacacattgggcagccgttaagcgtctcatgcgctacctttgtggcacgatggataaagggatcaacattgttcgtgattctccatttacacttcacgcttatgctgatgctgattgggcaggcaacaaagatgactatacttctactatgggtcatgtagtgtttctgggtaaaaatcctatcacttggagctcaaaaaaacagaagtccttagctcgctcctccaccgaagctgagtatcgtgttgttgcatcgactgctgctgaactaatgtgggtccaaaatcttctaagtgagtttggttttacaattacaaatactccagtcatatattgtgataatcttggagccacatatctaagtgcaaatccagttttccactccaagatgaagcacctaactttagcatatcattttattcgggagcaagttcaacaaggtacactacgtgttactcatgtttctacgggtgatcaacttgccgattttttgactaagccattatctcgtcctcgtcttgacctgcttgggtccaagattggtctcactaaagatcgtccatcttgagggggcatataacaataagatcaattctcatcaatagctcttattttctatttatgtatacatttatctacgtatcaatagcttacctagcatattaatctattcactataaattaggattattacattaatattcttactttatttagatgatttgtatatgatagtttttggctctcaatgtactatatattttgtgtattcgatattgaaaacaagaataaaagtcaaccttttcatggtatctgagcaggtataatccttctccatttttttactttctcaaccaagcttagcatcattttttttttcaatggcttctaccaccattcccaataatgatgacccaaacaatcctcttgttgttgttaacctcaccaatatcctaaagctaacaacaacaaattatttatcgtggaagcttcaaattgaagctactctaattggctatggcctcttcaagttcttggatggttccttcccggcaccgtcttctaccattacctcagcatccaccaccaccacaaatcctgcctatgcaacttggtttaggcaagacaagctcctctttggagctcttattggcaccttggaacccacccttgtccccctcatctctcgctctgaaacttgcaatgcctcttgggttacgcttgccaacacttttgccaaacaatctcgaggccatctcaaatctgtgcgactcaatttgaaaggcattaccaaaggatctcaatcaatcacagaatacatgaatactataaagatgtgcattgacaaactagccatccttggtgaacccatggctcccgaagacattactgataaagttcttgacaatcttgactcaagctatcaaggagtctttgatgcggttcatgctcgtgatacacctattagttttgatgagcttcatgagaaattgctgaatagagagcttgttattaaatctcaa

SEQ ID NO: 79107 - DNA, 3265 bp, Cannabis sativa
  modified_base (2547)..(2548): a, c, t, g, unknown or other
tttaaattggaacctaatctttgtctaatttgttactgtagtggtttttctactatcgacttcaatttgagaactttgacttgaattgtgttgagttgtaatattgtggtaataagagtctgttttaaattttgcatttttatacactattgattttcatttctgaacattgatgtgtgctgatttgttgtgttggaaatttgtcctgtttcaaactaattaggctctacacatttgttttctttttttgcctcaagattatgtcaaatatcatgttcgattttgtttttgataaagctgttaacgttatcgagaattcaagtattgtatacgtcatttgtatgatcctttgctttgtaggaactatctgtaatttacattttgtgcaatagaaattttcttgtattattgaaacacaatagccttgggtatgaaataattacttttaagttggaaatctaccagtgtttgcttccaatttgtaataaagaatggtttgttgagttatgtgaaaaaatgaaaaatgtgggctcctttcttcttttgtggattgaaattatagtaagcatcttaagttggtgaattcttttaatggggtttctttatagaaaatggtgaaagattctgttgttattgaattttttagtaatgcatatgtgtggttgttagattaatgttctttagcttttgaaatcaatattatcttgatgcatatagtgatgtatcaggatcttgttcttagacttgatgtgtataagaagcttgaaaagcatggaggatgtgtgaacacagtaagctttaatgaagctggtgacatcttagtgtcaggctctgatgataggcaggtcattctatggaattgggaaattggggaaataaagcattcctttcaatcaggccacaccaacaatgttttccaagcaaactttatgccttatgcatgtggtcgaagcattgtcacctgtgctgctgatggggaggtacttgagtttctctgcaactgatattttgtaatgtttcattttcattagcctgctacaaaccatgatagtttatatttaaattctaaaatgttcaccgaccatatatagtttacacgatgtgcttttacaagcttgaggatgttaatcatgttattgataatttgctagattgctttaattcatgttacgtgtatgtaaaggtagattctacatttgaatgaaacaagttaatgttttaatgagcatttgcataattttaggtgagacatgttcagatttcagaaagtgggcaagtggatacttctttgcttgccaaacatcaggggcgagctcataagttagctatcgattctgggagtcctaatatattttattcctgtggtgaagatggactagtgcaacatgtgagttgtgattttattctgtcacactataagtcattttccgtgtgccttctttacacagaagtttttatttgtttttttatgttatatttatatatgtgtgtatattgtgtacatccatctgacaatcttcattataacagtttgatctaagaactagagaagccactgaacttttcacatgccggccaattgatagtaggaagtacatgcaagtaatatatttgaatgcaattgcaactgatccaagaaatccaaatctctttgcagttggaggttccgatgagtttactcgactttatgatattcgaaactataagtgggatggatcatctgactttggtcaacctgcaaactacttttgtcctccagaattgattgataatgagaatgttggaattacaggcttggccttctctgaacaaagcgagctacttgtctcgtatagtgatgagaacatctatctttttacacgagaaatgggtttgggaaataacccaattcctttgtctccattgtcatctccttcggctgcggacattgatgagaaggtatcgccccaggcttacaaagggcataggaattgtgagacagtgaagggtgtgaatttctttgggcctaattgtgattatgtggtgagcgggtctgactgtggaagaatattcatgtggagcaaaaagggtggggagcttattcgtgttatggaagcagatcagtatatcgtaaattgtatcgaatctcatcctcatacaatgacccttgcaagcagtggaattgagcacgacataaagatgtggacgccaaaggctttagagagagctgaattgcctacaaaggttgatgaggtatgtttcatttcatttaccttgagcaagctatctaaagttataaatttacagatttttgctttcaaatcttagtggtaacttgagaaactatcccaagttaccaaagttttctaacttaattggtattattaattatgttcctggtacctcatataagaggtaacagcagaggaactaattctctgctgttgtttggaaaaaggttatgcctaatcgcgtgcattggtccttgagcaatgacgatgatgatagtagtgattattactatgatgaatacgaggacgatcatgatgaggatgatgatgatgatgnngaggaggaggaggaggaggaggatagcgatgaagatgaggacgataaggatgaggacgacaatgatagtgatagcgacaatggtggtttcaaagagaatgacgatgaaatcaaaatatgatgatatgataataacaaaatcatcattgtgatattatatttcgaacagagtctgacgatgctaataacgattactaactgcacttgtgtttccagcagggacccatgagtaagagttttccgttctttatctctgcacaccatagtctgcggttgcgacttggtttactacaaaggcgaatcgtaggataccaaaggtaaaaatcttgtgaagagcacttacaacattgttgattctagctgaaaatcatcgtgtcaccagttcgaatctagttcgtggcacatgaagaaatgaagaaatttgtatgattatctattctataaattatttattaatacacaaccacatctaatcatataacatacgtttgtttggtatgttggaagactcacccaacataacattaggccttgttaggttttttttttttttttgattgtatagaattttagcatatctttgaagtttggatttttgataaagaaagaattttaatgaatttcatttaatttagttcatgagaatttttttcttttatagaaaattttggagttaaatctattgtgctttaatttattatttttctaaataaaattg

SEQ ID NO: 79108 - DNA, 3494 bp, Cannabis sativa
tatttccttaattagaaatattctaataatacggtctaatacggcgttccaaacaagcttttaatgtatgatttggggtctactaataataggaacatacttcgaatagttgaagttgagatacttccgaaatattctccacaatcacacgagcaacaagagaagaatttaggaacgatgggctagatatacctaataaaggaaaattagatgtttaggctcaatataggttgggccaaacctatagttataacaatggtgtcattcaataacaattatatacagttatctaattatctttatataggctaatggcgacattgctgaagatttgtagaaaactattgaattaatgcaccttcaaataaatattactgttgatcggatattgtctcacgtataataaatagtagagaattgagttatatattaaaaataggttacttcactcattaccaattagttttgaaatggaattccatgattctcaacattgtatcagaactatattccttgcaggtaagtgatcttatctgtagaatataaaccaaatagaatgcagatcgaaattaaaaaagtttaattttttaataaataaaaaattaattgaatgtcaaacttatattagtttaatacagttttaggagactccacttgttaactttttaacaagcgattcgagagataatctaatctattaaaaagttgaattctgagtttctcaattaattaaatacgttttaaaaaattaattaaataaaataataatttaataaatatttttttttaagaaaaataccctcaaatattaatgcttgaaaatattaatacaaaaatacgaatgtaaaacttgatgaaaaaaatggaatgtctttttgttcgctctaaaaaattgaggagaaaatgttttaatttactaattattaattacatacatctaaaaacagttaattaaataaaataagtttttaaaaaataagtttttcttcaaaagaaaaaagtgtacacaatactaactagctttgcttggtgagatggcggcatatgtgatgttctgttctggtgaacttttatgtgactcgttcttcttctacaaaagtggtactcacgggacctaattaattgctcaattttgcaatatataacaaaagtattccaaaacaaaagtatgcttcagaattaccatgccggacgataaatagttgaacaaaaattttgggttgacgaatctgtaagtgtgtgcattgttcgttcttatcaccgaataatgataattgataaggaaaatgaaattttttatacgggcctagggtcagtcaattaaaatatcaatttattggagtttattaatgcttccatgaataaaaaaatatataatatagattgtgttccttaaatcgaagacacatatacatgctatactcttcacttaatacttaagtagacaataacacgttggtcagtgaggtgccgacactgtagttcgactacgtacgtacgtaatttttattcatatattcattcacacgtacgcacccaaatatgatccgttccattagccacattatccattttgtattttaatcaattaatcctattatctacctccttggcagacaactaattagtgagcgtgtcaccgaataggccccaacgtgtcgtttctttgacgacgtgttatcgtagacacggacacgtgtcacattatattttgttgggacacagttcatgcaatattaatggtattgtttgtatagaattagagagctataagtaaatcgaggtgggcctgtaaccggacaggatttttgaaagcagaaaatatagctacttaattaattatctatacattacattacatatggacatactaagaaagagtagttctttgttcactttttctaagcttctgtttaaaccacacaattgtactgtgggtttttccagaataaccagggtttcactttccacggcttatgaacgcgcacaggtgttacatctctctctctttctatacatgcatcatatatatatttgtagcaatatagctaataattatcttactctataatatataacttaaatttgtaacttaagtatgtacctattaagtaataactatataaataaatactagttagtccttttcagttaagtgtacaaaagaaaaaacgtaatattgtattataataagtggatttttatttatatgtctctttttaatttcatttttatgttatataaagaaaataggaggaagaggtgatcagagcgaatcgacgacttatcacaccgaaaacgacgtcgttggtggaagaaacagtgagcacaagattgaggatgagagtggcgttacgggatttgttgcagataaagcaagagaaggagctataggagcgacgaaaatagcggaaaagatgggggagttggcttcggaaactatagacacagcttgggactcggcaaacaatacaactcaaaatgtccaagacacgttgatcgccactgctgacaaaaatgttgttgatacaaccgaatatagatccatacatgatctaaacaactcttcactccaacccaaccaagatcatcataacccaactctttgatcacgaccattcattttagctcttatttattgaatcttaatatatgtcttcccgtatttgttttagtcatgatatcagcttattataaaaaatatatacattatagttttggttatttctatctctgtagtgcgggtacgctacgctctgtctttctccaataaaattattataatggtaaattaatacatagagttgattatgatatattaaaataaataactcataccaacttattagttgatgatgataacaaaattaaacaaggaaaaaaaaaaacgaaaaagctatagcctatagcggcacccatcagcgtcatatgccataatttttttttttttttttttttttgagataacgtcatatgccataattgataatgcacatatgttgatattttcatttagaattttttggcatatataccacactatgtatagttacggtagacgacaatgcgcttcgtcatccccacaaataatataaatattatatatatcaaatataatataaagttattacaaaagtaagaaaaagaaagtgagttcgagaatcggatacgaagtctatctctttgacttgaaattgacaaattaaagttccaacttaatttagataagagatatgtaagagcgaatggaaagggaaatgccaattccaaagtagctgacgatcgagaataaccaaatcacatatatatatataaaatgatttattgtgactgtgtcactccacatataatacaagcactataacaacttttttttttttgaaaagaagaccacttttttttcattaagggctaaccaagtttaccataataagattaatttttttttgttaacgtacatactcacctagctacaaggcagtatcttattgatt

SEQ ID NO: 79109 - DNA, 2140 bp, Cannabis sativa
tttgatttatcataatctcttcattcgagaatatttactttttttaaaaatactatgattattctagttaagttcttcacaaataacataaccatatatacatgaagtaaaagtaaaaaaattaatattactaacctccaaatacagtaaaagcttcaggggtatgtctagtttctacagaatacataattggactgctttttttgttatacaaacttggatctataacaattcgattggcagtttgtctcctacaccaaatacaacacaataatttagagtgtcacataaaattgttatgatctaatacaaaaaagtaaaaggcattgtgtgtaaatgtaatgataattctaaacaaaaaataaaatagtttgataaatttcttactctttccatcgacttgcattgtatcgaacaaaattgagatttcttggcaagaaagtgagagcatggagaagatctgcaaaatgtttgagattcaataaaatactaaaaagattaacctttttttttttttttttgttatgggctctaaataggaaagtggcatctaaaagtttggattttggacctgaaaatgcccaccaaaagcttggtagaaatactttcatatacttttaagttttgaacatagaaattggttggattcattaacataatgaacttttgattagctaccctatacacaattgtatatgcagataagtgtaattttaacatgtaaaaaagctaaaatgtaataaaatctaattaatgtgtctaaatgttcacatttttttaaaaaacagaggtcatttatcttagagtgagctgaaattattatgaacccttgcttatggggaaaaaataccataaaggcaacttgagaaaaccaaacacaaacaaaaagcacaagacagaaattacaaaataatgcaaagcatttaacatgttataatgcaatgttttgggggctaaaagtttagaaaattttcaattcttaatagttattaactcaaaaaacataaagggagagaagaaatttgaattaccatcttgagtcattagtggataatcagcagcacttaatgtgataaaccaatcccaatccgaattaatcttgagaagcaacgctgcagcgtgtagcgttgctgcaacaaccgacgatccaatctcgtttattgcataactctttccaacaacatcaacattctcaaaagcttgaaacactttctctgattgaacaaaaagcgctaaactctctctttcctgatctgaagcacccgaatcaagttgaagtaggtaacgatttcttggatgatatatcgcctttaaaagccgaattattctctcattgtctccattagtaccataaatccaataagcaaggattggaggatttcctttctcttttgatgggattattctattagtatttcttcttggaacttgaaaatcgttgactttttcggaaaatatgttttgtgttgaccttgaaattgctcctaataacactaaactaaatgcaaatgcaagaatccataggcaatagcttgagattagtgaaagaagatggtattttctcattgtaaattacaagaaaaaaaattaaagaagaaaagaatgttgggtattgaaatgaaagatgtttgagaaaatatgtgtacatagatatacaaagtggctattatttcatcatcatcattataaggtgaaggtttatttattaaatgaattgagaaaaaaggtacactaattatgaagaagatgttttgatgttttaactaccaaaactatatttattactttcttaaaaacttgatgttaaagcaaaataattaaaaaaggacaaacgtttcaaagttgataaaagaagccgttgtgaataaggaaacgaattgtccatgatgcttgtcccactttttattaagagcattgctaatttatgtatcatagtgatttttttataatatgaaaaatgtgaaaatgcattaatagtgcttgaaataacaaactgctattgacacaattatttcacttcaataacagcattgttacggggcactaaagtacctagcaccactagaaggtgacacttcataattggtttgcgattttttgtaaggctaattagtaattccccccctccccccgaactttg

SEQ ID NO: 79110 - DNA, 2982 bp, Cannabis sativa
tgttaagcaaagattaaaatcatctttaatattttataggtctcgtctcggttgccaagtaattgcaaaacccgaactagatggagttcgtttagctattcccgccgctactcgcaactttgctgttgatgggtatgtcccaaaaccacactagacgtgataaagcaatacataagagagtgttcaaagttttataaatgcagtcatcccatttttgtagctcctgtattttaatgattcaataatattatgcctctgtgggcaactttttgttttttctttttattcccctttatttggggttccaaattcttttgttgctttaaattatactgttgagtataccatgtagaaatatagtttaatagttctcatgactattaagggattttcccgaccatttatggtttacacaataagaaactttattttttttccatctcacaattccgaaaaaaaaaggcatgattgatgatttagtttcgatgtattgcgttacagaccaattccaacttattaaggcctccatatgtgttaaacatatggaaggtggggtaggccttaatagctttggggctttctatttagctcaacaactgttggtactaatctcacaattgaaaacctctaccctaagtttttgtttgatgcacttaaaagaaaccatgttctgcatatataaatgtgtatatatttgttttatatatatagataaaaaaaaattgaaaaaataaaaataaaataatgggttatagttcttaagcctccatttatatgtcggtgaaatcttgaagatgatatcatactcattgcttgcagtgtcattgaaccaattgagttaattttactccatgcttgatctctcagagttggatttcgtgtagtgacagtgcaacttaacttaccaatacgtttgtagttgcagaaaatataatttaaccattgttgtaataagacaacatatactaaaatcaagtttctcagtgggctgctttaagccacttacactaagttttgtttggtgccacaaattctaaagtcgaacctagaatggtctatacaggcctgtctgccacaaacttttgcttcattttctagcaactagtaaatatatatatgattgaattcactccctcctttgtgttgactctgagaacggttttcaccactattttttgcttaattttctggcataattttgattgcaaagtggataaattggacaaaacaactttgaaaacagaggcacttaactctgcttggtttgcttcattattaaggactaagtgggtagccttatcaactaggctgatcaacatgatgatagattttaataaaaattcatttgtcttcgaaattttttcagtgtaataaaatgtttggtttagtctcttaattaagtgtcactgtctcaatagtccaataatataaacataaaatacatctgaattagatactcttctggatgatttatacatcacacctaaatgctaaactatactaacgtaattcatcatgcttgtgaatgtttcttggtttcgtttcagtgccaaaagggaataagtacaaacaaggcatctcttattactattttaatttttttttttcttacccaattttacttcgtcaagttattgatcttttgtggtacagattctgtacgagttttaagtacagtttgaaaatctttggtcaccaaatctaatattttgaaaattgggggcaacattaatgtagcttgtgaaaacagagttttacattttcgactaaagaagttgcaaaattattttatttttactcttcgttaattaggcagtattttttttttacgttaaccctgcatgttgaaattaacgagtatgacttttacttcaaattaaaatagtatagttaataaagttttgagaccaaataataatgttttagctcaaaatttctcatgtgagatgaagatactccaccattatttagctttaattatgacaaatagaataacaattagctaggtacgatttctagctacattttttttaaaaaaatatatatatcaatggacttaaatgttatttgtgagaactgagatatgtattagctagaagaatataatattcgattcgattctattctctatcattaatttattaataatgattccttcaaaaaaaaattattagctcttatttgtttaaatttgtaggtattaatttaattattataatgacacgtagaaatattgttatttaatttggtgaaattttaatttttttttatggacaatatttttcatagaataatgcccatatcatccgtgaagttgtgaagtgcatgccttcaaaagaaagtaattaatattaacaataattactataggtagaaagttatcgaaccctacatcgctttccaaagtaattaattcaacaaaagtagtaaagaccaattatttactcctattgttatatatatacacttgtagttgtattgtatagagaagaaactatgatctattggagtgttttattaagtaaagtcaaaaagggtacgtaaggggtagtttgttgttgtattttctctcctttcaaataaaataaaaataattgaaaaaacttgcctttggtgtttataaaacgacaagtaaacgtcggctgtggcttcagctatgaaacaaaacgacaacgacatgaccaaggccttttgccttttgctttctgagatagttaatttttaaattaataaagaacaaatctcagccaagaaatccaactttgtttcagatgaaccgtcattttgtgttacaggaatcgcagagccaaccttttaccaactttctaatacgtacaaatataataataatattcaaaaaaataaaataaaataataatatatgtatatagatacagtaaatgtctgaaaattgttaatttaatgttttttaattaaagttaactcttaaaactaatacttttaaattaattaattaattat

SEQ ID NO: 79111 - DNA, 1008 bp, Cannabis sativa
aaaaaaaaaaaaaaaccttctaaactgagagttgtaactttcgatctaccaataaaatacctacaaaataaatatcaaatattgaataaaatattaaattttatataatattgtcactcatatttctctcatgtaaaaattaaaacttatctgctcaaggctacaatacatctgatgtgtttatattagaccatactgaccttacaaaaattaaaactaaatataatggctttataaaatcaaaattagtcatactcgccttaaaaaattaaaaactaattatactggccttacaaaatcaaaaattaattatactaattttacaaaattaaaactatcatactggtcacgacatactaaataaaccaggttagtagagaaaatattggttatattgtgtcaaaaaaaatttcttaaatttaagtgacgattttaaaaaatatatataatcattaggtattagtaatagatagtgctgtataaatagttagtaattttttatatttattattaaattaaaagatgtgagttttaatattgaattatattagtaacactaattgatgaattatatcaatatgacattaaaatattaatatctatataatggtaattaataaatctacgccttctatatataggctgtttagactttgtttcttctagcttctcatgaaactctatgaaaaaattactaaaattgatttatgttaaaaagagttctttaaaagtaaaatctgaaaatcatatattatttatccgaccaacaacataaagttcaatataaatatttatatatagacatgtaataaagttgttggcccttccgccactggtgtttagcctcgagtttggtgtttatatgcatatatagccggccaatattagtagtactgggtgaatgtacgtgccgagccacgtattgctagttttatttaagattttggtctttttaagattttgaatgtattttatttttaaagattacaaattttttatttgaaaaaa

SEQ ID NO: 79112 - DNA, 4709 bp, Cannabis sativa
tagaattcatattaggttgttaattcaacatacttgttagtaaatctagatcctggtaaaattaatttccaacacaaccgaggatggcatgagtgacagattcaaagctgttaccacaaacaggacaactagaatggggaataatccttttagcattcaaaagatcagtatgtttaaaataacgagctttgaggatagaatggatgagagagtctggattagtccacactctccaagcttgcttggccagcagagcttgattatgagaggtcaaggtacgaaagcccaagccaccaaagaacttggaaacagaaatggcagaccaatttttccagtggactttgctaataccctgagatccccaccaaaactttgctatagcactctggatttttagacaagtggatttaggcaccttaaaacatgacatagcaaaagaagggattgcttgaacaacaaccttgataagagtttctttcccagctctcaaaaaagatcggtcattccaagaattcagacgggaagaaacactttggaggagataatgaaaaacggaattggtgaccctgcctgcacaatggggaacaccaaggtatttactgatgaaaccctccccagtgagatttaaaaattgtcgaaattgttgctgggaatcaacagaagtgtttgtagaaaaaagaatagaggacttgtccctgttaaccagctgacccgtggcacgattataaagatgcagaatggcattgagggcatcactagaacggggagtgactgtggagaacaacatgctatcatcagcaaacaagaggtgtgaaaggtgaggagctcctcgacaaatttggatgccaaacattatttgtatatacttttaaaagagagaattgctaaaaaaagtatcattagtgcttaattaacaaggtgtcgtaccttcatataacttaatcgttatataacttaagaaaataatgtttaaaacatattactaatcaattataagatattacttataaaaattgttaagtactaatgatatttaatagtaatattttttttaaaaaaatttcaaatactttacagcattaaaagtaaaatttaaaataatttataacacgaacgtaaaacaaaacaaatacgtgttccaatttaatatttaaattttatttttctaaaaaaataaaaaaaaaaatatataatttacaccatcatataacaaattaattaatttataattttagctatatataaaaaaacaagaaatggccttcaaactatactaccaccaaatcattttccaatgtatatttattaaacatgtgaaagtaatattacacatacgaagtagtgaatggtgtcaaccattgaaatgagtgaggccgcatctgtcagtagatgaaaaatcagtggccgacctgtttgttcggatgagtgcatgcatgtctcgcttcttcttcctcaatatatattttaattagttaaagaaaaagaagaaaaaaaaaaagataacagtttatttagttatttttttaaaaataaatagcttcttttttttatttcttctgtttaaattatgtaggaaaatttatctaaaattttatacgtgttccaaaacacacaataattaatattaattgaaagtgtttggaaaagtgaacttatctggatcaggttctaactgcaacccttcgatggtgctgctaggccctatattactcacaagtaatagcccatgtttcaagcaatgatacacatcaattatatatatgatttgcttcatgcaacctgatttattgctttaagtaatattttttttactattattattataacatttttctattttagttagtttaattagctaggttaccgtgaaagaaaaaggagagatagcaagtaaaagcaaagaaacaaaaaaaaaaaggtgatgattgtatttatggaggagtaaaaaaagttactggtgggctgggatctggtaggaaagtttgtgattgtcaagataattacctttgtcccttcttgattgctctccttcataaaaaataacagatagtattttatgcatgtaatattaggggtatcatgttcaactaataattattttacccttcgaaaaaaataataattgtttacttagggaaaaaaaactattaattatttggttaatggtaaggaatgttgattaaaagttaattactcaattattttggtgataattaaatatttgattattataattttttttttgattattttgcaagcaattaacgaagtatcattatttgctcggtaaagtcaaacataattaaagaagtagaatcaacaagtatatcaatcatttcaactttcataagtgcaaaaatttcatcaagagttcaagaattcaagacccaatccaaaagaagacttcaggaggtcaatatcaaaaatcaaaccgaaagtcaaagtcaacttttatgaaaaatttaactttggatcaaaacatgcaaattaaggtaatctacatcaagactacactcaatcaaataatataagtttctttagtcttgttaaagtgattcgcataacacattcgaggtttataacattaaagtttgactcactaacttgtgcaataagttatttttcaaaaatgacatataatttttctaaattatattttaagatttatcatatcttaactaagagaacacaattagaatttttaaaaaaatgataaacgagctaagagttatgtacattttaagatcaaaaaatggccatgtcctctctgcccttaaatcgaaattctgattttcacagtttctaacaaccaattcccaaccaaacttctagttacaggctggatttcttgaaaaatgtgcctaacaactctatacagctagttttcacttggggcctataaataacaattttttctactttcaaatgagttggctgagttagtactgatcatattacatctctaaaagtgatctaaacttactttgcatcattcattcataaacacaccaaccacacaaacttgagccaaacttgttcttatcttctctagtgtgtttgcaattctctctaggatttcacttgtatttcatcttattaaagagtgtttaccttgtatgttaaaagctttatttctatcgtattgaggtgaggttggcaccagtatttaaataacccggttggtggtgaggttcacaccagtattgtaaacagcccagatagaatgaaattgtcactacaataatttaaagaggttgatggtcctttgaaaaactattagctgaggtaattaagttggcatcagtggaaaagcaactcatagtgagattgtcacttcaacaatccggtgagattaatagtcgttggaagaaaactaaaatgggacatgtttgggaaaaaccttggtgaaaattacttgcttgtaaagtttagtcaagcccgctaactagactcgataattgaaatcaaagctaggtccgtagctttgaggaccaaggacgtaggtgacttagttctactgaaccttgtaaaaatcaagagtttgtaatttctatccttaaaatcttcacatttcttgttttctttttgtttatacctatgtttatcaatgtgtttgctttcaatttgaatatttgtataaattgtctttggggtttttaaatttctaaaattagtttaaatttttaattcacctccctcttggaaacctatcttgggataacaattggggtctttttttagggtagatttcacaatctaagagcatggcgtttccaagcaattcacacaatagtatgctagaaggtttaacattagaatggaaaagtaccttcaatctattgattatgatttgtggcatattgtatgttatggttcttacattcttatgcatattatagattgtgtacatttttttatgaaatatgatgcacattatgaaaacgataaaaaaatattatctaaaaatttaagcatgtggattaaatagagatatatttaaaaatattgagcaagtctccttggctcatgatatatgcagaattcttgaagtaactcaccaaggacctagctctatgaaataactaaaactcaacttttagttgctcaatatgaaaacttcaagacgagacaacatgaaactattgctaacatttacactcattttgatacaattaataatggttttaattctcttggcaaggtagttacacaaaaagacatggtgaccaaaattttgagaagtctcctcaaatcttatcatagcaaggtggttgccatttaagaagcgaaggatctctcaacacctgcattgaaattgctcatggattctctcatgaacgaggatattttcatgagttctcatgaagaaggagaagttgataaaaaaaaagatgaatatcatattcaaatccacttcactgaatgatactgaagatagtgaggatgatgatagtgttgacctcaaaaagtggccaaccaacatcgagattgtattaatttaatgtttgccacatgttataaaattagaactcaaaagtaaagaacacaaggatttttataaaagtttgacccccttacttagcgggtcatgacttactccccttttagttgtattgatactgaaagataacactattcagatccctataggtgggatctgatataggtctcttaaggttataaattaggaatcaaagatgacaaatctc

SEQ ID NO: 79113 - DNA, 3252 bp, Cannabis sativa
  modified_base (2953)..(2953): a, c, t, g, unknown or other
tccatatattttgtttcaactttacactccaataaccttgcgaaaaaaacttcacactccaataatgaataagccaccagctataactggtcctcaacctcatcgatcaatcttcccatatctcacgttggatccattcaaacgatcaaacttccaagagccatccaacttggacccattgtccaccacatatatagttccacaatgagaaatattaatagtcactagtggtcgtccaagcattatttaagatgtaatttaatgcaataatttttattgagtattgctaaacaatcacaaagtgctactagtgcctagcactactctttaaaatataatatcgttattgatacaattaaatatcatcgcaaaacaaacaatcacttaatcttcgtgaaatgccaataagcaccaacagtgcaacactacctaagcagtcaaatcgatattgataaaatattaagtctcacaccatttaattttataattattataaaatataactaattatttggaagatcgatctcactcaaaatagtgttgaacaccgccactatctaataacaataatgctctatatggtcctcacaacctacgtaccactatatagcactgccctatccctctccttaaaataatcccaacacatgggctaacatcatcaaaacccaacttccattcacaaaagtcaagttaaacatgcataaggcatatatatgtatttatatatgtatatgctaagctacttcaacccatcatttcttaaacacacaaaagtctaagaaaaaaacaatgagcaagctttgcgtagtaaggttggttttgatggtggtggttgccattggtggagcaacggctgagcaatgcggacgacaagcgggtggcgctatatgcccaaacaggcagtgctgcagccaatacgggtggtgtggcaccaccagcgaatattgtatcactggctgccagagcaattgccaagttacaccagcagcaggaggagaaacagttgtaagagccacataccattactacgacccgcaacagaaaaattgggacttgatggctgctagtgcttattgctccacttgggatgctagcaagccttactcatggcgcagcaaatatggctggactgccttttgtggaccatccggacctagaggccgtgactcttgtggaaagtgtttgagggtatgactatgatccttttggttctttgattttcggtaacttttgtttgaatatggtataaatgtgtgtatttttgcagcttcggaatgtggcaactggagcaaccataacagcaaggattgtggatcagtgcagtaatgggggcttagatttggactttaacactatattcaagccattagatactaatggaagaggagttcaacaaggttctctccaagtgggctacacatatgtcaattgtggtgattaattctgatgttgagcttgatcctcaactctctagctagcatattttcaaagataaataaatctcatgatgaggtgtaataacaatttataccgtaaagaaagactctgcttttttatatctatagctgatatgcttatttaagtttaagcctaagattaagacttaaataaaatcttttgggaagtttgttccgacgcgcttatgaatatccacattccacaccacatgaggcatgaacatgatatttgtacaatgcttatgctacactgttttatcaaatactatttagttataatgggtaatttgaaacctaataaaattctaataacaaatatgtaattagagaattagattcatggttatcatcactgattagttttaagaaaatgtaattctaatatcaagtataactcttaagaaaacaatttaagaaaatattagtgaaaaacaattgatcttactgaatagtctccatatcaccttatatttgtttaggtatgtagcagtaggtcaatcatagcatttagcagccataattgttgatgtaataaagttaattaaatatatagttcctgtttgtttgggggagaaaaaacggtatttttctgaagtctattaaaggaagagaaaatgcccaataaagaaataaaatgaaagcccattgatagaaagagccacattgcaccaccgacaaagcccaagaaagtcggatggaaagagacaaataagacaaaaatataggacacgaatccaatcaaatgtttaacttggacaggactctgactcaaaccattctaagataggctgagaccatgccgagataggacctatcttgataccgactaagacacgcttattttggattcgaccacaaccacatccaattcagacaagctgactaaatcttagaggaattttcttttatttgggatatttacatgatatactaaaatttttaattttttaatttttatactgtaaagcggaatttttttcaaaaatattgtataaattttatactctgtgttaagtttttactgttgttctacggttgttttttagttgtttcattgttgtttttagttgttctattttgtgttccactattgttttataaaaatagtattttcagtatttttgaaaaaaattctgtgtggcagtatttttgtaaaaattaactcaaatttcagtatttttgtaagattccaatttttaatgtcatttacttttttatagcaaaaaaaaataattcaacaaaatatgaaaaaaataaataaagaatggaaaaattatgagaaactaaaaagtatataaataggcttaacttataaaaattcatattttccaaacaaataaaccaaattttcccgatcctctctactattttctcttcgattttctctctcgaaatctcgccatcatatccgacaattaaagtctgcaattcgttctcaaatgctacagtattttcagtatttttgaaaaaatttctgtgtgacagtatttttntaaaaattaactcaaatttcaatatttttgtaagtttcccaatttttattatcatttacttttttacagcaaaaagaaaataataattcaacaaaatatgaaaaaaaaaaaataatgacaaaaatatgagaaactaaaaagtatataaacaggcttaacttaaacaaactcatattttccaaacaaataaaccgaatttccccgatcctgtctactatttttcctccgattttctctctcggaatcgcgccatcatctccgataattaaagtctccaattcgatctcaaacgcaagcat

SEQ ID NO: 79114 - DNA, 4677 bp, Cannabis sativa
  modified_base (26)..(40): a, c, t, g, unknown or other
  modified_base (3178)..(3180): a, c, t, g, unknown or other
tgtgttgacatcactgtaattgtaannnnnnnnnnnnnnnggacttaacagattttgtacatacattaaacctcaaacataaaaacaatatgtaaacataaatgacttctaaccttttattgataacaaatcagattagattttaatgtgttttatttagtgcataaaatcccaacaaattgttatttgcattttgtcatcatgaaacatggattattaatcaagaaaggctaagaagtcatcagctgtcctgcttcctcaattgatgctccaggaagataaaggcaccaacttcgtgggaagggcctctgtaaagaggagttccctgactgctagctacacggagggtatccgtgagcgaaggtctccctcgttccaggtactaaagccatctgctcccgagaatagtatggattttcctagaaaggaccaaggcattctgagacacactaaatcgggctacgcctttagcctacggaagcctcacctaaatgcgtcagactatggacataatgatcgggctttttcgggtacaatggtagaggttgtctccagtgacaggctatcgtacagagcatgtgtatccttgtgtacttgaccaaaataatccaacggctagggataaggaaattcaaaaaggagaagcccttagctgacacgcgtccgaggcccagctcgtacgatctgatacccttaaatgtcatatgggaaaaatgccacctacaaatccaatggtcggattttgccccaacgataatccatctatggaagcacatacaaaggagttggtctataaataccctcgaaaaagcattagagaggaggaccttttttttggggatagaagactcattcttcatcatcccaagaaaacacatttttgtaaccctattatcaactccaaaatattcttactatgctttctcttcttcaagaggaacatggtggaaaggagttttagtccattgtatctctatttgtataaacagttacctgccgatgagcctaataaaatggactcatggactaaggatagttaacgcttgaaccacgtaaaaatctcttatttgttatcttgctatttaacctgcctttaaagaaaaagacaattaaaaattactctagacaattaaaaagtgaaaagaaaaagacatgctatagtctagagcctagaggataaagccatatcaagatagaaataaaaattactctaattttgaatctatccacatttaacaagcctcgaacagtagcgttgaccgacgtgaatagtgtaatttgtagtagtgcaatgaaacgcggaagtacatgccatcttgttgaagctcaacatagatgtactcaaataagtattgtatatcctattgtaaaaattatttatcaatgctcaaaatagcaaggaaacataaggtttctactccaccagcttcgtcgcccttgcacgagaaatgcaattgtgcaagtatccataacaatctctagtttcgttgatagaaagagaatagagaaaataaagggagaaagtcatataaaaagacagactaggaaagttagggaaagaggagatgaagatttagagctctctttttcttatatatatatatagtataggtgggaaactaaaaattataaaatatttcagagccttattctttgccattgctttttttaaagaaaataaataaataaatagttagagttagagttagagttagactcacacccaacgtaaatttttggaaaaaaattatatccataaatttaaaaagtaattatttaattaaattttaaatatatagcacccctctacttttttatgtccaacattgtctgacataatacaaattttttttctagtccattaatattgtatatgaaatcttcttacaaaaattttcatgtccaacactaattttgttgaacataaaagaaaagacatgaaaagggttatttgtagtaatgatccctggtaagataaaaataatacgacaatggatagtgagttatgaagacatcggaaggataaatgtgtgcaggagaagagataattttccaaaaaaatttgtcttcgaagtcaggggacttgttagggagttagatgattatccaacggtcgtgagtgttggtggacaggtaataaaagccatcaaatttcgatttctagatggggcaaccttcaaggtgtaaaattagctaatttgatagggagttaaggtctctcatcccatcatcttctataaagacttcaaggatgccaagatcgtgtctctagttagaattagtttgaacgaagctattcctacaaagtctataaattctttcaagaaatttttgagtggtagcagagccccaaccattatgtactccatgctctaagcaccgactcgagaagagccacttgtattgcactcctataattcatcaaacttagtaggaggtatgtaactcttttcatccgggttggtcgagcgacggtagaaaccatctgtgtactttgtgctgcattccttaaagcatcaaccatgtaatgaaacaaggtgattttaaaaagggaactgatcgacttcaaaaggatacattgggattttgtgaatcttttgatatgagaggtttagaagccatgctttagaattcaaactcaccatgtggaaaagcaactgctacagtggatttattgtaaggcttatttaaagaaaatttggttaaaaatatcagctcaagcaatgttacatcttgtagaaaatacctttaccttaatttacttcatcaattaaacgtctatagtgagtagagatatctactctgccttacctttcatcattttccctaattcgtttgtcattgatttctaacatagttgtaaagactgagagcaacaccaaggagacaccaaatatcatatatgacgtgaatggagggtctaacgaggctgcatttcttgcagcattttgaagttttgtctacagtgcacgacatatatgtcgtgcactgtagacactgcatattttttttttttaatttaattaatttttatatatatttataaaattaagaattgttttttgagaaattttacaatgcacttttttaaaagtgatgcacgaatttattcctatttgtttcggcacatgacagatttttttagtctattttttatatagtcgtgtatattatagtnnnttaagacatcctgcaaaattttgaaaaatttaaaaaaaaaaattaacacgccgaaaataatgcacttctttaaaagtggcgcactgatatactcctacctgtaattagcactcgagagatttatttagtcttttttttatagtcgtgtaaattatagttatttaaggcatcatgcagaatatcgaaaaatttaaaaaaatttaatatgttgaaaataaaattcaaactttctgtcgcgtgactcttttatttagagagatgcattgtaaaagcaccttataatatttatattattgcaatataatattttaatttatcgactttagtcgattttacagcattattatctttaatctaattagtaagtttatttaaattattagttaaatataaaaattgtggtaatttttgttaattaatatgatattaatttttttattttattaaaaatttaatataataataaaaaatattttttagtgtaatttttagtattgtggttggagtgaaaatattttttaatgctagatttggtgatagtgtaacacaaaatttagtgtatcattggagatgctctgagttttgagtaaaagggtaacactgtgcatacgtcaatgggcatgggtccctcccaaattctgggatttttgtttcatgataaaaaacaaacatttctttaaaaatgtttgggaaatttcagctttttctagattttaaaccctaaaaattcaaataccttgaaaagaaataatctacaactatcgtataataagaaataacgattaaatgaaataaaccaaaaaaaaaaatacacagtgaaaaatgagaacttattgttttcaagacaagggatggatttatagtgtgtacttcacttgaaaccaacaatatcagggtctggtatataacaggatgttcatttagaaaaaatagtgatgtggacgatagagtactggaaaaaacagtgagggcatatatgactcacaaggaagagaagaaatagataatctttaagcactctaagagcatctccaaggcaagcaatattgaaagttgtcataaaacttcacattactcaaaaatataatattttattttctctttcctccatatcatttttggtcactttctactaaaaaatactccaatgctaagcaactctagaaattatatctcatacacgtatcattcattttaattataatattctattttattattttcttttgtttaagcaaataacaattatttgaaattaaaaaaaaaaaaaaaaaaggaagagaaaagtcatatcaccattgctcctgtcaagctactgtagttgctaactatttttctccaatgatatagctaaagctaaatgtagcccacctcctgacaagctttgatgagcaacattaatatatagagcattggagctgctctaagcatctccaatggaagtgtaaataagtggtaaaaaactaaaatataactcatttaacaaaaagtgtgctc

SEQ ID NO: 79115 - DNA, 5879 bp, Cannabis sativa
aaaaaaaaaaaaaaagatatcatttcaagttaatctgtcatttttctatcgaaaataaaattaatctgctatttcaaaattcgaacaatacaagtagtaatttaaaggtgtggaaaactagtataatgacatatgagctgaaacttaagtgaagagaaccccatagtccatggtcaaccaattaagattgagacaacagttagaaatatataactttacaaatgaatgaaggcctacttatgttgcgtttgactatgaaacaaggagttgtattgattaagggaataagattgaacagaatacatagtgaaagaaggtaacaatctttcaatgcttccaaacaatatgacattgacataagagaaagaaattctgctcatgaagcttctcctactcctactccctccctttacattttctaggggccccactctaaacacaacaacaccaaagaaagcttgtttctccgttgctttttcagttgttcaagaacaaatgcttcttaacaaaagatacatctataccgaggaagggggagaaaaagaaacgaatgctgaggaggatggtgaagagaaacagagagacggttttttccaactcaaccttatgccttgccattaggttttggtgattggtgtggatactgatgatgaaatggagaagcatgggaaccatgtggaatggagagactcctttgctgatgcccatttcttgacatcaatcctccttgtgttctgacaccatttcttgcgtttgggctggaggcaacacggtctgcattcattgtctgaaaatagtatgaagagcttgccatgtccttcaaatttggtagtggtttcaagacttccacaacttcgctcattaaaggtctggattttggatctcgactaaggcaatgcgaggctaattgtgcagctttttgagcacccttgattgaaaaatggccttcaagtcgagggtctatcaatttgtagaactttcttctctctcctagatgcggccgagcccactccactagattatgttcaccattaggtctgtttttgtccattgatcttctgccagtcaacatttcaagtaacaccacaccaaaactatagacatcactccgtgacgtaagatgtcctgcaatacatctagttcgtcaaacccatagagcagtactagcgtgaaagagactttagagcataaaagtatgcatcaaaatcatggctagattaaatataaagacaaagttaggacagtacaaattttcagattcacttaaacttgatgattcgaggctcaggaacacaattatacaacatcttccaaaagtgaacattagcattaagtcatacactctaggccagtttaactagagacatggagcagcaagaaggcctataactaacacaaaccaatcatgtagcaagaaaaattaagaacacctaatttatttaaaaaaatctaaataacttgttattccttaacatattttatggctacacaacaaaagtaagaaactaaaaagaagagaaaaaggaaaagcctagcaagaatgctagtgttcttttactcattcatctattcacatagaaacacaatccaggactggaccttaaaaggcagaatgactttttctacacttaccggtcattacatattctggagctgcataaccataagttcccatcacacgggttgacacatgggttttatcaccttcgggaccatctttggcaagtccaaaatcagaaagtttagcattgtaatcctgaaatatcacttgttagagagatgaacaatacaatagagaatccctagttttatcagagtcagagaagatgtaacttactgcatccaataagatatttgaagttttaaaatcacgatatataacaggcctttctgcttcctcgtgaagaaaggcaagacccttcgcagcacctaaagcaattttcatcctgatagaccatggaagaggcaaagaccctgcacataacatattttgagcaaagaagattaggaaacaatacaatctacaatagttctgacattttagggcagttttcatgtcagaaaagcttgtgattgtaaattttctataaatatgccagctcagaaacactacacaattctttttcattccacaatatatgttgatatttacttctgtcaaaaccttgccatagtccaaaaaggcaaccaaacaaggatttgaaaggaactattgaaatctttttagtatcatatgtcacaaaatcctgaaaaacttgaaacaaattttaaagaagaatcatactcctaaagaggtggttctccaagcttccacggggcataaactcatagactagcagcctttgatcatcttcaatacagtatcctataagtttaactaagttaggatgaacaaggtcaccaaggaaattcacttcagcctgtcacatttaacgaataaaaaaattaaaatccaaagcaaatgaaattttaaaaaatagaaaacaaaacaataacaaataataatttaaatgctgaaaaaacctaacaggaaatgatacagacaagcaaagatcattaccagccattctttatgtccctgaagtccatcatggttgagagttttcacagcaacagtaagccctgttcctggttttactggagcagttccattttcttcaatccaccctttgaacacacaaccaaaaccaccttcaccaagaagactttcaggtctaaagtttcgagttgccatcttaagatcattaaatgtaaattttcgcagccgagaagcaactttaagttcctcttcaagttttgaagtagaagaattactctcagcattactagtggtagtagatgagacaactgcagctgtgggatggtctctgcttgtttcatttgttgatttagattctgaaaattcaaacaaagaacaaagattataaataaatgtgtcagtatgagcctctaagtacactttagctttaagcaaacaaggatatctgagtagacaaaatcattctagataaatatacttatgaccctgaactgattagttgaagagatacttgccatcatctaagcgtatatcacgactacaagagaaatcatatacagcaatattacgtaaaggagaaaaaataactacatcccatagtacaatgggcatctaatggaaattagtgaactctttactatagctgaaacaaaaacatatccataggcatttgttttgcaaaagatagaacagtccacatttatattaaacttttaaccaacacccaatttcagagcctctataagattgagatggacctaacacatccactgttatatgcctaaaaatgagcaccaacgaccaacttgtaaacagtttaaaaaccatcagtttagataaagaacgcccaaaacaaggaagtaaatttcaattgacgttcctaaatatcaagtctataaattcaccacttcgcgtcagctagttcaattagtttcccaatactgctcacaaatatacaacagaacaaatagatcaaactttaagttgaactcccaaactggtgtgtatacattctttttctttcaaaacaataaaattggtaacttatatacatgattacacagtcaacaattatgcgtgaagttgtgtattcatattttgttgcaagtgatgtttataaacatagtaagcatgctgcagaagaaatgggttgcacttaacaagtcaaatctcaaatatatgagacattaacaggaaaataaaagttcaaaatgatacgaggacgtattaggtgaaaaactgtccgtaactctatatttaaaaatgaaattttattaattcacacatgatcaccctacactgaaaatattattccacgagaaatgtgcattggaacttggaagaatccagctttgatggttcaactttcagaaaacaaatttaatcagaataatctcctcaagaccttagagggtctaaatttatgattttcttcccttctgctataaaagatcaataaaaactgacccttaaagctttccgtaaatataatttgcagggaactggagcttccgtataaattcatcacaagtggagcttccttaatcaaccatagttatcaagacaaacacaaaaaaattcataaccaaatttacttctcaaccataatcacaggtctcgaaacatgcactaactatacaagaaaagaactttaacacagcaaccccatataagaaagaagaaaaaaaaatctgtacagagagcaaataaaaatttaccatagtgagtgcttgttccactaattgagctatcaactttggatcttgaagaaatgcagctaccaataaacctcagcctaacccagcacccagtttcctcctcttcatcagcatcatcaacttttttcttcttcctcacctttgatttatacacatcccaagactccaccttaccattctcagcaccaatacccatctcagaaaaaccctaataattaaacccagagaccatcaaacgtctcacaaaatcccagataccaacttcccacctgaactagtcaaggcaactataaacaccccagatgcaaaagtaactatatgactcagaaattcaaagactttctttcaaaaagatcagcttcaaagaagtagaaacccaaaaaagtaaaactcagttcagagaactagatcacgcaaagtagatcacacctgaacccctatcccctagaaaaatcaatctgaaaattgaaagcccaaaaaaggaagaagcgtggatttacaaatgcaccaaaatttcagttggagccagaaatgtctgtccagagatacagaaaatctcagaaatggactcttcacaagctgaccagtttaaagataggtaaacgataataataataattataataacaataatttctcgaaaataataataataataataatttggagagagaaggggaaaaaaattatatatccaaaaaaatccgaatcatcagttttctctcattgttttttattttttattttttaaaaaacaatggaatcgaagactacggaaaagcaaatcgaactgcccgaagaaaacgggcaggaaggaatgaggtgcccgggatgcccgaaagggttgtgggtgggttatataggcttttaggctaaaaaggggttttgagtgggtctgtgaggtgaggactgaggcccgaccgaggaggcgggcaactcgggcagcaatagaagtgggaaatttgagggcccttcgggcaggagagagaaataagggcgggacccactttaatggtgacgtgtgttggtccggtaggcggaagaaaacgcgcgcctcagattcatattatcttttccttccttatcattttcctcaaacattcattcatctaattattaattaattgatatagtatttttttttcgaaagggaataagatatagtattcaagaacaagtattaatattttcttttacaaatagtttttttaggttcccttaataattatacttcacttttaatcaaaagaaaggaaaaacacattttgttatggttcacgtttggctttggatatctacttaaaatgagtatgatcaatatgattgtaattaataattcggaggaatctgaggttatcttaagttttctgacttcgtggttcagagaataattgtcaatgttcatcgtcttattattttattaagggaataaaaaaactgtatatatatatattaagaatagggtaatatattagagtaaggcttactcatctaatagaattggacaaattatgattcattggagaaatgttaaatgtaatatttttatttaagctaattagtaatttttttctctaaattttgacatataccaaattatatccctgaactattgagattgt

SEQ ID NO: 79116 - DNA, 3619 bp, Cannabis sativa
aattttgccaaaaccttacatagtttaggacctgccacacaaataagcctattattagagatgatctaactaataatttcttttcatgcctaaattaaaagaccacccttgctatttaagagttttgttataaatatttatgtgaatttaattataacccgacaatgaattaataaacaaaggttttttttggtaaagttaatttctccatttatgtcctttttctagttgaatttctgtcattttctaatataattctgtttagaaagaaactatacaatgtattacttctcccacctaaattttgtaataaatagcatttaatttttataatttttagtgaatagcatttaattagttgagtagttgagtatgaaaggaccaaaataccctgagaagacgaaaccacaaaactaaaggagtactcagtacttgattaaaaccgtaagccgaggtcaaagagagacaaaagaacactgtcccacgttgttgtgttgttttctctctcttattgagtttgaagacgttgaagtttcaaactttgtagtattattatctaattcggtcaccggtaaaccgcttctcctcgccggaaaccactcccactccgtcgcctcagcggtctctcgccgatcgctttataatgagcactggcgagcttctcagtatcgaaccccaagagctccaattcccttgtaagtcctctcagattcactttttcaatttttcaaacgggaaagaaaatgaagtaaataaatcagaaaaatcattctttgtttttggatccatatttctgtttgtttatagcgtttctgattattttcttttggggtggaaaaatagttgaattgaggaagcagatctcttgctctttgcaactcctaaataagaccgataattatgtggctttcaaggtatttgattataatttcaccttttttttgaaacttttatgtgggttatggtgggtttattgatttatgtgacccacaaagttttttaaacttaatttggtggttttttaaggttaagaccacaaatccgaaaaagtattgtgttagacccaatactggagttgttatgccaaggtctacatgcgatgttatcggtaaagacttggtttttcataataattattattatttttctctagaataatcatgttttgcttgtttcttttttctttttcaaaaaagtgttaacatttttttaaattctcaaatgggtttttagtaacaatgcaagcacagaaggaaatgcccctagatatgcaatgcaaggacaagttcttgcttcagagcgttgtagctagcccaggggcttctgccaaagatgttactccggagatggtatttatattaagtattctttgaaatttaacaagtttattatgttagcaaagtgatataagtaatgccaatgcgttttgcttatactttttgttttgtttttcctttttcagttcaataaggaatctgggcatcaagtagaagagtgtaaattaagagttgtctatgtggctccccctcggccgccttctccagtacgagaaggatctgaggaaggttcttccccacgggcatcaatatcagacaacgggcatcctaatgcgtctgaactaagtgttaccgtgagtattttgtggttaacaaatcgttttctatctatgttctttatgcagatagatcagtcttcaaagtgattgatggcattctgtatttgtgatttgtaggcttcaagaggttctgttgagcggcatggacgagttgagactcatggtgtgtcgtcatccgaggtatttttctatttcaaatttgtgttttttctaattaaaatgatagttgtgtattttagtccattagtgaaaacattggcatggtgaacaaatacatattaggtagtggtgatagttgtttggacatgattcatgttgtatttgcttaaaaatttaaagtcaaagttttaaatggcgttttctttataattctgctttaaaatctttgttttgtgagtacacatgattaagatttgtttcctcggatatgaaactccattttacttgggggtgccttgtcaaaactcttttcacacttctaatcaaggcctctctctctctcaattgaatattccgataaacatggatatcacatcttctgtcacaactcatatgtaactataggaaaaagacaagttatgccatttcactgttatctgtttttatgatattttgtgtgcattaatgttcacttgttgacaagaacgactgccttcaactgtttcacttgtgacacattttggattttgtttgctgttaaaaaaagaaagtactgtgggattgtctttctttattaactgatgaacttggtgcatttttcttatagcattgaatctctttgaacaaagtgagtaatatctgtactttcaggctagggctattattacaaagttgaccgaggagaaaaattctgtacttcagcaaaacagcaagcttcaacaggaactggtaagggtctttgttcagctatgcattatatttttacatgcatcaaatcatatcctcatccttacgatcactgttcctttcaatcctcaccatactgattctactggtaaaaaaagaaagaaaacaaactgctgctttgagcttgattaccttaagtttttatcaaaatcataagtgttttgagggtttaactcataaaaaaatgtttgaggattcatagcgacctctttctggacttacgttgagatactatcgttttgcaggagcttttgaagcagaacacgagcagaagtcggggtggcctttcccttgtgtatgttatcatcattggtttgcttggcattcttttggggtaccttttcaagaggacatgacccttggagttgcttaacattctgtagggttggtgatttcctgtatgggaaaatgatgtgtaaaaaaaccagaagaaaacgaatgtgtgattggttaggagagaattgtttcagtatctcattagacagcttctgaatgtgtgacccctttcttggcgtattttattagtgttagtaggcatgttgactttctaactatttacttaaaatggtattttaatattgcttaactaaactaatagttcaagtgcttagcgccacattcttgaacattttgaaattcaattaaggtcatttttgtgtgtggatgtctcgtatggcttatatggtcattcttagaatagtgtaacttgatgtagatccctttagctaactttcacttttgaaagataattacgaaagggcattgctgtctaatattatcataccttcatagcaaagtgttataccaccaatcacttgtaaggtttcaccgtctttatgttggttggttggttctggtgtctgttacatgatagcaaaatttgaaatttgaagatgtttacagtttagattatacattatggatttttcctttcaagggggcaaaggcaaataattgtccgttgttaatgttacatacatacaactagaaaatacaagtaaatattgggcatcagggatcttgagactctttaatcatgtgacaacgtgcagcaatcatccgaaaatcatccagacttagctgcaatagaccacaaaa

SEQ ID NO: 79117 - DNA, 2827 bp, Cannabis sativa
ttacaccttagataagtattatgttctttctaagacattggcaaagtatgctagtaccagatgtatggattatacattggactgggacaaatattgatcttggtaaatgtattataatcttaccgttgcatctttctaagtcaatatcactggccagggggtagaggaacgactgtccaagtatgattcttctcaagtccatcaaattcatagtccataacattgtcccatttaaggatgctatgggcttgactgaaaaattctagttcatgatgactagagattgacaagataatagcctcgaaatgaggtgccaatttgctataactaagtacatgtgagatggggtgaggagtaacagaagtcaattcttgaggcaaaatagaagtagagttagtggacaaaaaatagcaataatcttgtaaataagatgacttgttagaagttctaagacgcctagtgtgagtagatgaagcagaaagagaagaatcactaggagattccatagaagtaaagtactagattcagatacaaggaaaaaattgatgttaaagaggaatagatttagtattataagaaaggaaaaaatagtttcatggagttgaacatccctataatagaaaacttttttggaattcagatcaagaagtgtgtatttttccattctagtaggggaatgcaggaaaatgcaaggagcaactctagggaaaattttgattctggaagcagtcaatgtagaagcataagctaggcaccccaaagctcttagatggtcataagattgaggtttggactggaaaacctcaaagggagacacattttgtaagttgggtgtgggtgttctattgattaggtaggtttcagtagctacatattcatcccagtactgtagtggtatataacattgataccgcaatgccctagcaacatttaagaggtgttggtatttcctgtccacaaaaacagtttgttgtgtcctatggacattagaattataacgaaaaatccctagggagctaaaaagataaaaaattgtaacttctaagcattctcaactttgcacctttaacatatttttgatacttggttctaaccagttgtatgaaattaggtatagtagtttgtacgattgagttggttttgacaaaattaacccatgtatatctagaatgatcatcaacaatggtaataaaatatgtgtgtctctcaatggctaaagtgttgtagggtctccaaatatccacatgatttaaatcaaaataagttgctgaaaaattgttattgaaaagaaaatgtaactttttgtattttgcataatgactaatagagcaatgaaaattcagacaaagagcattctaaaagaaaattctttatttaatgaatgtctcttgatacaagagggatgacctaatctataaggcgatatagtatcaataaaaaatttagaatttgatagtaaagaaaaaacaaaaggattggtctttctatcaagaatttttaagtaaaagagtctcccttgcctctcatacaaatctactaggtcttcaacgtgtcctgaatcacacaatcattagaatgaaaagttaataaataagtaccagtttcaagcaatgacgtaactgaaagaattacactaaaaatttggtacatatagcacattagtaagactgagtgtaggtgagagaacaatagttcaaggatatgagaatttagaaaattctccattaggtaaattcacaggagtaatagataaatttttgtgaatattttgaagcaaagataaattgcgacatacatggtgagtagcactatgtttataattaagtttgaagagacattagaaagaattttactacaaaattgagataccaatggttgaccaaatggcatagggttggatgtgtcttggcctctctgagacaacatagtcattaatttttggcttagtgcaagtgttgacatgagatctagctcaacattctgattgtttataggtgcaccatcattatctttggccctagaaaaatttgtagcaggtggcttaacaattccaacaacatttctacttgcaaactttccatacaacttgtaccgtagtagataatcatgtagccgataactttgacatggtgtgaacagtagttccactggtgataagtgattttaggcctatgtggttaaacccttctagcgaattcgcctaaagatgatgctacaaatttattagattttgttgaaatagaagtaatttctctctgtctttctttttggataactaaagcaaaggccttaatgatgttggaaaaatgatcttgcatcaaaatttgagatctagtattgatgtaagactcatttagaccaatcaaaaattcaagaatatgatcttcctccaggtattcctaaatgatcttcatagcacctcaactacaaacaagttgtggtctaaattcatgaatttgatcccaaaaagatttcaaagagtaaataattagtggcaaaataaaaaccttggtttaaagcctgcatagacctttttgcttcaagcaccccaggagcatttttttgatggaatctttcttgaagttctaaccaactctttaccatattgtctagatacattatgttatttgccattttagttgacacaacatgaaattaccagattgttgcatctatatgacatatcgtaatcttcatgatcaacatcatcaagttcatgcaaccttcaatcccgtgaatttaatcttatttctagcagtgaagaccacaatcattgaacatctcaaatccctatagttttcataataagttaaaatcttgggaactg

SEQ ID NO: 79118 - DNA, 3964 bp, Cannabis sativa
acaacaagtattgtgacaaaaaatacatttagtcacaacaagctgtaatttttgtgactaatacctttagccacggactttttagtcacaatataggaattaataaataatcacaatttttttacttttagtcacaaattttattgtgactgaatgtaagttttttgtagtgactataagtgtcactctatgtaataagattgtgatttgagtgtagaacaaaattagtcttaaacaagtacaatttctcaactacaggtgcaattaaatggacacaggaaacaaaagagattattctctttaacaaaccatatatatgcaagatattttgacccaaataagaaaattaaattcaaaacagttgtaggttgttgactgttgactgtgtaaatataaatacatttattcacttcacaccagaataatacaatcaatcattacatcaacaaatatatatataggtattattcaaaaaaatatatataggtaaatttataataatagatgaacatgaaggtagcatatgaatgacaaccagtttattagaggagtaatgtgattagtcaataattccaaaaattgaagacaaacccagtactgtgctaattaaaaagaaacagtcagccttatttattttttttattacaaatatatacagatctgtctaaagtattattgatattattattttgggatataataagtaagctaactcgtatatagtttccactacacagaccaagcagaatgtcaaacccaaaaagttaaattattatatatgctattatgctttaatgcttaatcataacctcattattatgagaagtccttaattgatttgtccccatacacattaaattatatattattaaataaaggagagaggactttttcatgtgacctttaagtgggaaaaggggtcatgtagaaaataaaagaataaataattataatatttgttaggtttgtcccttatcttggcgaggcttatgcataattataatcaggaaggatgcgtagcattcgcggctggctgtactattatctccgtagtgatagtagtattagtagtggtagtgttggtattcttcaaaaagcggtggggacaaaaaatgaaaaatatatatccacatacatatatatatatatacatataatatataaagatatgtatgtatattgcaccaactttgctgtcccaccaccctaacatgttaacatgtgatgtttattattgaacaaaagtcctcactggcttctactttcttttcttaactaattaagaacacatatgtctatacagtaatatatgtatacagtatacatgataatgaattgttagcaagtacccatatgataagaatatatccaggactaattgttggtaaaaataatgtatatatataactaattaattatatacatgcatgcatatgggctaccagtgtttatgtacgtataatatggacataatgcatatgttatatgggtaactttaattcgcaacgtaaactttgccttagcttattaatatcaattgggatcattcatcatgcaaaacggatgatcaaaatataaaatcttgcaataatagcacaagtacattccaatgaagtgttcttctatttgtaattttttttgtaagatgtattatttgtaaaaacttaactatgcatgccttatatttattcagaggagagaaagaaaaagaaaaacaaaaagaaagaaagaaagaagatgaggtaaaagatataatttgtcacctttttacaaactggcactactacaaaaaccatcttcagcgacagttttttaagcctttcagcgtcgattttgacgaaatttgctatcgatgctgatcaggacaacgttgtagggttgaatacaacggacaccattgggtaccctatggtgtcagttattagataggaactgacgccatagggggatatatggcgtcgattcctagctaaagctgacgctatatatggcgtaggaatcgactccatatatacccgaattttagtttttttaatttaatttaatttatttaaattatatatttattaatttatatattattttatataatttaaatttaaatgagatatttatttttttaaaaggtaaataaaatattatttaaattaattttaggattggccaaaatatctaatttcatttcatagatgtaattaaatattacacaaatattgtaaaattagtcaaagtattaacaagttaataaatctgactacaagttaacctaaaaaaaaaataacctagggaagaaaaatgcttgggcctttcagcatcaattgttaaagccatcatgaatcactgccatcaacatttttattcactgtcgctgtattggtaacaattcagttttttgattgtattgacgcttatctccaaactgttaaaaaaagtaaaaatttatattagtttgtatatatattatttgttattataataaatactatagtcaataattaaaacttactgctctttgatcttgtacgtaacagttggggtttgcatgacgatgttagtcatgtattacaaaacataaaaactacatttttggttttcaggttcactactacaaaaagggtttttcccgacagttttaaacagtcgggtaaagtattcccgtcgatttctataatcgttgcctattcgaccgtcgtaaaatgggaaaaattggcgacagtttgaaaccgtcgctattttgtcattcgtgacggtttaaaccggtcttataaccttgtataggcgacgattttaaaccgtcacctataatgtaataacctatttttttattattttaaaattttgataatcctaaatttttattatatattcgtttatatcataatcataatcattaatcacatcaatcatgaataaataaaaattattaataaaacaaatataattattaataaataaataaaaatttgtaatatatagtgtacttatacttaacttattatcaaaaatataacaataaataatataaacaatttttttattacatacaacaaataatctaagaatctctttaattatagctagctagacaccaaaacaataagaaatacccaaactaaaagtaatgagtaaaatgacatctcgacaaattcttccttcggtaataagttctttggagtattaacttatttcttcaaacttattaagttttcctacaaacaaaaaatcaaacccaaattatcaataataagacatacctatataattataaaagataaagtttgagccaatcataaagaatataatattgtgccactatcattcaaattccaataacaaaaaacagaatcactcactacaaattgatgtatacatatatatagggataaatattaattaaatctcacaaatttttttaacaaaacatttagaatggtaaaaaaaattaaagagatctataatttggtaatacaagcttagtgtttatattttgagtgtatttttcctaagaaaagtaaatatgcttaaataatatattgagaacttaaataactatctcaaaataaagaaaatttcaatctttctatctaagacaatatgtatataccattgtacaatatattgtatcttatcgacaacttatactaaccaaaagaacattttgaatatcaacatatatattatttttcttaaaatttgtataattagttaaaaaactttggccaagatgttagaatctaaaatttcttaaaattcacactttatggcacttaactcaacatgttagaatctaaaaatgtgatcatacagttgcatacaattaagaagttctcacaagtcacgtgggaactgttgggattttatgccctaaataaaacccattacaatctaatctgatttgttatcaataaaaggttagaagtcatttatttacatgttgttttcatgtttgtggtttaatatatgt

SEQ ID NO: 79119 - DNA, 790 bp, Cannabis sativa
aaaattaacaagaaatttggaaaataaatgtgaaattttcatattttatttagtgaataataatgtaagatgaagtatcgaatgattttcattagaatttatatgtctatattcataataattatagaagatttaaacattttcttccgtgaagtataatttttcctctttaatgctgtcaataacttatgctctttggctgactttttgtgtgtagggtcgggatgtttacattctggttagtttctgaactggaagttagttgtgttgatttcaaatattaattacaatacaaaaatattacatttcttagctgattaattggtaggtttttaatgtaaaacttttctttttcttttttcatttagggtgccgctaatgttgggaaatcagcatttatcactgctttgctgagtaagtcagtttaagaaactagcattggtttaaatgaagctactacattgattgaagtttgttaatgagtttgtaaataaaatctcaatgaaagagcataaatgtgttatttaataatcgtcaacttcacttgttcctctatttttaagtgagatgataattggaggctgtttttaaaccccttactatagaagttgttgcattgatgtttgtttgatcattagggtgattctttacccaatgtcttcagtgttgggggcagggccagacggccaaaactataaataatgatatggctgtaaggctgtgattgagtttttatttaaatgttttgtaagtgaggatctatcctggttctaggtctttggtatgtcat

SEQ ID NO: 79120 - DNA, 8146 bp, Cannabis sativa
attcagccaattgttgtggcagaactcatggaaccaattgaaaagtcggatgtggatggttcgatgacgatgtttgttcaaggatttataacgaagattatgcaggacattgatggagttttgaaccctgtcacgcctagtacacttggtgggcacgacggtgctttcgaaacgacgacggtggagacgacgaacccaacagatttgttagattcaacggataaggatatgttggatgccaagtattgggaaattagtatgtataagactgctttggaaggtaggaagggggaattggcagacggggagggtgagagagacgatgatttggaagttcagattgggaacaagttgcggcgagatgcatttctggtgttccgagctctctgtaaactttccatgaagacgcctcctaaggaggcattggcggatcctcagttgatgaagggaaagatcgtcgccttggagttgttaaagattttgctagagaatgcaggggctgtgtttcggaccagtgagaggtatgtttgaatttgttaatgctgccatgagtactcttaatttcgcctgttgtattcgatttatcatcattattacttatcagcttttctagtttttgttgtttgtgaagtctgctacatgtacttattagtttctgcaatacgaggtatcgtatttgttaatgcgggtgagacgatgatgaagaaatgcagttacgtctgtagagtgtagagtcttcaagagttttcaatttcgttttttacggttaaaaacgtatgtagtgctcaaaatctatatcggaggttgaatgtgtatatgaacgaactatgtttgttagtgtcctgtcgttgattttttgcatatctattgctggaatttggaaatgtttgttcttaggatgttaatgttttatgttagtttaacttttgatcaggaggggaaaaccttttctatgatttttgaacttcagctccttagattttggaagaaacgccaattttttttaattattattttaaatgtcctagactaataactcttcagaaagagctctcctagactcctagctcttaagaaagcactttcccccccctttcccaagtatggttttgaattgctcctttaatgagtaaagtactccctaatgctctggaacatatgtcactttttgatagtggtttatctttcctgaagcctgcccgttaacatattctgtttattatgatgtgaaacaggtttttaggtgcaattaagcaatacttgtgtctctcactgttgaagaacagcgcttcaactcttatgatagtttttcagttatcatgctctatctttatcagtcttgtgtcaagatttagagctggattgaaagccgaaattggagtgttcttccctatgattgttctcagagttctggaaaatgttgcacaacctaattttcagcagaagatgatagtgctccgatttcttgagaagctctgttttgattcacaaattttggtagacatatttatcaattatgattgtgatgtcaattcatcgaacatatttgagaggtatgttatgtcatgcttgttatatcacatggtctttgacatacaatgattcaaagtctggctatcttgcagttgtaacaataccaaatttgatctccctttgttattttctgttccattgctttgtgatgtacttgctggaatattatctaattttaagtacctgtttttgttgtttgaatcttgccaggatggttaatggacttcttaaaactgcacaaggtgtccctcctggtggagtcaccacgttattgcctcctcaggatgcaactatgaagcttgaagccatgaagtgcttggtagctgttttgaagtctatgggagattggatgaacaaacagttgcgtattccagatcctcattctaccaagaaaattgagtacgctgaaaatagtactgaactggggagtcctccccttgcgaatggaaatggtgacgagcccgttgaaggatcagattctcattctgaagcatccagtgagacctctgatgctttgacaattgagcaacgtcgggcatacaagctggaacttcaggtaagcatacttatattgtagagaattcattcttttttattttattgtttggttattgtgccaggaaccttatgtaagtcttgtggcaggaaggtatatctctttttaaccggaaacctaagaaagggattgagttccttattaatgcaaataaggtggggaattcaccagaggagattgcagcttttcttaaaaatgcttctgatttgaacaagactttgattggtgactaccttggtgaaagagaagagttgtcgttaaaagtgatgcatgcgtatgtggattcctttgattttcaaggaatggagtttgatgaggcaatcaggacctttcttcaaggctttaggctgcctggtgaggcacagaagattgatcgtatcatggaaaagtttgctgagcggtattgtaagtgtaatccaaaggtttttacaagtgctgacacggcctatgtccttgcttactctgtaataatgctcaacacagatgctcataatcctatggtaaagaacaaggtgagttcacaagtaccattttcattaatcagatatcaagacagaatgctaacacttctgatattgtttatttatgtttttctttatgtgtgactataacaatacagatgtcagcagatgattttataagaaacaatcgtggcattgatgatgggaaggatttacctgaggagtacctgaggtcattatttgatagaatttcaagaaatgagataaaaatgaaaggagatgatttggctccccaacagatacaatcagttaatccaaatagacttttgggattggattctattttgaatattgtgatccgtaagcgggatgacaagcatatggagacaagtgatgatctctacaggcacatgcaagagcaattcaaagaaaaggcacgcaaatctgagtaagaatttaactgatttagcttattatctttgtttttctttttttttttgcaagctaaagcaggtgcaaataaagcaatattttaatggcatttaattttatatttatggaattgcaggtcagtttattatgctgcaacagacgtggtgattctgagattcatgactgaggtctgctgggctcctatgcttgctgccttcagtgttccacttgaccaaagtgatgatgaagtaataatagctctatgtctagaaggctttcgttatgctattcatgtaaccgctgttatgtccatgaagacccatagagatgccttcgtcacatctctagcgaagtttacttctctccactcccctgcggatatcaagcagaaaaacattgatgcaattaaggtcagtatttcctatgtagaagctgtcacaggatgcaactaaacattatgtcattaatttactactggatttttaatcaacttaaaaatttaatttcataaatctaacgaattttgttattttgttcttagtcaatagtgacaatagcagatgaggatgggaactacttacaggaagcttgggagcatattttgacttgtgtctccaggtttgaacatctacatctattgggagaaggtgctcctccagatgccacgttttttgcatttcaacagaatgagtcagataaatcaaaacaaactaagtcaaccatccttcctgttttaaagaaaaaggggcctgggcggatgcagtatgcagctgctactgtgatgagaggttcttatgatagtgctggcattggcagcaatgcttctgtcacttctgaacagatgacgagtttagtttctaacttgaacatgttggaacaagttggaagctctgaaatgaatcggatttacacacggagtcaaaagttgaacagtgaggcgattgttgactttgtcaaagctctctgcaaggtctccatggaagagttgcggtctgcttccgatcctcgggtttttagccttacaaagattgtcgagattgcgtatgtaacatctacttgagcttactttgcatactttcagtttatttgtaatgtatgcagcttttgttaacaaagtatactttgacttgatctttttcttatcccaggcactataatatgaaccgtatcaggcttgtgtggtctagtatctggcatgtgctctctgatttctttgtaacgattgggtgctctgaaaacctttctattgcaatctttgcaatggattcattgcgccagctatcaatgaaattcttagatagagaagagttggccaattataatttccagaatgaattcatgaagccttttgtaattgtaatgcgcaaaagtagtgcggttgagataagagaattaatcatcagatgtgtttcacaaatggttctgtctcgtgtcaataatgtcaaatctggatggaagagcatgtttatggtaatgaaactgtaaatttgtttgctctcatatatctctgctatatggttccttaattatatccgtatatatatttatatacagttcgcaggctgttaatactttttatcattattaactgcaggtattcacaactgctgcttatgatgatcacaaaaacattgtactcttagcctttgaaataactgagaaaattatcagagattacttcccatatattactgagactgaaacaaccacctttacagattgtgtgaattgtctcgttgcattcacaaatagtagatttaacaaagacattagcctcaatgctatttcttttcttcagttctgtgcaacaaaactggctcagggagatcttgggtcttgtgcaaggaacaatgtcaaagatggctctttactaaattctccacattcacctcaagctggtaaagatggaaaagaagataacagggaaataaatgataaggatgacaatctctatttctggtttcctttattggctggtaagagttctcattatattggtagcatcagtatttgcttttgctatatatgttcagtgtcgttgtttaccttgtttgaattccttgcaggtttgtcagaacttagttttgaccctaggcccgaaatcagaaagagtgccttgcaagtgctttttgaaactttacgcaatcacggtcacctgttctccctaccattgtgggaacgtgtgttcgaatctgttcttttcccaatatttgactatgttcggcatgctattgatccttctggtgagaactcaccagatggagaggatggtgatactggtgagcttgatcaagatgcctggctctacgagacatgcacattggctctccaattggtggtagatctttttgtgaaattttatagcacggtcaatccacttctgaagaaagttttgacgcttttagtaagctttattaagcgtcctcaccaaagccttgctggtattggcattgctgcctttgttcggttgatgagcaatgcgggtgttctattttctgatgagaagtggctagaagttgttttatcattgaaagatgctgcaaattcaacactacctgatttctctttcataagtggtgaggatgccattgttagaaacatcgaagtatcttccagcagggagaataatggagaggctgctgtgtctggtattcctgacgaagattcagagagatctaggacccaacatctttatgcttgtatatctgacgttaagtgcagggctgctgttcagcttttattgattcaggtagagtttgcttcctgttcttcaaatgcatttcataattaaaatttgttataacattgacttcatcaggattttaatgctctgatggattagatcttggtggatttctgtgtaggctatgttatgtattgttgacatcctgatcattggctttttttgctgttaaatcttgcaggcggtaatggagatttataacatgtatcgatctcacttctcagcaaaaaacatcttagttctctttagtgcattgcaagatgtagcatcacatgctcacaagataaacagcaacaccacactgcgttcaaagctacaagagtttggctccatgacccaaatgcaagaccctccacttttacggctagaaaatgagtcttatcagatgtgcctcacattgctacaaaatctcattgaggacaaatctccaagttatgaggagtctgaggtagagtcccaccttgttggtctctgccaggaggttttacagttctacatcgaaagctcacagtttggtcagatatcagaatcatctgctagtggccagccccattggaagattccgttaggttctgggagacgcagagaattggcagcacgagcgcctcttatagtggcaactcttcatgcaatatgtggtttgggagagacttcatttgaaaacaacttggctcatttctttccgctactttcaaacttaataagctgcgaacatggatcaaatgaggtgcaagctgccctcagcgacatgctcagttcatcagtgggtcctattttgcttcggtcatgttgattttggtgaggttggatcgacccaaatgttgaggtgtatgatatttttttcctgccatctaaacttaccccattgtctttctcatgctttacaataattatgatcggaaatatagtcttaaatagtgcttgaagagttagggatggatttgattgcaagctagtggttctaaaccttcattcaatagttttattcaggagtatagctccatttagcattcatagatgtcttcaggagttctctgttgtatggtagtctattttcatatttcctattttttttttcacatatatatatttttcttcaagagcgagcatacaagtttttttttttttttactgtacaacatttccttattcaacatcctttttttttgggtcatttctaaatgatcctttctgtatgaactgtgagtgaatgctcataaaactgtaagcaaagagttaatttccttccccaaaaaggcttgtcaaaaagaaaaaataatcatgagaagaatatctttagcaatgatgcttttgtctcttaacaaatatagtatttgtggtccacattcacatctcacttatttttcacaataattgataaattgaagaaggagccgtctgtagatctatcaaaacccacttcgagataggcagaagcaaacaagtgagtcagttactccttctgtccttgagctgcggagtccacaagagttacaattatacaaacataattagtaaaggggcttgtgaatgaaaacgatacatgccggcactgttcttatcagttatcatattttagctggcgtccacccatcaagactctatcaaaacacactaattgtggactcagttctttgcttctagacaaccccttctctctcttaccctttccttatttccaagcaaggagtaaactacggctcaaaccatgagtatataaaactacggattgttgacaattacattctcgtagatagtcatgcattgagatatatacgagatttctttatatcactttcagaaaaacaaattttctttccaattttcatttccagttttccaccactactttttcttccatcttttttctatgttggtcttctttgtagctctccaaaagagggcaaaaaccctttttcagcagcttagagcagtggggttgatccgtggacgtaagaagactaagcggaacaggaaactttggcctagtcttgatgcatcagccacagaagccatggaagtctccagccagtttaagcgagttttcgaggtcatagacgaaaacggtgacggaaaaatatccccatcagagctcagtgaagtgctgttatgtctcggctacaataaatctattgccaccaaggaggccgaaggaatggtcagagaaatggactgtaatggagatgggtttgtagacttggatgagttcttggacgttatgatcaattgcaatcataatagtaataatagaactactgataataattctgatgaaaagcaggataatgatgatgatggtgaggaccatgatcacctcttggatgctttccttgtttttgatacagacaagaacggtaagatttcagccaaggagttaagacgggttctggtcaggcttggatgtgataaatgtagtcttgg

SEQ ID NO: 79121 - DNA, 8053 bp, Cannabis sativa
tgcctacataaattattctactggtaggtggaaaattcaatgttctaactatcaatttctctttaatgtgtttttgtttgattgatgtatataaatatttatgtattatgtcaatacacttctaattataggtggtcttattgtatgcttaggttttgatgcctaatagagtgtatcttctacgaggaaaccacgagaccaaatttagtacatcaatatacggtttcgagcaagaggtgaaaaccaaatttggtgaccaaggtgaaatggtctacaagaattgtgtggaatgctttaaagatcttcctttggcctcaattatagcaggttgtgtgtacaccactcatggaggtcttttccgaagcacacatactggaccttttcggaggactaagagaaagagggcacacaatgtggagctaggttcattagaagacttgtctaaggtgaatcgtcttcttatagatgctccagatggaggtccaaatgtattattgggtgatgtgctatggtcaaatccatcgatggatgatggtctatttgagagtgtgaatcaaggaatgggtctatcttggggtcctgattgcactgaggcttttttgaaacaatcaaatttaaaggtatacttttatgctgtccttaatttaaatttcatcaagttcattggattataagtgacatttgagacatttgcctatgtatttgtgttttgttcatattactgacctacaaattagaccaccaaaatagcagctttcaaaacatattgtcaatgtatgcatttctttgtttgtattgatgatgagttggttggatttttaaaagaaatggcttacaaactgtcatagccaattaatatttttgcttccaaatcctcatgtatagttttaaaccgttgtttaatagtgtggataatttagagaggagcttaaagagtatttgatgcaaagattggcttttatggtcgtattgcttaacagttgatcttaagatctcatgaaggccctgatgcaagagctggtcaagatgattttggagacatgctgagtgggtacagtatggatcaccatggagaatcagggacactctacactttatttagtgctccagattacccacaggtattttcttttatcttccttgcatatttggtgtctttcttccacaaatttcttacatgcctgacttgggagaatgttgtagttattcataagtagaataaagtccagatgttaacagtggtgcagaaggttatttttcctcataatttgtttgtatatcttttgtcagatccttataattttttgaaacttgcagtttggcgaaaccaaatattacaatgaaggagcatttgctatactgaagcccccaaactttgaaaggccatctttccactcattcaaagctgtagaaaggccagaggtttgaacataaacacattgtcatcctattgcgcaaggacatgaaaaagcagaatagggcaataattagggctctgctagtgtgtctgggtgtatttttcttgataatttcttacaaaatttgtatgattggcactgttcaatgcctgtacttttcccaggtgcatggacagcctacaacagatcgttcatcttcatctcgaagtatttttcctccttggataagctctaaggtcgattttgaggcattgggcatttccaatcccccttcatggagtgttccattggcagatgatgcaggtggcgtgcaagttgtcccaattcctagggcccctatggtagaaggactccctctaccatcagatctgcaggtaaaaatacaattttttcagctactcattctatcagtgttagtaacttattagaggttctaaaagtagtggattttaatacaggagcctcacaaggctgcgtttgagtatctctttgagcttattgctgcactgaagcatattatttcagctagagtgagttgatcttcatgtttagttattcacaatgtagacattggtgtttattaccattatcgtccaaactattattctaatactattatatataatattctcaatagcaggtgactgaaaatggggttcaaaagtcagctgaggggtgtgttccaaatgacagtgaggtcaacgtgaatcaagctaagaaggggggtgctccatatgaaagccaagagcaaacgaatgaggttaacttgaagcaagccgaggatcaagttgaaaggcaagatcaaaacaatgaagtcagcttgaagcaagctgagaaaggaagtattccagatgaaagccaagggcaaaattacgaggtcagcttgaagcattctgagaaaggaagtgctccagatgaaagccaagggcaaaactacgaagtcagtttgaagcaatctaagaaaggaagtgctctggatgaaagccaagggcaaaactatgaggccagcttgaagcgagcagtggaagtaagcactccatatgaaagccaagtgcaatacaatgaggtcaacttgatgcaagtagaggaaagaagtactccatatgaaagccaagggaaaaacaatgatgccaacttgaagcaagcaggggaaagaattactcaagatgaaagccaagggcaaaactatgaggtcaacttgaagcaaccattaaaaaaaagtactccagatgaaagccaagagcaaaacaatgaggtcaaagcagtggaagaaaaaagtaatacagatgaatgcctaaggcaaaataatgacgtcaatttgattcaagcgatggaggaaggtactccgtgtgcaagccaagcacaaagaaatgaggctgacttgatgcaagtagaggaagaaagtagtcgagataaaagacaagggcaaatcaatgaggtcaattcagtgcgggaaatagaagcaagtattcaaggtgataacttgatgcaagtagaggaagaaggtactcaagataaaagccaagggaaaaacaatgaggccaactcgatgcaaaaaccggaaggaaatagtcgagaagaaagccaagagcaaaacaatgaggctaacttgatgcaagtagaagaagaaggtactcaagataaaagtcatgggcaaaacaatgaggccaacttgatggagaaaaaggatggaaatagtcaagatgaaagccaagggcaaaacaatgaggccgagttgatgcaaaaaaaggaaggaaatcgtcaagatgagagccaaaggcaaaacaatgagaccaacttgatgctagtagaagaaggtacccaagataaaagccaagtgcaaaacaatgaggccaacatgatgcaaaaaaaggaaggaaacaatcaagatgaaaaccaagggcaaaacagtgaggccaacttgatgcaagtagaggaagaaggtactcaagataaaagccaagggcaaagcaaaagccaagggctaaacaatgaggccaactctatgcttataaaggaaggaaatactcaagatgaaagacaagaacagaacaatgaggatcatttgaagcaaacagaagaagaaagtactccggttgaaagacaaggaccgaacaataaggatcacttgaagcaaacagaagaagaaagtactcccgttgaaagacaaggacaaaacaatgaggatcacttgaagcaaacagaagaagaaagtaatccggttgaaagacaaggacagaacaatgagaatcacttgaagcaaacagaagaagaaagtacacaggttgaaagacaaggacagaacaatgaggatcacttcaagcaaacagaagaagaaagtactccagttgaaagacaaggacaaacaacaagttcatcttaaagcaagcagaggaaagaaatgctccagaagaaagcaaagagcgcagtagcaaaataacttgaagccagttgaaaaggcttaacatctcaaaactgttgagattccaggaatcattgttaatttgttcaaagatcaaatattgttttttagtccatatatcttattttctcttatgaaaagaaaagtgattccattttaacaatggcagatgctttgtaattaatgatgggtatcaaccattcgagcaattcaattgtagaaacactccacagtacagcaaaaataaacaatcaagtactacaataacttgttcagaagcgtgattgttctttcttgtacattctacaaccttagacttgtgtcttattgttcagaaaggttgtgttacactaacgcttccataaatcattcatacaaatacaataactaattcgcctataatatcacaatctacggaagatgatctataattaaagaccatgattctataacttgagcatgtttgccatacacaataaagtgtgaacttaacataatgagcattcagacattttcatgtactccatggttagtcttctctactgttggaatcatctgaccttttacgtttggaaacactcttgcgtctaccttttcgtgcttctccaacaatctctgtcaaacagttatgcaccgagctcttaatttcgttaagcaactttttatcccgagaatccatccgatcaattgacactgactctgctatactagcaatttccttcatggcagcaacctgtaaagaatatttcaatcacatccaagtattccagtaaataaatgactactaagatggaaagggactttttttgtgtcaacttactgttctctgaaactcagattctagtgattcaggtcttcctaaaaatcttcgggtaattttttcataccactgcatgtactcactttcatcaacatcatcaccaacttccacaataagaagtttacgttccaaccactcttttaactctgcttgcaatttaactttagcttcagattctgcatcatttgtcaaatcttttccaggacccggggtccgaatttttttctcccaacgcttgactttctctgggattgattgtggcaaaccaaattgccttaaacagcgatctggcatgtgtttttctgctttgtcaaagcatatcagcatagtctttgatcttctcaggtctaagttatcctttatatgttctggtactactgagaaatctaaatctttgtagggaagccattgaacctgcatttgttatcaacaattcaaattttattaaatcctgaaccaaaaaaaaaaaaaaaaatccatatgtagttattaagtgggtcatctcttcacctacatcacaaggtgtaagggaatctaaagccttgcggtaagcaattatattggatgttgatcttgatccactttgtcttcctttccacctaagtgcaaatggaaatctaccactcgtatcttcattgatctttggtcggccaagattaaggtgataatagctccagcactaaagagaacaatataaaatcgttataaaaaaagtatatgctttgacaacccttacaaaaatataaactttgagaacccattcatgcaaaattgagggagaataaaataagaagctataatagttaacctgcttacctgaactaaagtcaaagaaccgctaatggtgccttgagatttgagagaagcattgccaagagttctatacaggaatgccaatgctgctgctccccatgcgtattttcctgcttcgtcaaaattttcaaacaatggaagatacataatagagactttgttcccagttgttgtggaaaatacagtgctgccaacgagatacaaaagataggcccgcgtataacgctcaattacttcaggagaagcatcctcaggacatttagagaaggactctttcaaccaagttagcttcaacattccaccatttaggtcctctggtgctttgcctagaagagcttcacaaactgagctgggtgtgtttgatgaagcacctataacaggttttccatcaattgccaacccaagaatcagggctacgtcttcaagagttatcgtcatctccccaacaggaaagtgaaatgtattagtttctcttctccacctctccacgagggctgagatgagtgaattatcaagagaaaaagagggaatcactctaaggtacccaaatccagctttctcaaccaactcaatttgttcaggggtgagtttccactgttccagcattgaagtgtgctcatgacatctaagaacccctcgctccttcaaatgtcgtaatcagtttaaaccacaaattgaaacataaagtaattttattataattttattttaataaagaataactggtaaaaacaaactttaatttccatccaacctggccatcccaaactgctgaagaaacatgactatcttgatcatagagcacagatttatcagttggtcctggatccgcaattgtagtcattttaactgacaaaaaaaaaaaacaataaaaaatgcaaacatcaacatatgattcattgattactgcaatttgtgctttctccctttaggacaagttactagttgtaaaatagcagtgatccagtggtaaatgacagaagtagagggaaagaaaataaaatctagttaattgacatatttctcaaaccataattggacactgatacagtcattcaatacagtaatggagtctcatcagtcatcaccagaaacatatgaaaaacaaaaatagcaaaagccaccaactttaaatatttcttcccaactgttttaaaccagaagttgaaatctgtatccaatatctataataaccactaaagttcagagccaaaactatgaaggttctagtggggagatacgccccactgtattttgtcaaaattgttttgataggacattaaaggataggtctttacaattacaaaactcgacacacatgtatatgtgaaaaaaaaaaaaaataaaagaagaagaaaatccttctgtgaatcaaagaaaaagcaaaataatccgtaaattgtgatttaaagactcaaataaataacctttatgatgggtttgggaaatcaacacaaccaaaaattgatttcttatcaacatggtaacccggatttcaatttcactaacgagaaccaaagctcagtacaacattcctaaaatgtcaaatcgaaacatacatagaaataaataaaatacacagtaacatgaaatacctggcagcgatgaagggttaaagagccggcgaagtgggttggccggcggacccaagtggagcagcggccgagagataatttagggtttattattttcaaattgaatatgtaaaaggaacaacagctttgccggacgaagcaaaagccagtgtctttgtgtttagccgatgatggaactgtgaaagagataagaagaaaaaataaatgcacaatttttaagtttctttcccgtcgattggagtcgacatattaatatttactaaataaataagtgtattttttttttacgctcgagtttcatcttaaattttgggtttttatccaagtcgttttagctcttatcaacgagtttagattccataataatttatgtaaggttaggttaaattaagttgggttttatttcgaaaaaaaaaaaattgaattaaaagggaattattttgggtcttggaaattaccccatatttggtgtaattgtatgtttccaagacccaaaataaactctcaaaaaattataatattgccaaatgcgagttaataactttgtttttttattttttttgaaagaaaagtgtacaaaaagaaaatatacctttttttttttttggaagaaagaaaatatacctttagaaaatgagaattcggatttattaactttttaaaagaaaaaaaagatattacctttattttacacaatgaaatttatataagacttttagtaaaagaaaaagatatgataacatttttagatttgtagtaatgttggggaatttcgcatgaaattgcagaaaattttcctaaaaagtatgataattggccaattgggtttgttatcctgagagcaaaaaagtcatcgtagagtttcaactctaactaaagcaaacccatttttaagaaacaaaagaaagcaaaatcatacaattctttctccacatatacatacacacactcactaaatgaggaaaatggagagagagagagagag

SEQ ID NO: 79122 - DNA, 6198 bp, Cannabis sativa
  modified_base (405)..(416): a, c, t, g, unknown or other
  modified_base (1764)..(1784): a, c, t, g, unknown or other
gtcgtcatatcttgaatcctcgtgagtggtaaaaaaaattacactcaacataaagattcactttaagaacagtttaaaatgagttaatgataattaaggaatgataatgtgagatattatcatatttgttttaagaatattatttccttttaatattttcatcaaaactattccttttttattaactaaattaatatttacaataacaaaataaataaagtaacaaatatatgtataagatataaaaattaatagaagagaggtcccctagctatatgagtttgtttttttccttattgagtttggtgaattagatcaactaaaccactcagatcctctcttgacttttttatttatttatttttaggtttcttgttttgtctcatattattattattattattnnnnnnnnnnnnattattattattattattatcgtccaaataaaatattatacacaatttattttattgtgactaaaaataaaaaaatttgtgattaattattataaattattattcctacatgtgactaaaatgttttaattaactaaagatattagttacaaaagttataatttagtataattaaatgtattttaaatgactatattgtaactaaaactaaatacaatttgtatctaaatatatattttaagttgatattaatattcatttttgtttctaaagtgatggtttgattaggtcatgatgatatctcccgctatatatgggattttctagggttgattttttatttttcaattttttttaacaagtttttagggttattattattataataaatttctatatgtatatatataagatacatcatatggaagaagatacaaatgtagaagttgagatacaaatagagagagaaagagaataataatgagatagatagagagaagggtatttctgcaattataatttttatcactttgtcctttttcacctcctttttatctattcctctattctcattttttccccacacatttttttttcttcctttcttctctcatattatcacaaaaaccatataaaatctctctttcttttcttttcttttcgatcatgatctcggggccaaaacgatgtagtttcaaagatagatttagtaattatttgggaagcttttcgtttttttgaggggaatgttgtctggctcgaggccattatttttaatttttaattttttttctcattaacaaaatatataaatcgatcgatctataagattttgttaatctcaacatttcttgtttgagttaattaattataattataattaatgacgtcggaccaggcttcattccccccaattattagttgctattcccttttcagatcttcagatttttgatccaaatccaaaagggtatgttttagtttttgtgtattgtatattattattattattttttttggttgagcagattagtgtaatgatgatgattttgagttttgactgtttattattacaattatttttttcaaaaaaaatataatttctgactactgaagaagtagtgtgtaaaagatcatcatcattacactattttttttttttaactctaaatttcatggatgatgatgatgatgatgatgatgagtatgattgtcagtcagtccttattataggttcatcattggtttggttttttatatatatatatatattttttaattttattttttcatgatggttttacgaatcttttctgtctgtttgtacttaataataataataataatnnnnnnnnnnnnnnnnnnnnnaataataataataataatagctacttcaatttatccagaattggttctcttttattttcaattgctaattagggtttcagtatatataaatatatatatttatagaactgtatataactcctgcactatgatctattatatatatatattaatttatttatatttataataaatatgtatgattggtcttttcttatatgtatttttttcttttttctatttggatagatacagataacttgtttggaaatatatataaatattttttaaattataattattaatttgtttttaatttatcatgatcatatttctttgccaaactcttttttgggttatgttaattatttaattattataattaaaagttaatgtttatgatatatattttggctagctatatattaaatattaatggacctgagctctttatttaattattataattattttggctagctatatattatttaattattataattaaaagttaatgtttatgatatattattttggctagctatatattaaatgtttatgatatatattaaatattatttttcagaaaagtagaaaggaatgattgagtatgttattacttataaataaatgcccaattagttaaaaacacacaaaattaattaaattttttcaaaaaataaaatagaatagaattaataaacttttgttccataaatccggccttaataataattagggcaaaactaacaaagcctcacagttaagatgatgaccaaaacaacaagcgccctaatcttattgttttggtttgaagtctatcgcaactaatttgttaccttgtttggtaacgaatattaatggttaataaaactacattttatattaaaaagattgttcttgggttttgttttttaaggataattgtatttgttaattttgaaattaacatatcattgaattatatatatgcaacaatattggaatgtatggtgtacatgttctataatcatagaatatatatacaatatatatatataattttgggtcaaagtttttggcatatcttgtaattatttaatttgtttggtcatagtaaaactaacagtaaaagattgtttgtttcaaaatgtgtgccgctcaatgcaaaaaatttatatatatatatatatatatattaacacacaaaaatatataataatttcttcatttattcattaatattaatttaagtaacaaaaatccattaacaaagtttaaacagataagagagccaaaaaatatatatcaccaagaataaaacataaacttattattacatgcacaatatatatatcattaatttattttaactacatatatttttttaacacatacaatttgtggtaattaaaactaaatatatgttataatttttttgggtacattaatccaatgataattatacaaaatccataaaactagcgtgtttgaaaattaaattgaaatcttttatatatattcataggacacatcatgatcaaattatttaattatgaccatatatataaaaatatataaatatgcatgcatatatatatgtatgtgatgagacatataataaatagagtacacaactagttcagtaccactatatatgtatatatatgggtttatcattctgtcattattactttctgatcaatatatatatgtaaatatcagtgaatgtgtttaatgttatataaatattttgaattttattattgtataaataaataaataaataaataaatagagttgagtcagtatcagcagttaattttagcatggatacctcttttcatgactgtgatatgtatattaaatacagaatgtgatctatcactttctcccccacaactctttgtttctacattatttacaaattaaatataatttatatatatatatatttatatattttttaaaacaaatttcaaaaattatatcttaaaaaatttcaaaaattatcctatttataaatgttttttttttaggtttagcgtacgtagtgttattacaatttattaatcacatgtataatatttaataacaatatttatttattagtacaaatcaaagtcttgagttttatgctataataataataataataatcaaagtcttgggactggtcaatatcatgaattttgtacataataaatataaaaccatattaatttttatatttaaattattatcaataccattattggaacttgtgttaacatatatatatgcatgctcacctcttttaatatgttataatattttggttttcatcagaattgatttttgtttgtataatatatatataagactaaattgaatttgttgacctagctaattgtgtaggtaattaaattgtcaaaatttcttagagtccgtgaactttttgtttgaataattagtcctcttaattaaatagagatatggtgatatctataaattagacaataaaaaatagaataaaataatttgtcacataaatattaaaattttttaattgtagataaatatctaatttaatttttaatgataataatatttaaattatttttttttgaaactttcataagtacaagactgttaagtataagtcaatgaccacatgatataatttttgattgatcctgttcattaaatttttattttttatttaaaaaaattaactatatataccaataaaaaagtaacaagtaagattataacttgatagttaacagtctccaaaagttattatcattcctgaaaagttgttgtctcccggaagtatgttcctagaaggctttcttgtccttccgagaagtgtcctcagtgaagcaaggcttcctggaaagaagttccgtatagtcgactccagctagctctttcctattcgggaagctccttcagcaagtactttggtccgtgatcccggaagctcatatatgttcctggatgcacttatacttaagctgacgtggagatctcactcaaagaagagtttgctaattaaatttgttaagtcctaactaacttaatcacttattttcttacagtcaccgactttaagatcttaatcctaagtctataaataccaccaactcttatcttttttgagacacgacgatcaaattgagtttcatggttgagagagaaaagattgagaggcagagagagaaaaagtacagagaaaaaagagagattggaattgagtttttatgaaaaatcttctatagatgaagagagatcttctcaactgtattgtacttgttcttgctcaatcaataaagagaatttggtggtgttccagaactacagtagagccatatatagatcacatcgatttatcaaatttgaaccaatatatgtgttggtgttgattttatcattttactactttaatcgtttctagttttacatactctgtacatccctattttttttaataattgtttgtgatttgttatttttgtcattactaattatttagtgattaaattataaattaatttgattctacactttagttttaatttttccacactaaattatgtattattatcgtaaaaaattaagcttaaatatttatctctgactaaaaattaaagttaagtatttatatgataaattattcaattcaaaaattaacatcatatatataataatgccaagaacaatataattgcctagaattaaaatcaggacacatataaaggttctggatatgaaattttagagattagaaagtacatgcaaaaagctaattagctagtgcctagtggtatatagactaatatatatagtacttaattatattttatgtaatacatatgaaaagaaaattatgtaactttgattatcatgcaattagatttatatatattatttcctaattattcccactacattggatttatatgattttaataattttgagtggacacaatgtgtaggcgtgggatatgttttattattattattattattatatatactatttaattagtattttttaaattgtaaatgggaaacttttttttttttcttttccaaggttttatattaaaaaaaaatatttaacactatatcttactaggaaagccacagtagtactatttgtatatagtgtgatttagaatatttaagttagtagaaagagacaagcaaataaagttattttaatattctcagataaacaaacagtggttatgtaaatttgtgtgagtgaatattcacatacaatatttgattctttctattgtgttttcttcaagaaaaagtacatctaaaatagaaccacatgactcctaagtttaatatattcgtgttatgtttagattcgtgttatattttgctcaaatcagtttcctttcttttcattttttaatataaaccaacttatttttatacgaatttcgaattttattct

SEQ ID NO: 79123 - DNA, 2008 bp, Cannabis sativa
aaaataaaactaaaggttatgtttcgattttgaatatatcttttttacatataaaaataatcacaggtatttactatttttaactctaaactaatggtgtagttagatttttttttttttaaggataaaagtaatattagaaaagaaaaaaaataatagattggtataaaaaaaaaagaatgaaatggaccatccgttgaagaaaaaaaaatcggtattgacatgtgatataacgattcaatgaagaaataataagtaataaaatatatatttatatttcggtattgctcggcgttagttttaataataaaaattacttttgtttttcttataaataataatacaatcacgtatatatataaaaaatcccctatattttttaaaatgaagggccccaataattttttttctcttaaggcccacccaatcacagggctggccttgccgaccaccagacccgcacttcctcaagagagagagagccagtttttccagatcatgagcaataacattcacaaagcggttactgtgtaaaaccttaaatataggcatgtttctaaaaattaaaaaaatatcactcaaagtcgagccaaatgttgccaaacaaggatctttcacatttaaaaacttcgtgacaacttgacaatctgactccgcatcaatgttgtggtatcctagccgactacacaaacggagccccaccaacatagccatcgcctccgccacttgaggggacaacaatcccactgttggatacgacgcagaagcaacacaatgcccttcatgatccctaatgacagttccatactccattcgcctatccaagggtcacaacccagcatctgtattaagtttaaaccaaaccgatgacaacaagcaccaagaaagcggtgtaatacttctagacagaccactcgtctcgattgaactcatttttgcaaaagagaagtcccatcccactacgccaaccatatctaataatgaacccattgattttgacgattccatgtacgcacagaagtattagaagcttggccatctcgtcttttcgaagaagatactcatgagcacgtaggaaagacaaaagattcccccacagcatagaagaagcatgcaacaaaaactccaccattttaattactgactgaagcctagagcaactccataaagcatgaagtgaggtctcctattcttggttgcacataggaaagtcggattagtaggcactttatgggaaataagattgacattggaaggaaaccaatcccaacaagcttttccaaataaaaaccttcactctaggggtatgtgcaaactccataaatatttccaccaggattaagacccatcacaaccttatccgaaaagacgaatagcattctagtacctactcttcactgtgtagccacccgaagagtgataatgccaaatgagcctatcttgaatcgatgaagatctaggaatactcaaaatttgactagcttcctccaccaaaaagtgagcatcaatgagcagattggcagcttggcgtaataatgacgtaagcaccagttgagaacagacgcttacggtatttgcttctgtgggtccctgacgcagtggtcgtaagcgttgttttagcttaaggtcaaatatattcttaattttttctctaatatttttgtattggtatgtcaactgatgccgttgagtacttatagccattgattaacaattgacgactcaaacttagggtaatctattgtgtcaatcaattacgttgactgacacatttcaccaatgctaaatgtgccttttgtagtggggttgtttaacactattataaagtgtcatatcaatattgatgcaattaattattgactctcacattatttaatttaaaagctattatgaaaaaattgataaccaatcacaaggtgctacctcatgggtactgtaagatgttagaaatttattggggtcacaatatataaaatgtgtgttgggtcatcaaataaataagtcaaat

SEQ ID NO: 79124 - DNA, 2189 bp, Cannabis sativa
gaagcattatttgtttccaactcagaaccttcaagacaatccccttcatatcccaattcggaatcaggtagcaccacattagaatgatacggagggaaaatcattatctctgtctgcacaatgtatgaatgtagacaaaagactaaaaccttaaaggaagactgtatataaactgcttttatagatggtggcaagaggcatgtacgtggctgaagaagggcctccatgagttctaatggatttcttgaaaactcaacatattctccagatacccaagcggctgctgatagtattctgtgaatgaaaggattaccaagtaatgctggatcaatcagaaggtcacgagacatccgtacaagttctggcctaacatccttgacccgcatacaaatatcaataagctgcttctcaatttcatctcccttctggcaatgtgggatccttgacatttctcccaaaagcgacacataccaatcaaaatcgatgataatctcgtaaacatttctacaacaagtcaataaaattgaacccagaatctcattgcagaactcgggatcagattttaaagcatggttgagcaaaaccctcgaaatttcaacaacattattatcagataccattgccattacaagatttaaggattcgagtttaatgttaggatctaaatcattcagaaacttaatcacgagctccttattatctaatactgcccatgagtgattcggtgcaacaatcaaaagagcttgcaatgcaagatacttaagattcggatcatcttcaaccaacaattctcgaattttctcaaccgcaagcttcactgccaagtcatattcggcaaagctagtcaccacagttctaatgcactcaaacatcaatgattttgctccagttctcctcatatgatcacatacaggttcaacaactctgtttgccagcctaggctcaagaggtgccaacttagcaaatatcttcaacaccttaatcaacacccaattgttcttagagtcaaccaaaatcttataaaactcaggtgccagtggaagatacgatctgggatctttcgaagcaagctcacaaaatactccaacgaccgcagacacaatttgcggatcagaactctccaaattctcaactaagcgcttaaaacaaaccctagcagcatctgggtatttctcaaaaaccctcaaaaccacaccaatcgccttctttctcacgaaaactttgctactcgaaagaagcgtgaaaatctcaggggtcaaatctctagcaagatcaacagtagcaattctagctaagcaatcgagggcaaggcttacctcgagctcgttggtgcttgaaaggtccttacgaagctggttagtgatgaggacaagaacaggagttgagtcccgaaaggagtgggaggctgcgtggtaagcgaccctcttgtgaacgaatcgggtggaggacatgagctcgaccacatggaaggcggcaaacgacatgtcgtagaagtatagggagctgaggtacgacaacttttggagagcgttggccttggtgtgggggtcggtggacttgatctcgcggcgaatctcgtccatggctttggagatgaaggcggactcgcctatgagttggaggcggaggcccttgatgagatcctctagagttctctggaagagggtatccatgatggaagaccccgccataggtttcaattcagtgagatcgatcgaagacgatgatgagtagaacgacaatggaaatgatggcacatttgcgggttattgtcgtttaaaagcacctcaattccatgattgaagatttggaaggtacaaatttagggaggaactcgaaaatctgggaatggatatcggttatggcgttttccgtcatttggtttactatactgtcgtttaccgcttgttgtgtttgtacatattgtgagcttcttcccgtgtgtgagaaatacattacgggcttgggccttaggcttggacttcacttgggtctcaatttgtttccggtagggaaagaaatgactgtggaaaattatagcagatgatgcttaaattatagtttaaatatgcaaaatactctaaattagtaatgggaaattttactttttggccttaataatacaagccatatcaaaatttatactctcccttaatttgtacaaatttagtccattgattacatgaact

SEQ ID NO: 79125 - DNA, 4011 bp, Cannabis sativa
tacataaacaagctatatatagactacaagtgattaattatcacatcagaaaatcaaatgagtaaaaacaaaacccaaaaaaacagatcaccctttttttttaagagatattacacagaaaagaaaatcttggctactgtttttgatgaaacaatcgattgatttgtaaagaaaattcgccattgctggcggttttataaggtgcttgaggaagatcgagttgatgatcgcgtgcttgaactggaatgatctttccttaataaggcttctagattttgaaagcatttcaatggcctaacctgtacatgtttaatgtatatattgcttaaaaaaagacactaaaatctcaaccaaatattgaaaatttcggtttgtacataccttccaacgccttttatgaacgacagtgttgtgtatggattcgagctttcttataatttctctaaatgttggtctctttgctggtttttcattccaacaggcctcgattaacctataatataagcatgaagaacttataagctgaattggaaaacaaaagaaaatggagaaaagagttgaaagagcttttgagttgtactcactctttaatcccatgtgcataaagcttagctggagccttaaaaggtgggcgatcacttgcagaatatagtttaggaacttcggtatcttgttttgctgaaaatggtatacagccttcaatcatctgcaatagagatattatagatatatatatatatatatacattagtaaggcttgccataacaaaataaaagatcaccatcaaatatagatattaagaggaaaaaaagatattacctcttgtagaattaaagcaaatgagaagacatcaacttttgtatcatattcttcattttgaaaaacctctggagccacatatcgacctgtgttgacaaatcaacacattcagagttacaaacaaaatatagcttaatcaaaatcaaatgtcaaatcgtgtatgaagcaatactcacaggaagtttcttgacatgtcaaaggcttgtcctccttaactgttagcaatttgctgactccaaagtctgctacttttaggtgcccagaatcatcgcgtaatatgtttctgttatctcacatgttaacaaaatttaaaatgagaatgaggatttggacactaattgtagttgtttattttgtaacatttactatgaatcttagaatattcaaatagatgcaaattcagtggcaataaagtccaataaaagaacttacgaaggctcaagatcacggtgaataattggttctggcttattctcgtgcaaataactcattcccctgcaaaatacaaaaacagataattaattttcatcatagtagaatatctatatgaaaaatcacataaaagccatccatgcggctaaaccttaaagggttttcatttcatatagcactgaatttagatatccctaatatgtatacaaaatacacatgcatgtctctatatcatctactcaaaatgtaggtgatcaagatatactacttgaccactctattcatgtctctaaaagtcactgtaggtgtattaattaagcctcatggaagagaaatgaatatcagtatgtattacatttgaatcaattacataattgagaatttaagggcattttagaaaagtaagagacctcgcaatatccaatgcaaatctcaaagctaaagcgggttttaatgctcctcttctgttcaaaaatgctctaaggtcaccctgcatcaaaagacagaaaataagggtccgaattacaaagccaatcttaatcaatctaaccaatgcatagttatctaagtattagacaatattggagttttcatgccaacctgtgctaaaacagtatagagtaaagaaattcatacaaaatcagttaagttatgcaattcagaaagtaagtggaagcccagagttagccatcaaaattatgaaatagattaatatattaatataggtgaaagagactagccgcactcacaaataacaaaggagtgaattaaactatatttgaggggggaccagtgaaatcaaatatttattaatgatatgattgtcaagaaaatgatattcaatgctctgttcttcttgtaagaaaataagatgatttatcaatctatttcactgtaattagattagctacttcattccattagactctataacaataaaaatatagagatgagaaaaaccttgggtaaatactctgtcacaatcatcattggactactttgagtcacagcaccaagaaattgaactacatttggatgccttatcttctgatacaatgcaagttcatctctaaatgcccgtctgccattagaaaaacagaaaagggggttagtttcaataacccattacattcaaaactgaaaaacaattaacaaaaatcttcaagatataaaaaactcacactttatcatcatctgtaatgactccctcctcaagctttttcacagcaacctcaattccgcgccaggatgccattcgaaaggttccctgagaaatccagcacaaaggtttgaattttaattaacatttttcattctataaaacatcaataatacaagtatgtaaatgttaccttatcaatctgaacactgtttgtgaaatcaagctcctttggatcaatttcatattcaggaacctcacgagcatgattaacatgcatagaagacatctaaaaaaaacacacaaatcaatacacaaaaacatttacataatacaaaactatcaagattaaaagaactttacttaccaaaggcttagcaccacgtttctccaaaagcttaattacttcatcgtgtttataatgaattgcatcagcaataggctgttgttaccattgtttcaaccattaattattaactttactcaacaaaaataattaaaaaaaaaagttagatcataaattcagtttttcttacagtgctaccccatcgatctttagtatcaagctgagcaccacgatcaagcaacaactgaacaacgtcgttcaatccttgacaagcggcgacatgaagagcagtccgatcatcaatatcgcgaaaattaacatcgataccagagtccaaaatctcgcgaatcccatccaaatcaccttcgttagccaagtacataagcttaactctaggatcgatcttcaccgaatcttcgtcttcgtcttcttcgttcagcttcctctccgtactagctcgctccggcgccatggatgactgcttccccagtgtgaatctcaacgccgtcgttttggtctccatttcttcttcccaaatttttttcaaaataataaaaataaaaattggaaaatatttagctaaaatttcgggacggttttatttttttcggttggtaaaatagcgagcgagtggggtccacttgcttaaaagattatgcaatacgcgtgtgccagcttggtggtggcgcgtgaaacgataactgatgtttatgccgttagttaacggcgtatgcgtcggtggagtagagtggaagaaagtgacggtgccgttaagaaaagtcactgtggacaagctgtttgtttgggttggttggttggttagttacgtgtgtttgtgtgaagaaagtcaatgtttgacctggatggattctgattggttagctggctttggctgcgaaatcctattttcctatttcctaggatgaagcaatggaaggttttattttgcattatctttttcagaaacgctgtcgttttgtggttgtgcctttaaaatgacaaaattatgtgaacgtgagtttataataatggaaatgaaaataataagaggcactctaaattaggtactataagatatgatgtatgttatttggtagaagtgaagttagaaataatttggaattttttttttaattttgatatgtaataaattatgttttttaatttttctgttttaattattgaggttttttaatttaagaatttttatttaattttactaatatgataattatctatttattaaattgtgcc

SEQ ID NO: 79126 - DNA, 3362 bp, Cannabis sativa
ggggcaaaggagtggctactcaagccatgaacatagctgttcctcaagttttcaaggacttgccccacttggtaaggctggaagcttatgttgaggttgagaataagggatctcaaagggttttggagaaagttgggtttcaaaaggaaggtctccttaggaaaaatactttctttaaaggaaaactcagagatttttttgtgtatagctttttatccactgattttcctcctcaaaagctgtaattaaatgttttccaacagtgtgaggacttggaatagaagaggaaatcttatgttatgaaaaattcgtgatttgtcatgaaaaatcttagaattagccacttcgaagttcttgccaaatcatttgctcggattgtactgttgttataattatatttttgtttccaatgaaagaaaaagaggttataattaattaatggtatttcttttagcggtaatgaggcaaaggggtataaaatgataataagattctacttgaactttaccacactcccatctagccttattaagcatcataattttgttctttactatcaaatcctagcatggagagtttgtgtccaagaagcctataacccctatagaaattactctgcgagtgcgaccaatagccctagtgtggagagtttataatttcttgcatgggccagtgataataatgtggcactctactatcaatagaatgctcattactgccagggaccatgctgtggcgttcctcaggcaggttattgatcccactatcgacctgtgttaatgactgtctgatcaaatcgatctacatgcatcccagaaaaaactggaagggaagccctggctgtgtgcaaagtactggtgttggacttgcaacaaagatagacagtaaagttactagttggccatttaatgaaagctggacttggggtactgagtatttctttaaggtctaaagtcaagatattacattattaccatatacaaggacttgtataggagagaaattgaacccttgatggaatatttaaattgcattattctatgaagctttaatcttctttttattttcaataacaagtcggattttgcaaatattctatgaagctttaatcttctttttcttttcaataacaagtcggattttgcaaattaacgaggcatcacaaggttacgaataaagcataaaatgaaacgcagagatcatatgttgcagtataaaataaatttgtatttgtatttatatttatatttgtacttatatttatatatatgtttatattatatatgaggtatagacacatgggtttataaattatggacaactatacaaaaaggcatgctgcaacgctttggcaacacaagtaattacatatgtatatcacacattcataattgttactcacacttgggagaatctgaggatggaagttcaaggtgtagaatttactgagatttcttgtggtagaggtgagcttggctggtcctgattggatggtacagcagcaagtcgttgtaagggcttgagagctactgtgagctgtgcaaacgagggacgcaagtttggttcactttaaagcaacaagagaaaaggaaatagttagttggactagatatttggaacataatgttgtagtataatatatactaagacttatgcttaaaggatttcacttacgtctgccaacattcccatattattcttgcaacctttggatcaacttccacagggatgtcgaggcgacgattctggaaaccaacagcaccaacaacttgcattgggttcatcccgctccaaggcaatctaagtgtagcgagctcccacaaaattactccaaagctatatacatcgcacctacacatttcatagaatacatgttagttttaacattcaaatcatttggtggtggtctcgtagattgtcacacattatcaggtaaaaattggataaatcaattagattatcagagagagaaagggagggagaatgactgagcaaagcagtttttagcttcttgttagtaataaggttttcagacaaatttataagaaaattctacaatcgccttcttggcgggcagataaatcatgtactattatatcaatgaaaaattacaaaactggtattaatagcacaagaacagaaacatacaataaccaaaacaaaatgcaatacaagagtacttacttctcatttgaaggttcgttgcggaggacctcaggtgccatccactcaggctaaatacacaaaaatgaaaatacattacaagactacttgatatgggaatcaagaaatactcacgcctctattctgtcattctgtggaaactactaaaagctttgaacaattcttaccgttcctgcagttgacttggatgacaaaaatgtattatgcttcaagcgagacagtccaaaatcacaaacctgtacaattaaattacatatttatattaaaaagacaacccaaccaataacaaataaaaatggtacattattcaactgtcaaagaaacgctttgtattctgatcttacaacactaataataaatcaaaataaaaggcatgagcaaaattcactaactttttaggcaagctaaacttgcctgataaggttaaataactagttgctggctatttatctgtttcattttttatttgacactaatccctaagttcccctatgcttcaatcagttggcctaaaagtgagagtcactgaaaaatcataatacagcacaataaagtgcacaagtaaccaataaggtgcatgctcatttacaataatatattttatatatgaactcattactcatgagtttccatacaatcccccccaactcccacccaaaagaaaaaaaatcccaaaaacaaataaccagggttaagaaattgtaataaatcatcatctgccaatcaactccaccatattgacaagatatatttaccttcacattccagtttttatcaaccaaaagattgggtgatttcaaatcccggtgaacgattgtgggtatgctagtatgtaagcaattcatacccctggcctgaaaattatacatgtcaattagcatttataataatagaatgtgggctgacaaagaaaatacaacgaactagctcataccacatcaagagccatcttaattctacgtttctcatcgatttgacaaagaggacggtggataatccggtataagcttcctctgaaaaaccaatgaattacttgatgagagagaacgatgcatgtaattatgcctaaaagcaaagataatgctacatataaattttgaaaaagagacaaaggtcaaaacttgacctcttcccaaatttattagggaacctccctagcggaggaaaaccgtggtaac

SEQ ID NO: 79127 - DNA, 894 bp, Cannabis sativa
atttacattataaaaatcactcaatctatctatacttcttacaaaaaaaaaagtacagaaaaatcaatctatctatattacttattttgttaaggttgtactatttttattttggattattaattagtataaaaattaaaaggtcaagatctactaatgagaaaaattattacccagacaacaattaattacatgaatataattattagtctcaataataataataataataataataatgctcccacattaattacaaattataataacaactaactaatgacttataaaactcaagtcttttaattaaggatcatcacacaatattatctaacacatcaattaattaaattctctataaagtttcacaaaatatggaagttgattattctcacttcccataatattgtttgttgagcaaataaacataaagatgcattggagtccttaaaaattcaattaagtttaatgtcgtaacaatattcggtttaatcaatatctttatatattaaaagtgattatctaaaaataactatctaacggtaattcttgatttaacgattgttttattttttttacgttaaatctaactgctccattaaaacctattaaaatttaaatgtacaaacctgaattatataacaattttacccataattagggttaagagaaaattcttcacaatcaaagttccattaattctgcgatttttttaccttttatctctgctgcattcttcttcctattccacgatttctacgaaggtaacaaatatacatcgatttgtaaatactctttggcattgttcaaacccctctttctccaattttttatttcgattttcataaaaccttaattccatcaaaaaaaaaattaaaaatattttttttactt

SEQ ID NO: 79128 - DNA, 4368 bp, Cannabis sativa
aatatgatattttctgggcatttctgataatatcaagtgttattcctattctggcatttctaatttcccgaacaaaccaactatcgagtctcgtttttgtcaagtggtttggtggttgagtgctctcagctcaagtcccggtaaatatatctttaccaaaacagttaatgacatattcgagtctcgtttttgttcttcctaagcacacatattcaattcaaatacatacacaagtatgatataataacaaagcggagaaagcatgttcatcgtagaaattaaagataatataatatatatatataacatgtcaacaagtaccttgaatagcaatgcccgatgacgagccaatccaattttcagagaaccaagcggcaaaaccatgctaccatgtgttgctttcaaattgtatgtaaggttttgccattctcgcaacatgttttcaggattcccaaccggcccacccatatagttggctactaaaacagcaagttttctcaccaaatcgctatttacaaaaaccaaagaatctgatctcgactttacagccatctctagtgccacctgctcaagcttcaataaatttgaatctgcagccttattaaccaaaactgcttcccaggcaactccctcggatacaggtgttccttgtagatcaatgagggaaggcattctttctgaggtggactcggtcaagattccatacaggtcatagaagccatccaagatcttgtcatcgtagctaagagcattgtaattctgtgaagcatgtataaatctacgatatgagataggttagaacggaataaaatgtatgacaaaagttgagaaaacaggtgaaattataggaataatctcttcggctctagaattatctccaacataaacagttaaaagttgatataagatcaatgtaaaactaatgaaacatataactacttagccattttgctttgtcaagattttaagtacaatatttatgtagctagctgaattatagtggcaatgaatgcccaactcttcggtcaatgtgatcgtcgataattatcatgatgttcaggaattttctaagttacatttacccaaaatgaaaaggccagtttttaagaaaagaacagccgtaattcttccccttctcctgatacttcttgtgtcattatgcataagttttgaggcatttctgttttcattctccatagtgtgttttattttatcctctctcggaaaaagggtaagtaagggatcactttctttatagaaaccaaaatgttaaaccgagataggaacaccgcccttcaataactcgatcatttctttcactaaaagtaactgaatacccaaagacattgctgaatgtttctaaactttactcataaacttaactctagactcagaacttcaaccactttcttctccatccatgtccaaatttgaaaccattcctgctttcaacaatgaaagcagtctataatccagcatagctgatatcgactttcaacaacatcaagtttctgcaatcgtgctctactaatttagtggtccgggttttccaacttttggttactggcaacaagagaaacggagtgataaaggaaaggttcacatgagtcatgagactgacattgacacttcccctgattaatataattttcttaagcatatcattagcttcatacttaattggagttaataaataaataaagtcagcatactattttcacttcctacatttatggaggacaacaaaaatcaaattttttttatatcccatgagcattttggcatttatatgacttgactgacataccacaaaaggtaagagttaagattgaaaagacaatccaaatcagatcatatatcaatgaaatattaaccacttgtgtactccatactaaatgccaataaaaatcacagatgacaagtcaaaccaaaaatttccaatcattgaggcaaagttaaaaatgaagaaaaaaaaaacttacccaatatctgtaagcaacaacttcagctggagtattatccacagcacaagaacccaaactaatctgtttcacagcttcaatttgaactgcctctggatcttccctagcactcatttccaaagcaatttgtatctgatattcttcctcaacatcaggatctcttgagttactagaccctgaatcagccctcaatacatctgaagaactaacatctaaaccagacacaatactaacttcatcagatggtagttctgttctctcagttctaatgtttgagctatgtctattagcaactgaattcaaccatccagagagacctgaaaagggtttgttctcagaactatgatgagaccttggaactaaatgtctatcaggagaagaaccatcaataatggacttattattgctcctagatgaagtagatcctccttctacatcttctggttgatttgacatgatgtggagtttcttaagcaagttcttcatgttatttccttaagcttctgtactgaatgctaaaggaataaaaatctggccataaacatctccattgtcttggaccaagcatgaaatccaacccccaaaaacaaaaacaaaataacagaagaccctctcttctgactttctttgtctttatacagctaaaccccacaaaaggaccctaaatctaagtacaacccatcattgaaaacccacaaaagaaaacgatttcaagtagtaacagtgaagctttttcgattttaagaagacccagatgcttcaattgaaagttaccacctacccttttcagaaaaaagaaaaataaaaaaccaatctttgaagaagatatataatatcacagaggcaaatactcaaacatatggcaaaccccaatagataaaaatatcaaatttcactacttttgagaccctcttattcaccctccagaagcagaataatcagagtatacaattcccaaattgagagaaaaaggatctaactttctatacaaagtaacaactattgggactattgaaggagtttaaaacatttatgagagagaaagagaaagagagagagagagatggagggcaggtaagaaagaaagataagcaagtgggattgttggacctcaaagaaatgacccacttgagcttgaaaaaaggcttaattagaagaaattttcacggtcccagaaaaaggttgaaactttggtgggaaacaaaccaattggctctctctctctctttctttctctctcctcttcacactaatcactgacttgggttttgtttgtttactttggtttttgcagacccccaaaaagaaattgggatagtgggagatgatgagcatgagttggaaattctgtgatgaactgttgagaaaaatcaaaaaatggaatattgaaaagactggatttttatttttcctgtgttgtgttctttggttgtaatctattattgaaggaaggaagagaatgaatgaccaagttggaaaagtaatatactattggattgtatatcaactacaacttttgctatttccagcaaaaatgtgatcttgtcattgtcacttctcataaattttcaacctttattgttctttgttaaaattttgtaactgtaactaaacgacaattcttcttttcaaccatgtttactcttttactctaaacttgtttgcaagttgttaaattagagtgtgtttaaaagttattaattaggttgaattttctaaaatattataaatagaattttgagttgaattttcgataattttttaatataattcacttgaagactattcttaatgtagtaaacgtaatcagttttgtaataacacatctagattaggttattattaagttttattttaacaaaaaatcagttcagaatactatttaaaaaaatacattgtctaatttgtcattttttaaaatattgagtccaattagtaatttttacaaaatacatagtttaagatagtatttaccataaatatatagaacatgactattgtaagaattggaacaccacttttgttcctaccggtaaggacatctatatttttgatatttgaagaaattatagtccaatttttttaaatgacaatctccactatagttacagtaagtatatttttattataaattctaaataatttacgatatgaaaaacaaggtttaaatattcagttgtatgcatgttcctattgtaaaatttaccaaattggtaataacattattttacactgatgtacaattaacttggtaatatatataaatgtgcatgtactttttatttgtatgtatttatgtggctacttaataaatattttcttactgaatttagtagctcacttttatcaaatttaccatgtgcaaagttgtaaaagttagaaagtc

SEQ ID NO: 79129 - DNA, 2128 bp, Cannabis sativa
tcgtctacatattcataattaataaataataaagtactacatatatatatatatatatatctttttattagaaaatttaattaaatataaattggggattggcacgagtgatggttgccctcaatatctgaatacataaaataaatgatatagatcaaagacaatgacgagagaaaaggatatatagaactagaggtccccaattgataactcatatttataaatataattaaaatatatttatatgatcaagatagttgaatatatattatgatatatatgaatcattaagatgtgaatatgacctccctagctagctggctgtttagtatacaactatgaatacacaaaggtatactaaaaaatcacataagataacaaactagaactggtacggaactgaagctatatacatatatatatatttatgtattatatattatattatatgcatgttcagagactagaatatagagagattggtcttaaaaagttaagaaatgtcccctatatataatttgcagagactaacaatcatattgtctatgcataacacatatataaatatatatatatattactattgcctgcagagtgaaaatgcatgtagtctagggatcaatgaactgatatcgacgtatgcgtgtaattaatatcactgttaagtctgttatacttatacatcaaatttaattaaattagttagaaaagtaatataaaatgatcagttaaaacataaacatatgatataagatgtctcatctcttaatcttgattatttaatattatataaatattaaaaggattcgtacacctaatatgttgctacataaaataattaatgcttatctatcttaattaattccctgaaatggcctaacatgttctacttagtaagaaacaatttcactctttctatttctcctgtctgatgcatatttaggttactaattaataaatataagccgagtatatagtactacgtacatatatacggcgatatattgtatatgtatatagtcaatattattatgaaaacattaagtacttctccttatgtacatatacaagtttatacagtatcttataattaataaataaatttatacatataaaagacaaaggtatgcagttgatatcacatagatgacgcgagtacgaagatgacaatatatggtgtggggtacttattctatataatatgacaattgcaattcccaagatcgcaagagctagctgctacctctttgtgtcttttgataaattgcatgtggataatggaagaataaataagtttaacattattattaactagatttatcaaatcttatgacaaagtataatatataacctttttttatattctttttatggttttgtatttctagtgtaataattgtatatatatactattaatttcgttgtgtgtatatacccactctctgatcattatattattaattaggtgtgtagatatgcatcattaattaatttatgagggacctattaattgtagagtattatacacttacatggatgtacactaaatatataatcagagtactaaattttcacaaggaccacaattaagctaacttttaatatatatatatatctatatataaatatatatatatatataaatatagactaactaatcattatccttttttattataaccaaattaagtgtatatggaatggttatgtatagatcatcttatacaagagatatttctgtatacattaattaatagatattttttttttattaaaatgtctatatatattacattaattcataatttgggatttgatcaaccctctattctaggggtgttcaataaaatttacaaagcgtccagtctgaataaactgccaaaatcaaaccgaataaaccgacaaaaaatacaacctgaaataatacaatgaaaatccaaaccgcccaatgaatatattgggtggtttattataaattattctaaaccgtccaattaacccgaataaaccgaattaaaccgatttatatatatatttttaataaaagtatatatataatatataagatattacataaattatatttaggggaattactccatatactatttctttaactttttttttt

SEQ ID NO: 79130 - DNA, 6058 bp, Cannabis sativa
  modified_base (2689)..(2692): a, c, t, g, unknown or other
gtatttttgtaattttttttccttttttgtatttgtctgtttttttcccttaattttttttttgaaacaggatctctagtttgaagagtgctaattatatattttttttcttataatttttcagttaattttaactttttaaattatatgttaaaatattttttttattatagtattcgttataattataatattattttaataattttttaaaatattttaaatattttattgtaccaaaatagagttattattatttcagtttattatacatttaaaaatcttcaaatatattttcaagctatttaaaattttttaaaaagataatgttataattataatgaataacacagtaaaaaagaataagacatgtatttttaagtacctaaattaactaaaaaattataatacaccatattaatggtagcactttactttaattatttatattaatatagttttaattaaaacaagcaaaaaaatgcatgtgagactttttgaattacacatgcatttcttaagcatggaatgaaatttctcattgtgttgtgtaaaatgtgagacattttaaattatagctgatttgaaaataatatactgtatacattaatatttatattagctattatatgatttgaaattttatattttgtgaataacatggagaaagttttaaccaacattttttttaatatgatttggtagtaataataattgagatgtaattatactaaaaatgattatgcttaatgtagacaaagagtgtattgtaataactaatttttcttctaatatcacactttttgtgataatcactgataatgatactcacaaaggcaataatatttttatttggagatgacaagttaagggtatttataaaatacttaaatcaatttaatttatacgatctaattcaattcaattcacaaaatgtgaatatttatatttgtgtaaattagattgaattaagaattttaaaatccgtaattgtgtgtaaattcacttgtaaaaattaaccgatccaatttaatttacatctatttatatatatttaaaaatttatatgcataattaatattttaaaataaaaaaataataatgtaaaagtctaatatgtacaaatatattttaaaatttaatatatcaaatatatattttatttttatatataaataaaatataatttaagataaattgaaacattttattttcaaataatattttttttttctttagaaattgttatttttggttttgtttgttttaatcgtggatgtaaacataaaacaacaataatttgttttattttattgttagttatgtgaaatatactcatgttttaatcaatattaaataattcaatttaattttaaaagtaatcaattcaaaataaccaatcctagaactattacaaattggattaaatatatttgaaatattgtataaattagattgaaactaaaatataaaattcgcacttatttgaattgaatacactataagtaaaataatatgaattggattagatgaacacgctactgaacaccatcattataagaacaagctaccaccatagcaccaaaattatgcaaagtatggatatgtacacacatatacaattgtggtttttaggagtgatcgaactcctagttttgtggttgcccaacaaaatcccaactaccaactacaaaaatactatttagtagagttagtcccacattgttaatgtgtgaaaataaattatcatatataagataaatgagctactcctcccattaccaattagttttaagatagaacttcatgattcttaacatggtataagagccgcttatgatctgttgtgagcccaaagtgtcgtcggtcccaaagagcgactcaaaaaaagagtcgtttgtgatctattgtgagcccaaacttaaaaacttccgatgtctcccctttaacctctatttgggacctttcggtcaatgtatgccaatttttagtgttggatctttgacctgtttcaaaattcacaaatttcctgacgtgtacacccacaaatttcccgatatttggccttgtgggaatttttcaaatatcacgttcggtcacgtggtttcttacatgtcgttcgttatacccacactttttaggcccaaagtgaggagggtatattagaattagtctcacattgctaatgtgtagaaataaataaccatatgtaagatgaatgggctactctttccattgtcaattgattttatgatggaaccttattcatcttattctaaattctaatactatttgtttatactaattctctaggtagttgcttttgcttgcgctattaaacaagaccaagaaaattatcaccttagagaattatgatatggttaacatttagagaatgcttgtttatatgaaataattatttggtaaaatacaaagatgctataccattagagataaattagtgttatcatagaaaattatgttgatgtcaccatatgatattgatactatctccttcttaaaaaaaaataaaaattaaaagtaaataaatagtgtgacaatatttatatataattaaaataaataatatattaaataataatatgtaatattataattacagtattttcaaaaaagcactatattattaaactgttttaaaagtaaaatataaaaataaaataaaatnnnntattatatttttaaataatgtaaagattttaaatatctttaataaatactacctattatactctaaaaaaagacttggcataactagtttgaaatgaataaggacaaaaccctgaaagcatttcttggagagtcagattggtgatcactacggttgtgggacatgaatcacatttgctaaatattaataaattgacaaacataattttagagagcagtgactttaaaactaaactaattaaaagataagcctttttcttttaatattcaatacatatcttgaatatatattcatatattgagccaaaaaaaaaaaaaaagtattaaattgcaggcctgtgtcaatgatccaaagacatgcatcattttatttttggctcctaatgaaaatcttaaatcatccttatcgctaagagttgaatcaattttcgaagtactaggcaagatcaaagtctgaatacgtactctatatattaaaaatctaacctttaatatacaatgacactttaccaaattaaaaaaatatatacataacaaatgatatgggacatttaaaaatattggtgagacatttaattacatgttcttattggtgaagtgtataagtaagaacttgtatacatgcatattatcttatctaatatagattaaaatattaattattatcttttttttttacaaaaagtccatatacggtccgaatatttaaatatacgtataatataccaaattattcattgatgtagattgaattagatcacaatacaaaaaatctcactacaaaaaaaattaccctatgtcggcagttaaaaacccatgacatagagctatttcagcagttcacaactaccgataatctgaccgtcaacatagatgtgatgatctatctcggtggttaaaagccgctgagatagagtgccctatatcggcggttcataaccgtcgagatagagtaccctatctcggcggttcacgcgggacctgccgagatcgggttcccataaaataattttttttattttttattttttaaaattaccaatctcggtggttccgtgtgtaaatgccgatatagataccaacgtcgacggttacacacggaaccgccgagataggggtgccgagatagtctaattttttagtagtgtcttactttcagtgacaattgataatcaacttagggcgatgccttcaatttccaaatctgatgcaaccattgaatttgacatggtaaaaaatgaggggagtgactccagacttggaagtatcaaaaatagaatcacaggagcttggtttagaggccctagcacccaggtcaacatttggcttggttcgctgggttctgcttatccgaatctgaagtcgttttgactgtttgtcaagtttttcacaaattcaataatccatgaagtcagatcaatcaaattcacaacttcaattttagctcatctagaagccagaagtttcgagtttttcgtttccataaaataacaacatcttcgagaatgtgtgaccaacttcaccaaaacatataaaaggactaatgggtgtcaaaccatcacttgcgcatctcaaaggactttccttggatgtttctacacctttacatcatccagattaacttcagatgtcaacttgggcgttagaaactgatctgccttcagtaaaacaaccataactcactcaattttcatttgattaacccaattcaacttgaattttgaagttgtttaagccctctatcaagtcttgtttcatacactagtagaaattttgaatatctatcgtcgccaaaatttatccccaagagagttacgaatataagctccaagtaactcgcagcgggacccaccaaacataaaaaatcagccatcactatatcaaatgctaattttcaccgttagatcatcattaacggtggaaaacactttgtttttaatttatctcctatttttgtgggcctctttcacctataaaatgagagtttccttagtttagtttttaactttcagaaatctacccataaggtcaaagcttctctctctagaaattgaagtttctgatacttatacggatgcattaattatcatctcgtgagaaataaaaactcaaagtagacatagctacattactattgcaacatagaaggtgaactgctataaattgttgtgtctctcttattaattactttctattttttatctcgtcaatctaacgagcgggtgtgacttagaagtctagtctaaatttttgagtcaacacgggaaatgatattcgggttgtctgatttgacaacgatagtaacatttgaatattagtttttgagtatcatggttgttttattaaacaaacaaaaaagacattagtatgctagattaggcatcagagttgttttgttaagaaaatggtgtgaatggttcctttatgaagtaacggttatagttattattactggactagtaattgtgtataactatatatcattatattgacatttgttgtgtttgaaaatttttactgacccagatttaaatatatgagtaatgcacgattatttgtttatgatgatgtgagtttacttgctgatatttatgggatgagttatatgattgttgttattgttttccttgttgagtctttgtgactcacgaatgctttatggtgcaggttagggcaagggaaaactagtacaaccatgagatgaaagtcttctccgacaaatgtacatatcgacttatccgacttgtgtggtcgagttgtcagaagttgttttgggttgtacctgatgtgtattttgacttacttttgtatataaccctttttgtaaaacttttccaatatgggatccctaaatttttagcgatgtcatcttgttcattgttatagttttattttggtgaagttttactaatatcacggttttaattaaataattaatctactattagtaaactatgtttcaagagcaaacacgtggcattcctagggtttaaggcattacaatgacactataatattcatgacccacaattactaaaatgattactttatttgggtcaagcttcaaagagtaatatacactaatacatatgagcccattataatgattttaatcatataattaaactatttgattagtaaaggtcgacacaataattaaaatatcacagtgatgtgcctcaactagtaagacgttataattaattttcaaatattttttttacttaaataaaatatatgttacatatttattttttaaaaatcacatatactaggtattaatgaatttttattgttattagtgttatatttgatgttttagtttttttttcatattaatattcttctatttaattataaccaatga

SEQ ID NO: 79131 - DNA, 2017 bp, Cannabis sativa
ctttttagtcataacataagaatgttgatttataattagtcacaacttttttaattttaattacaaattttgttgtgattaaaagtaaaatttttgtagtgagcatcagaaatcacaatagccacatgaaggcaatcagtgaagatacaagcctcttgaattcccaacctactaaggaccaccatgcccaaatgaactacctctaactcaccatgaagaactgaaacaacagagaatttaaaggcaaacaaagccaagactccatcttgctcacctctaaccacgataccaaccgtcccaagaccattcttaaacgtaaaatccacattaacatgaatcatgacaggacctggaatcctccaactctgagcatttgtgtggcaattaaattctgcatcgatctatttttttagtctcagaagcatgccaagttcctccattgtgatgattggcattcctgtaaaacaaaagtttttaatacaaaattgttggaaacagagtgaaatcagtcttctctatattgatgtgcactccttaagagtcaaatggatttaaaacctccccattaaaatggaaaagaatttcattaatacatatatccatttacaatcgacccataagtgcttcgtaataaggcattgagaggaaaagtgaaaaacatcatcactccgctcaaagccacataaggaacaatctccacagtggctattgaaaatagccgagagtcgagaaccaaaggggagacactccttgtaaaccttccataaggagagcttcagtcgatcatgaacactcgacttccatatcttagtagtagtatccttaagagtgaactgtttcttgtttaaatcccaataagcatgcatggttcagcgagaagcttccattagcagaagaatgccaaattagtttatcctttttcaaaagaagagtgatgcttgaagagaggatagtattaaacacgcctgggatgaataatctagagacaacgttgctatcccagtcaaaaccatttttcctcaacaagtcctccacttcggtcttatcttttatgcaaggattacaatctgagggactaatgaacttcccatcacatgcaagaccattgacaattccagatttccacatcagagtgtttgccaacaatccacgcgttattatctctaaaattccctaattttccagattcctttagacactagagaggcgttcctaggaagaatgacgtctcaaaagctagaagaggaacaatacttctcttttaacaaagtaacccaaagagcatttctatttttggctataaactagccaagcttggccaaaagacataagttcatatctttgaaccttttaatacctagacctccacagcacttacttacaaatgttctcctaattcaccagagaaagataccactactacaatttagacttttagtgacattatttagtgacacgcagaaaaatgtgagtcactaaagatttagaagtgatttttagtgacatgcacaattagactctaatctttggtattagtatcctacaatgtgtgtcactaaaaatatgaagtgtcactaaaagataattccataatttatataatttttttatttttaaaaaaattattgacctacagtgacacgctagttgtgactggctaaatgtatcccaacatgtttggcgcgtcactaaaagttatttttttaattattttttaaaaaataatcagtacttggaaaatgttcccaaacttaattaataataataaatggccttttaaaaaaaaataatagaaaaagacagcatattttaccctttctctttctcggctaaatgaaaaaaaaaaatatcttgtttcaaaaaaaaaaacaaagaaaaaaaaaacctattatttttaacaaattccctctctcattgctaaagtaaaatataaagttttttttttttattgagaatgtaaagacaccccaaaccctagtagcagcaattagaaaaaccacacacacacacacacaca

SEQ ID NO: 79132 - DNA, 5638 bp, Cannabis sativa
cccatgcggcattaaatgcgaggtgactgttcagataggatttgatacctcccggaggtgcttcgttgtagccttgctctccaggagtatatggaaccttcataccttctccgggaggcatgttaaatgctgatcctcttgattaaggagacttagtccaattatctcaaagtcttgcttcttcagtccacgtgtcacagtccggttggtccacgtattttggacaaaatcaggggcaacaatatttttaatattaaaaaataaattaaaaataattaaaattcattacccttaatgacattccttacaaaatttgtgggggaagttctccatttcttttctcccttatttaatcaagttttcattttcctaattttaatgatgtaagtaaacaaatgtaaaggaataattactttactgttaattctaattacttagtagtaaacaaattaaccacttgtggggaatatttatttatttatttattgcaattctagctctcttttgtcttcttcttcagcttttacagtcttttgatttacttttcctccattcctttttattgtaaggacactttcctattagcccccattttataatttcacccccaattttcagacccaaaaatatttgacacaaacacacacgatcttcgttcaaccagaccagagagcttcaacaatttcaattctccgtagacgatccatccaggttaattcattttcacaatttatttgctcaatttgtgtatagttaatgcatgttgttcaatttccaaattgcattgtagtttccaaattttctaaatagtttttgcatgtttgaatattcaggcgagtcttggaaatacaatggggggttcgatgaatgagaactcagacgattcagagatgagtgatggtgaagtggatgagtttgttgagaaatcttacgaagacctaaagaatggtaaacatcaggtgaaactttcagatgagactttcaattgcccttattgcccgaagaagaagaagcaaggatatcattataaggatatactccaacatgctactgggattggaaagagtacatctgataaaagaagtgcacaagtaaagggtagtcacttggctttagcaaaatttttggaaacaaatctagctactggagctagtccttccaattccaaacccactggacaaactgctgttgatgtaaataattgtgacaatggtgtcaagtttgtgtggccttggacagggatagtggttaatcttcccactagacaggctgatgatgggagatatgttggagaaagtggatccaaactgagggatgagttgtgtcggcgagggtttaatgccttaagagtacgtcctttgtggaattaccgaggtcattctgggactgctttagttgagtttaataaaggctggcctggtttggaaaatgctctatcatttgagcgagcttatgagagtgataagcatgggagaaaggaatggttagccgataatgatcaaaaatctggcctctatggctgggttgcacgtgaagaggattataaattgacaaacatagtaggggagcacttaaggaagattggagaccttaaaaccatttctgacattatgatggaagaggatatcaaacagtctagacttatatctaatcttacacagatcattgagatgaaaaacgaacataagaatgaaataagattgaagtgtgctgaaaccactgcatctcttacccttttggaggaagagaaagataagctgcttcaaacttataatgaaggtatatttgctttgttgtttcttttctttttcttttaataatgaatttgggcttatttatttgttcatgcattttgtattcagagattagaaagattcaatcaagctcacgagatcaccttcagaaaatttttaacgaccatgaaaaagttaaggctcaattggaatctcagaaaaaggagctcgagtttcgtcgcacagaattggagaagcgtgatgcaaataacgatattgaaaggaaaaagctcactgaggagatagaaaaggtttgacatgttcacatttcatggtgctaatgaattacaatctccagttaatgatgattagtgtgtagactttataaaatgttaataattcaggtaaactagaatacacatggtccttcatttgtattgtctcatgaaagtttcgaagtttgaaagttaatgctcatgatctttcatctgtgttaatgctcatgaatacacatgtaaagtttcaaagttaatgctatgatccttcatctgtgttgtctgttctggtgagttatttaccattactgttgtcattagaacagtttgtatgaatgacaccattaattaaaatttacgttaattcatatctatgtaatatactaattatgtttgtgggtgcacttgttctgacaaataaagttccaagcatacattttctttgacactagctccctgggactggtaactatagcaattgctatgtaggtactcaggatggactctcgaaccttagatattgtaggagaattccaagcacactctttgagattatttacaacagcagcatgagctgccaacttgtctttatgctgactgatgttgctataaatttgataatactgatttcattgttctttcagaatgcaataaagaatagctctcttgaaatggctgctttggcacaacaaaaggctgatgaaaatgtgactaaactggctgatgatcagaaggtttgtaacttgctcttaagaatttaaatagtagtaacttatttccttaaaattttattggggataaactaaacataagtgttctaattttatccagaggaaaaaggaagagcttcacaatagaataattgaactagaaaagaagcttgacgcaaagcaagcacttgtattagaaattgaaggactaagaggcaaattgaatgttatgaaacacatgggagatgacgatctggaagttctagggaaggtggaagcaatacacaaagttctgagagaaaaggaaggagagtatgaagatttagaagctttgaatcaaactttaattattaaagagcgcaagtgcaatgatgagcttcaggaagctcgtaaagaaatgataagtgtaagtgttatctttctctgtgttggtttgtgcgtcacatgtagcttattgctttcagctaaatgactgtctaataagatggtctttctccgtatttttctctgtttatgcttgctactagtatcagtaactctagcttgaatggaaagtaatcttttgagttgtagggcttgaaagaactaccaggccgagcattaattggtgttaaaagaatgggagaattagatagcaaaccatttctggaagcaatgaagagaaagtataatgaggaagaagctgaggacagggctatggagctgtgctcactatgggaagaatatcttaaggaccctgactggcatccttttcaagttaaattgattgatgggaatcatcaggtttggtttttatgttgttttgtctagtttggttgcgtcgactttatgaactatcatagtcatagtgactttatgaactttcatagtcgtagttttcctatgcttttttctctgattatgcagaaacaatcacacagcatctatttgttatcattgacaaagcctaacaactacccggcacctctattttctctctttcttgaaaacaaaaatctattttcaaatttaaaatattaaattagttttgtttgtctattttccatttacattgagttggactgctcatctaataggtagatcaatttgcagatctggtagcaataactgtaatattagttttaaatatatttggcaattctttgtttttttggtgcttttgagaggattacccaaaatcagtgttcctcttgattcaggagctgatcaatgaggaggatgaaaaattgaaaggtctgaaaaaggaattgggtgacgaagttttcaaagctgtaaaatcagctttggttgagataaatgaatacaaccctagtgggaggtatataacctcagaactttggaactatagagaaggaaggcgggctactctgagggagggggttgaacaaatgcttaaaatgtggagatcaaagaaacgcctgaaagaagacgagtgaaggttaattcttaacaattttctatgagaacattatttctaagtttctatatctttcattgttttgtgcaatggcttatacttctttagcatcaccacaataaggttagtagttttgtcttgatacattcttttgctttattataaaatcacatatgtagaatttatcttggaaactacaccacttaaattacctcagttttctgtaatctactttgtagaaacaagagtactgtttacttagcattttcacgttgaaacatttcctgttttgcagatgacataattaatgttgttgaatgctggtggaagaagaaagacgtgtagccgggcagtcttcatgtcgtctgggggcacatatttttgtgttctggcatctattttctgtatagcatattaagtgcagatttttgaatctgtagaactgaatatgtgccaacattttctcaatcctgcctgtatgtgcaggaataaacgtggttggaaaacctgtttcaccatcaactcattagcgcaatctgaaattttagagtaattcgtgggattctttctattaacagggagctttataacaacctaggagataagttaattgtgcaattcactaacgagtctcatatttcaaagaaacttgatatgtatttacaccaatagtggtatgggtgataagatttagatccaaaattgctgtaaagaaggcagttgaatctttattactcatcaagaaagacaaatacagtaaaaatctaaactatttgagtcagtttggaaaccccatagaaagtagataggtttggcttttggtcctataaataaacttaagtgtactaactctctaactaactagcgacttattcttgcagttgatatatgttaggcatgtaagcatatttgaggcctaacatgtaagcatattctcctctaggtgagtgaatagaagaatccattcttaaatgtttctgcattgtctggtcttgtcccacctccaagaacaactttggaggttcatcgtacaagaaattctgattgcatcattctttttctcgcttaaataatctttataataatactcattgtaagaagaaatttcccataggacattttaatactctgtcataatccgtacgtggcttagtcttgcagtcacccttcgcttcttatatcatcattttttccctacaagtagaccagtcagttggattttcttaagtcgtcgccccatcattgttgagtttactccgttcttggttagctttgacagctccttttgaggtcattcacacccatggaatcttttattgaagacgaaatttaggttgtcacaatattggaagtctcagaccatctgcaatgtgttagatttagtcaaaaaaaaaaaaaaattgagtaatattacactttttacaattgtgcaatgtgttgatttagtcaaaaaaaaaaaaaaacaaaaatgagtaatattatatttagcacactttttacaat

SEQ ID NO: 79133 - DNA, 2859 bp, Cannabis sativa
ttaaaaaaaaactagtttcaaaaattataaataaacaattaagaaattgaataggcataagacacctaagaaaaaaaattcaaataaacgtataaaactataagaagataaattgaaaaagacaacatacttcaaaaagaaacaaaatgtatcaaagatgaattcttaaaacttggattaatttacttttttttttcttggtatatggaagaagttcctcctccgagtgaacacttaaaatctttagcaacatcttcaattgcatttttacaagaggagttagattccatctgaacaaaaacacaaaaaataaatcgcaatttcatcatacaacaacaacgaacattatgaaacaaaataaatactaattttgtcacacaacaacaatgacaattatgaaacaaaatataaatgatatacaataaaaataacttaaactaatttcatcagtcaaccaaataaaaaattacaaaaaaatactaacaaatataatcagaacaacacacaatgcacaacaataatctaaaaaaaataaattatagatataaaaaccaattttaaaactgcaccactaacaatttatagcgttgataaatttatagacataaatattattccattgcattttatagatttatattcagtaataattttgaaagctagcaatgaaaatgtcattgcggaagtgacatttcctaaaaaaaatgctaaaagtgtctagcacccttatatgtgctaatatctctattggtctaactaagttttgagttcaatatagtttaatataataattgttaagaagtagcgctagccgatcacaagacgatatatttagaagtactagacactattgtggctaatcacattgctcaataaataaataatatgtataaaaaattctattttttttttatttttttattttaattttataccaaaaaattctactattgttgtggcacaactcagagtgttcaaataaaaaaaaagttttgtataaatataataatatatcattttattgttttatttaataaatcatgctattttattaatcacaatctgttaaaataatcgtctgtaatctaatcgggacatctttcctattggagacatgaccatgattaaaattagaaaaacgaactaaataatcagcagaataattctcatcagataaaaaatttaaaaataaaatcatattaataagattgcagcatcagagtttactttaagaacacttgtattcagtttcatctaccgcttagaggacacaacagtagaaactattacagtaggtttattcatccttgtaacttgagtactcaactcttgtacaaggtacgtaactgcactacatacaactacttcagtcacagagaacttgttatatatttctaactactaatatcaatatgatgacgagccattgaagaacaaagaagaaccaacaacgaaaaaaaaaaaactatgtcacacaaacaagactaaaacactcaaaatcatgtcacatggaaaagactactcaccacagcaaaaatcctatcgcaatggcaaaacataaccctgatgaagccggaactatgctaggaaaggcggcgggcctgcccagagaaaaaaaaaataacctcttatagctataaatataggaacgaaaaaccctacaataaagacatttttatattattgaaaaattattgttagttttattttatcggatgtgattatgatcattgttttttcgtatagtaataatggaaggaaccaatgtgttgaattcgacgagtacagttcttcgtattcatggagctgaaggaacagaaatggtaaagcaaattaatactgttgcttcaattgatggaaatattaatgcaaatggtatccacatcaacaatatatcttcagctcaaccacgttacccttctcaacatttgctcatcaacagcagtaagaaacatacaattatatagatattccctttcaaatttaagagcataaataccatttcaaataacatcagcaagtactgtagtaatattaatagtcacattaaactaaattgatttttctttttccctggaaacgcagaagaagctagaaaaatgtacttggatttcggtgtgccactttacaaagccgcattaagaggtgattgggaaactgcaaaggcaattctaatgaaagattcgagacttttaactgcaagtatctgcaaaggaggccagaccgttctccacttcgctgctggaacaaagcacgtccacttcgtggaggcactggtgaaaatgatgacagaggatgaattagaactcgcagacaagaaagggaacaccgctttctgttctgctgtggcgacgggggaagtacaagtggctatgattatgctccggaggaacccaaatttggcaaccattagaggtggaggggatgatcataaggtgacgccactctatatggcaaccatgtttggacgctccgaaatggcatcgtggttgtaccccataactaaggaaagtcttgaggagaaggaccgcattggaattttttttagttgcatctgcactggcctttatggtaagtatatcaattccctagatgtcaacatatttcattgaagttctacaacacatactcaaagaccattcaaactgaacaataagttaggaaaaaggctagaataactaactctatacttcaaaaaatgcaaccggttttatactggttcatccaatatatcacctactctagttttctctaagatagcatttggtgagaaagaatgataacatataaataagaataataaaattagaaataggaataaaatagaatctaacttaaaatgcaaaataataataataa

SEQ ID NO: 79134 - DNA, 1302 bp, Cannabis sativa
aaccatctaacaaatgtagcttcaactaaacccaccaccgttcaaaccctcaacacaaacaccgaatttttcaacccaaagctcccgcccagaaccatttcctcttccaagagatacgagggctcatcggacctggttaacctccggtaccacatgggaccggttctttcatcagctccgatcaacatttacctcatatggtacggaaaatggggtgtatcccaaaaacttctgatcaaagattttctcctctcaatctcaaccaccgaccgtcgagctgcgccgtctccttccgtcgccgaatggtggcgaacggtctctctttacaccgatcagactggtgcgaacgtttcaagatctgtcgtcgttgctggtgaatactctgatctacgttattctcacggtaacgcgctcacgcgcctctctgtacaacaagttatagctaacgccgttagatctgcgccgttacctgttgatcataaacaagggatttaccttattttaacggcggaagacgttaccgttcaggatttttgtcgagcagtttgtgggtttcattacttcacatttccatcgcaagtgggttacacgctcccatacgcttgggttggaaattccggcaagcaatgtccggaggtttgtgcttacccatttgccatacctggttatatgaccggaggtggtccggtggctttatcgccgccgaatagagacgtgggtgtagatggaatgatcagtgtgattggacatgagttagctgagctagcttcgaacccattagtgaacgcttggtatgccggagaagacccaacggcgccgactgagattggagatttgtgtgagggtctttatggtacgggcggcggtggtgggtatattgggcaagtgatgagagacagaggaggaagaagtttcaatgtgaatgggagaaaaggaagacgattcttgttgcagtggatatggagccctgttttgaaagcttgtgctggtcctaacgccatggattgatgaaaccaagctaaagaagaagaagaagaagaagaagaagacaagaggtaattttgatcggaggacggcggcgcgtgggggaaatgagtggttttgaaattggttaaagaggtgggaaaaagttaaaagctttacttgagctttgttgtaattttttatttttatttttttttgttttgatagtagttataattttttttttttttattgaagtgggtaattttagatgtaaataagggaggagatttctctttttaaattatatatagagttttcagatttttatagcatatt

SEQ ID NO: 79135 - DNA, 4475 bp, Cannabis sativa
  modified_base (364)..(364): a, c, t, g, unknown or other
gtttctaaaatggaataactatcgttcaaaattaaatgccaaaattttaattaatacatttatttctttttttggttgtttattaaattaattattttaagaaaatagttaattataattatttaattcttaaaaaaaaaaattacttaataacctcccatcacaaataaaaaaaatataaccataataattattataaaaatgtaatcattaaataatcattcatataatacacagtaaaacttctatccaagaatatacttgggaccaagtaaattatactttaattgagaggttataactaaatagagttatagtagaaaaaaaagaattaaaataccaaaaaatatcaatgtaacaatantaacaataaacaatcattaatactatatcataatagaattattttagagtaaatacaatatttatgcatgtattataatttagattaaaattattaattttacataaataaatttacaaaatatatgtacatattttattacgatataattatttttatatagatgtatattttgttaatacgggacttagaaaatttataactaattacaatttagtggttactcttatttataatactagcccaaattagaacttgattttatttataacaaattagaggttattcttgaatagaatatttttaaataaatgttcttctgtatatagaacataaaacaaaaacaaaaggaatactcaaaatatatttttttggcgaataaatactcaaaatatttaatatactagatatgttagaaagcaattatacaaaaattgaatttaatcaaaatgaagaaaaaaaaaagaaaactaaaatcttattaaacgcacagtaaaataaaaattttccaattaatgcctttagaaaatattgtttttttttttttatgattagaaaataaaataaagttaaaattgaaaatatagtgcaaaaacataatattatgtgattgttacaaaagaaatatatattgaaaaaagaaaagttaaactttaaaaagaatatattaaaaattacccaaaaattaaagtttctaacatacaattaaattattgtaattactcttaaaattacaattaatgaaaaccaataattttaagtttcatttataaatttatgaaataaataattttttttgaaatacgaaaatatataataataatttataaagaaactcaaataaacaatgcaattaataacatttaaattcttccatttagactaaaaattttattggcaagaaaatatcagattataaatcataaatctaattaatatatttagtgcactaatgacccaaaaaactttctataatattctaaaattcacctaaaaaattaatgataatatatttattcagaatatatatgtatttaaaaaaaaatcatatatttactaatttattaccatatataatttttttttaatatttcatataatttaatattaattatttattacgtatctttaacataaagattctgaagtgcttattatccaaaaaaaaaataatataaatatgtataaaaaaattctttaactttaaacatactctctaatctctctttcgaaaaaaatatataatttagcaacacaaaatattgaaatttcatcaatggaagaaccatctaacacaaaggtaagtttacttttgactaaaccaaatatttttttaaagagaaatgttaaaagggcaccttaaacctacatttgttttgttttttttttgtgtataatcatcttatgaagaatatccaaacactttgttgtggatcctatttgttcccacttgagaatcttgtgtatatgatatatttgtttcttttctctctagaaattatttccttgtatttatttacatcttgatttggtataactatttttttgggttaattttcatttgttttgtacattatgtaatatgtatctttgttgacttcttctgttttgatattgtataagatggaatgcccaattaattctgtttgttatatacagttaataagacatgtttgatcttaatttgtatataggattcattattcattcttttttttttcttttctagtttaggtatatgtaaagaaaataaaaacttaggtaattagagtttataatagtttgaattgatataaaacttgaaattattaatatattatgttatgttaaatataatggaattataattaccttatagctacaaataaatatttagtttgaaattgaataattcaagtcattgtgtgggctaaagagtgaagattggtccatattcaagagttgttttcttgtagatttctgttatgttaatataaaaatatatatgtccaaacagagaaaattttgagtaagaaaaataaaaataaagcactaatttggtagtctaagagagaaagaaagtattttatttaagttagctaggcttatgaagctaatctgctacttaatttcttattttacaaattcaaatggtctttaaatcacttaaagggacacattgatgtaccttccttttttattagtgtataaagacaaaggcctcattctaaaagaaagaaaattgatatattatgacactttttttttggttatttattgtatttaaaatgtatgatcattatttattgcttttgcaggaaaaacaatctgaacagagtaataatatttttttcgagtttgattctagtgatattttcgctactgatatggtattatgtgtataatttccttcttttttttttttttaatttttttccctttaaatgtgaagatatattcaaattttaataattcattttatttattttacattttcgtgtaggttttcaattccagagaagctcttattgaatggattaaaagtaaaggaaaacaacacgaaatcaatattgtaattacaagatcagattcaggtaaaggtcgaaaggcaagaattacatttgcctgtgagaaaagtggtagtcatcgacaggtaaacaaaactcaaagaaaaaagagaatattaacaaaaaagtgtggttgcccattttctttgagtggacaaaaatcagtaacaaatgattggatacttaaagttgtgtgtgggtttcataaccattcatttgcaaaacatattaataaaaaaaattttacaaggaggttgactaagaaagagtcaaagataccattaaatgtgtcaaagtgcaatatcatgcttcctataatgaaagaaaaaagcaaatctaatgcctcaaaaactaggaaaaggggcaatgcaagacaaaaagatagagttcacaaaatgggagaatgtatttcttctgatttggagatggaaattatacgagtaaattataacacatcaggatattcacaatcatatatgaattcattaccatgtgagttgaaaccatatattcaagtaataaaagatgtggcacaagatggaaattgtggttttcgagctattgcaggcttgttggacatgggtgaagacaactggaggcaagttaggaaagacttgataaacgaattagatcatcatagaaatgactataagagactatatggtcattgttttgacaatgtggacgatttatgtcgtattttatcatgtttcgatagtcgtccaagtgtcaatcattggatgatcatgccagatatgggacatattatagcttctcgttataatgttgtcttagtgcacttatcaatacaacaatcgtttacatttcttccacttagatcgaatccttcgccgactgatctacataaacttattacgataggttttgtcaataataatcattttattcaggtattacaatttaattttcgaataaattatttcatcaggtattatttcttatattttatgaagttttacattattttatcttttgttatctacaggtgttcatgcatgctggttgtccaatgccacctattactaaagaatggtttatgtatcaccattcgtgtgccaatggatgggagactctttatgaagagcaaattaaagcttatcataatttagttagaaaagaagtaaccacacaagagattattaatttagatagtccatgagattttttttctctttccctatatttaaatgtagtttcaaaacatgaggtttttgtctattttcaattatgcatgatgaattattaacatgagagtagtttgcttccatgcatgagtgcttgatcttttgtaaaataataaaatatttcataaacatgtgtttgcttcatctcaagctaaatatgagttagaccaattaagtatctcataaatacttgtttagccaaaacaagaagtatatgacatggataaaagatttgaaatctcatttaattatcagatttgactttcacaacaagtcttttaactaatagtgtttggtcggggtaatggaatgacaaggaatagaaagtatgatatttttgaggagtgctatataattgaa

SEQ ID NO: 79136 - DNA, 5153 bp, Cannabis sativa
tcctgacattgccaattagttttgagatagaaaaaaaataaaccttgacaatcaattgggtagcaccaaacatgttaggagtatcaactccattaagataagctttgatctcaggaataccaggaccagcagcagttggagcaaaccaaacacagagaacagcagcaaccatggttagaaaaaaattggctgcagtgaaatacagaagccccataaagtacctacaaacacatcacagtttttcaattatggatgatgatgatgatgatgatcaatacatattagcaaatataataatggtgatgaatactaaattaataataatcacctgtcttgttctatataagcaaacacagaaagaagtttataaccagcaatgttctcaacagcaaggttgataagagtggctataattccagtaagaagccccacaagacaagcaaatgtccattttaagaaaacatattgaagaacttgtactctggatctgcttctccagtcttgcttgaacagatcattttcattgattctaaaaagatcaaaaatcaaaaattcaaaaatcaaaagaaaattcactaaaatgaactgggtcattgaaaagatttgatttttttatatacatatatatatatatatatcacttactcataatccaaactctctatatgagagactttggtgccaacaatggctaaaggattagaagaaagtgttctgtttcttttgagcagagtctggcataaaggattggtttctgattctctagcttccaaatcaccttctgttgttgattctccatagagccttgaatcttgttccattagaagaaaatattactgtaattttcctatcttcttcttcttcttggttaggatttttggaatcaaaatgagcgtttttctgttgagacaaaactcctcaaaatattacaagagttatcatcaaactctcttcttcttttttatactcaaccacatgtttcatttgtttgattgtgtctttttcttttttatatatataaatatatttgagcaataagtcacaattatgctaatgcagatataaatatataaattattacttaagagggtgggtatttatttatggtaaattcctaatataaaaaagtctaattataacaaaatcctttaatagatccgagagaaaaggcaaattatgattattatatattaatcttgctagctaaggtggattactttagatttaaatatttgccattattgtgtattgattatgctcacaacattagcaataaataattttattcttttaatgtataatcactttcaattataattagatataaatttccacttatcttgttctattttataaatgttaaggagaaaataaaagtctttgtttcatgataacacagctaatatatagttgggagtttttctacatatctatataattatttgtgaagcggaaattcgaccataaatatgaatataacattaaataatcatagtaaattgatgatatttatttgaattattatttttgttttaaaaaagttgggacaactttttatgaaaaaaatctcttcaatgaataatgagatctctcttttttttcatttgataagtgtagctaccaatattcacgtgagttatgtgtaccttaatgatcttttgaaaataataataataataataaaaattattatgtaacaaaattcaagaaaaaaaaaaacactggtgacttggtccaatcctaacccaaacctataattgtagaaattgagtgttgggaccataggaaaaataaatattaatatataaaaatagaaactttatatcaaacctacttgcttttaatttatgccacatgcatcttttttatttatttttaacatatcactatcattattgggaaatattatgtatacaaatacaaaataaattacgtatacatgaaaaaggacaagggctcaaacaaaccttcttaactattgaggttataagtaaactaataacataatatcactttcactttcacttcccactatgatttctagcacttacaatattatatatttgagtttttatttatttattttgtttagtggaatgttatgaagtaataaaatgatttgaaaaaaaaaatattatagctaaaaatgaagtaatcaagcaaaaatttaaacccatttggggctcaagtgaaattaaaaggcatacaaaaagtaaatttaaaatacataaattataaatcataaaattttaaaagtttaaattactattttcatcattgaaacaaataaattctcaactatttttgtaaaatagtattacatttttttcatttttttttttacaaaaggaacaatattcaggtctactcttcctccttaaaatgcataaaagcaaaaggatgacagcaaggaaaaagaaagtaccttataattggtaaaagagaaaaagttaaaaataataataaataaaagaccactatatttttatattaaataatactaatctgaaataattttttcaaacttattacatacaaatacaattaattatgcacatgtagcaaacaaaactaagtacataagcaaaaacagaataacaaaaaaaaattaataaaacatacaatttgccgaagtggacactttctactttctagcaaatacaacactaaagagttccaagcagttagcgtaatacttaataaaaattatttattcaaaaaaaaattattaaaaatcacatggtctattaattatagaatcaaaaaaattgtcaacattattactatatgatctattaaaaaaataataaaactaaaaattgaaaagtaaaaaattaaaaagaatgatactagtcacgttaaattgagttaaattgggtttattaggtgatttatacttattttcgacccgcctaattaatagattggatggtttataatttgattgggtttttttgatttgtattttttatcaattttttcagtttggtttggacagattatttgagttggacagtttacgaaaatttttgtacaaccctactgtaggggacagggaagcgtttgaagttagcggccagccggatgacagcattgggaacaacatgtcgagggaaacctcgatgatgatggagaaacgaaagaaaacgatggtgagacaaggatagattttataaaaacgcgtattactatgaataagatcctgaaatgatttgaatgcctggcgagctagctgaagatcaataaaagttggtggcgcaagaggcattctcactccatatgcagaaaatattggcttggttgcaagccaaactcagtaatacgaaggaagatattgaagaaaaatatcccaaaagagcatgtccacaaagagaaaagagtaaattccgctgatgttgaaccctctactcctgaaaaggacaaaggaaaggcgaagctaggtgagccctaacgaaaaactgtcccagattctccaagaaataacgtgaatacagtcaaccaaccttcgtggagaagaaggtcactgatgcctttgagcttggacacccttctgctccgccagacagagttttgcaaaacgataggcctacgctcaagtgcataggtctatcgttaggggatgaaaaaactgccctagtgatttagttaattaggacgacggggtggaagaaatctctcttaaagacagttggttcactattgaccttcgtagacgcttggatgccaaacgtgaaaaagccaagggagaaaagacaaggccttatgaaaatgacctacagaacaaaatcgacgatagaattcgtggacgtcagcttcgaggcagtgacaaaaaatgtttggaagaacaaataattgatttgataaaattagtgcggaaggaaagcaatctttggaagatgaagatccaaaactatttttacgtctacttttattattgtgctctataattataaatctaatgcaaaaattaatatatcatgtaatgctcatttaataatttattaaaaatataaaataataataatgtaaatgtaaatataaaatttaatagtataataataataatacaaatcatttaatagcaaagaatgttaactaaaattttatgataaaatattaaaattagcataatagtaagtataaaaatataatatttattgtgatgtaaattttctatcatgttatattgtgataaatttatatcacaatttggtacaccaataaaatagatttttaacaaaatgaattatatttacatttgtatgtttgaagattcttttataagcatcaatgatgaacatgtgtacaattttgatgaaaacttatttaattgggatgtttagtttttatatagttttatttaagttgtatgacaatagtttattaattcaatgatatatttattgttttttttttaaaaaaaaaatatatgaacatggtaacagaaactaaaacagtatgctgttatgctaatcatatgattaatttgatagattaatgtatatatattttttttgtttgtaaggataaattaataaaaaaaaaaaaaaattggtacaattattagggtaacaaattttgagcccccaattggggcatacaaaacaaagaaaaatttccatctcataatgttttattactttaaattatttgattggtcacacgtcgttggctgtctggctcgatcttgtcttatgtaaactctttctctctcttaccccatttgctattctgccagataagcacgccagatccacattgccacgtgtccacattcatctgatcatctaatctctcccatccaacggttacgattgtgtgacttttcagcttgtttattagccaccttatccattatttatttatatataatcaattattaagtttggattttggattgaaattagaaaaaaaaacatatttccgactacttcggattgccaccaagatggaccttcctaattgggcccaccattttcactccaaatgacaacttaatttgaccagccactccacgagtgacatgtgtaggtcccgatgatgacacgtggaaacggtagaagtgtattgacggatgggatttgtccagggatatgcggtgcaccgtcctgattgtgtggttttgtttagtgtgggccgtggggcccacatta

SEQ ID NO: 79137 - DNA, 1735 bp, Cannabis sativa
ttccatgtttgttgatgtcatttaatattctaaacttttgcttgtagatttgagaagtgtttctgttttatttgttaaacggtcaggtcagttaatatatagtggctcataaatttactagagtaatctctattttatattcggaccctcttttcactttgaaatatgttttaattgatttgctagcttgtttagtaactgaagttaacaattaattaaataaatatttccattaaaaaaacaaaatagggtcagagtcaaataaaatacaattaaaaatcaaagaatcaaacagaagtattttatcaaatataaattgtcaaaaataaaatttacagttttcctgattatttactggaacatttctccatagaggagaaaaaaagtagtgcttgttaatgttaagtagctcaccgaccacgccactagaaacaagggcggttaccctctctcttatatatatatatatggaggtgctacagttgactagtggcgcaccacggtagcttccactacaagacaccacgcaataaggaaaactacaaaactagagatctaaaagtaaaaggcatgactactgagccaatggcattaacattcaagcccacgcttgtgcactgcagccccactctaccatcgctgcaccctcctttatttgcctttttcatttagttttgtctaaactaaactatacacacttaaaatcttacattttatgccctttttctcagcatgtataaataaatacatccctgacaaagaaatatatatatatattatattaatttatatattttgttgcatgcagttcaacaacacctcatatggtccacgagccaggagttttatgcttttggtatacatgaacagtacacatatattatatatgaatacaataatttataatggatagatgacgatggtcagcgttgacacatacatggaatggaaccattaatataaaccaaattacatgggttggggttataactatatgtactttttaattaattaattattatttgaattagctatgtgtattatagttaggcatttaggtgttctgctagattctttttacttgtaattataattttgtatcagctttgatttttgtattcaacatatatagtaaaattaattcagtatgttatatgtaaatattgcaatttcacaagaaaaactataaaaacttgactattcaccgtatgctgtggaaggaattcacatcatatctaatcttatcattgggacaatatctatgtcaccttttgaaatgtgaaatttttatgtatacttttaagtatactattttccatttgattgtagcagcaatactgtaatactatattgaaaaacatttgttttatgaaaacgtatataggttcaaaagataaattttggtgtggactggtgatgatacaagcttgtattcttattagttgaaattacatattgtcaagacagttggttataactctttcggttataactgtttcggttatttgttattgttgttggcttttatgttttccaactaccttcgcctttacttgtatataaactcttgtagctctctcgttcaaagtaatgcaatagcaattttttttcagcttcttcttcttctcttttctctctattttcagcttaattctttctcttttactttcagtcttttctttcttgtttctttagtgttcttcaacaatggctagaaggagttctaaccttaaca

SEQ ID NO: 79138 - DNA, 2395 bp, Cannabis sativa
tatatatatatatttttttttaatcataccaaatttttttcgcccaaattttcttatttttctcacactacatttgggtcttccgctctctccgtcgtcgggcattcatgcgcaagttagctgcccaactcgtcactgtaagcttcatctacaatttcctttattcatattctttctttctctctacttttagtatatctcaagtataaaaaaaaaaaaaaaaatgagactttcggattacaaatttggtgatccttgtgcagcattattgcagaaaaagacctatacgaaatgggcagagtcgaaaattttcaacccacagtgaagcaggttaatcactcttatcctttcaactacttaatttgggtttttacttttcttgtcaaggttcttcatttctggaaataatttaccaaattaaaatgtttatttttaattgagatcgattttttatgtattgagtggcagatgaccttgccttggaaaaagatgctgaaagaaaaattggatgggtgttgaaactgttctttgctgggactgctacgttttttggttaccagatttttccatacttgggtctgtacttggatgttttcatttcatcatttactatctcagtttatttctttcttttgttacagcattttaatattatttatataattatccatgtaatgtaccaggggataatttgttgcagcagtcattgtctcttttgcatgtaaaggatccgttgtttaaaagaatgggagcttcaagattagcccgttttgctattgatggtaagctacttgtttgtgtctctgaaaggactttttatgtttaactaaatgccaatgaaaacttaaatgcccagttcttttttgttatttatgattgtttctcttcaatttaacttctcatttgccttttttatttatcacaatgttaattgaagtattggttggctcataaagaagtcaggcaagtgctacctttgttgtagaggggagaaaatgttagagtttgtgatgatactgaattatagagaaaatgtctattgacaaactagttagtcgttgtcattcacaagacacttggtgctagctcaagtttacttttgggtgtgtgggaaagggagggtttcaaaagaaaaaaaagtttcactcaattatctagactatactttgtcgtcagtcaattgagaaaaaagattgattcgttcaattatctttactttgttataggttatgttgttagtttccttcagatactttttatcttaagctggctgtgcattggattgtaacagttgatttcttggactttagaatttatatataaaacttgttcttttctttttaatgcttagatgaaagaagactgaaaattgtcgaagttggtggggctcatgagctcttaaagatgttggaggcagctaaagatgaccgtactcgtaaggaagctttaaaggctctctcggctatctcaaaatcaggtcagactcagttttccacttttctaatatgcctacggagccatgactagttttgaattctgttctcgctaccaaaacttttttcaattttttattttttatttttctttcttccaatgagttccttatagtcccttcaaatgctttatactaataaagattttctaagagaacgatgggctttgtgtaactacacttatgatactctactttcattgttggttggaaagaacatgttaactctcttgtatcaagacaagttacaagtacaatggtcctgtaactaacttatgatatgcttggcttggctatatttcaaagcaagtccttaacaattttcagttttgtaatcttttttcgcattccagataaagctgttgaagcattacatcaagctggcacaactgctataatcaattctaccccaaattcctcgcagaatattgaaatcgagcagtacaaatctagcttgttgaagagattccatgatctgaaatatgatgttccctcatgaattgaaattgaggaaatctttctgactctatcttctccctcggttttgtaaggacatagatgcaacagccagcatgtcctgcatgttggacagtgaaactgtagtttattgtttgaattttatgtaatctgtttaaagaaattagcttagaggtatgctggcggcttctttcttacagtggctgatcatttcttttaaagcacctggggttataaacatgtattctcatacagattctgttcctgtgaaagaaataagagcaaccttattgattttttttttttgataattaagatgattttattaagaaagcaaaagccaattaaggcaacatagtgaccacaaagggggccacatcccttaccaaaccagagactttgcatttttcccttctcgcccaaaca

SEQ ID NO: 79139 - DNA, 3539 bp, Cannabis sativa
gacgaagaatttgaatgggaaatgagacctggaggaatgttagttcagaaaagaatcggaacctcaaccattacagctacagttccgaatttgcgtctccgaatcgcttttggcgcgctccggtacgagatctcggtcaactctcaagctaccttcggtaatataatatttttcttttctcagtcaatttttctgtctctttcccgagaaaatttgagtaatatttgtttttttcttgttataattgaaaatgacgaaactaacctccaaactgcaatgcaagtagtgtttaatgaggggtaaaagagtaaaaatgacgtggttgggtggcaggggaggtgaagaagcttgtttcggcggagagtgggttagaaccaggtgaacagaagttgatatttagagggaaagagagagaaaatggtgagtatttagacacgtgcggagtcaaagatggatcgaaagtcatcctaattgaagatccaactagcattgagaaacgtttcatcgagaggcgtaaaaacgccaagatccaaaccgttcatcgtgccatctctgacgtctccatggagatcgataagtacgcggagcaggtaattaatacccacgtaataataatataatcaggttatatttttgtttttaattttaccatatttgagaattagtttgatcgttttaccatttatttatgatagttaatgaaaaaagaagaagaaaaacacatatgagatgggccatgaactgtcttaatttgtaaatatggcataatttgctattggttttttagttgttccattagattatacagcaatattgaataattatattttttagtcattatatattagttaatgctaaaagttatgcttacaactttatattcaatttggattttacataatttaattttataattattataaaatatcattaatcatttacaaaattagatgccttgtattgcaatacttaattataagtacttttaatcattaacaaagctagataccagtgtaatcctcatatgtataattatttataataaaaatttaatctttatatgtgaaaagtgtgcacaatttttgtatcactctctagcatttctcattactacatatacataatataataaatcaattactttgttggtagtgtaatcccctttgtgctaccttttatactcatcatttctaatttgggcaatgcattggttatgatatattattctcatttctttaagactttaattaagtacatgaacttgaagtactaaaagtaatgatttgatcataattttacaacaaagtcaacaaacaaaaacaatcatatttttgtgtgtgctgatggaaataggtctttgagatggaaaaatcaatctcgagtggcatcaaggtttccgaacttcaaatcaccacactaattgaaatgcttatgagacaagcaatcaaattggaaaatatacaaactgaaggagaaactgctgctcaaaagaatttacaggtatatataataaattttgtttaactctataactgttagattaaatttagtcaaagtacttaaagtacataacaaaaaagtagcaaaatccaatgtatatgtgtatcaatatagggtatgaatttgcagggaaagagagtgcagaagatagttgaaactttggatgcagttaaaatatcaaacgcaagactaaagcatgcggttgtgacaaataaatgggagacctttaatcctaatcctgctgcttctactactgccacatgggaaatttttgattaattttatttttcttaattatatgtagtaattaataaattattaattgggattatatgctactgtagcttcttttgttttacccttagtttgtgtcctctattaataataataaaaaaatagattttttgttttgattatgtcattaactctaatctagtcaacataccattaatttgaaagaaaaaatagtacatatatatattttaatcaagatcattttacaaactatgccgacttataccatgagtatttttaggctcatgaagaggacaattaatagtctccaccgaatggcgacaagattttggtggggctcatgatcagaacacaataaaaaaattcattcgtataagtgttcttatctttgtaagccaaaggaaaagggaagtctgagatttagagatttagggttgttcaatcaagtcttctagccaagcaaatttggcattgcatacggtcacctcattgtctttgtaaccttatcttgaaagcttgctatttttcgaatcgaagtatagaagctaagtgcggtaatcatgcattttttgtgtggtgtaatttgatttggggcaagaatattatattgaaaggatatcgatagcaaattgggaatgggaattaaattcgtgtgttacaagatccatgactctcgagacagatcacattgaacgtatatgataaacttgaaattcctggctgacttgaaactttctaacggttcttaggattctaacttcaccaatgcggtttttaatgatgatgatgaattgatacaaagtattcctaatggaggttgggagctaaaggataaggttctatggcactatagtaaaaatagcgagtatactattaaaagtgggtataaggctgcagtagtaaggaagaaagaattttcacaaattgatcctcgacggatgaattcatggtggacttctttgtggaaggtaatggggcctcctaaaattaaacattttgtttggaaggtctgtcattcttggttaccaattacgaatggtgtacttgctatgagagggatccatgtgattccttattgtaaccgctgcaatgcaagtcaacaagagggatgtttgttttaccatctactgtggggctaccgaaaaagtgtggaaatctggaagaaggtaacgtttgggaacaaattcgccaaataaaaataaggctaattatgatttttactccccgaactttaacatgtaccaaattatgcccctgaacttttaagatcgttaaaaatgcctcctgaactgtcgagataattggattttaggacttttgtctaattttagtaaaaaaaaagtctaacataaatgaaagttcagggggcatgatctagtatatgtcaaagttcgaaggacatgatttggtagatatcaaagtttaggaagcatggtttagtacataaacaatcactgaaatagtaaaattgaatgaaattaaacaaaaattcttaaatataataattatcaaagaatacaattactgctacttactgccctgtttttcctctgttactgatctttgtattcttgtttttacccttcctgcttataaggaattctgttagaagtttgttaagttctctaggattagtagttaatgttcgttgagtattattccagtagttttccataccgacttagggccctttcttatttaaaggctttccctttattttcattatgtacagtaatacattttctctttcagataaataaaagttctctttccttttcttatta

SEQ ID NO: 79140 - DNA, 5886 bp, Cannabis sativa
gtaacgtccccgcttcaagcctccattgggccttcccccacgaatttatggctcttatacacaagaacaccactctttctgcttcttgaattgacgattggacctacagaccaacacgagtatttttaacatgctttgtcctcactcgcacgcttcttgggagaacttcccaggagatcacccatcttgaaattacccgaagtcaagcacgcttaaatgtggagttctttcgtgatggactaccgaaaaacaagatgcaccttgttgatattggtagtaccaatcaatccatttaagcccttttcagctatgtagtcccatacctacacagtcttagaatcatcacacatgaccttccccaagcaatgtgggattttacaactcccggtctttccccttacggatcataggactactaattgtcatacattgggataggttggttgttaaccaggcgcttccccctgtcctaattgttacactagccgatattcaagctttgcacatcaatagtaacacacaagagaatgacaataatagtagagatgaccattctggggtcaaaagagcatacttccctatatttcgaaaattgctaatagaagggaggagaaagtttaagatgccaagtgacacgcccagaatggagacttaaagctttgagacctgtgaatgagagttttgggaaagttttttctaattgtggctctaacaagggaaaggctcctctggcaatcaaaaaggcttctgtgaaatttccttcttctagtccaaacatatatcgagaggttgatgctaatatctctctaaaccctaatatgcaagtgaacttagtggaccaggcaactattgggcgaaaagataaagtgagaactttctttattgggctgagctttattaatgaaaatgtgggtggggactccactttgggccaagaaacatctgaccaccttgatgagaatagagcaattggtaagtttttccaagcccaagatacatatatggaggaatttaagttatgcatgaatgttgataagcctaagcataaggtccactttgaggatattgaagcccaaccttcctcagaagttaatgaacacattcatccctttaagaagagacaagtgtgttctcgatttgtctctcatatttctaaaattgaatttaaactgagaagattccctagtgtgatacgtgactttccggttggagtgggacgtgaaactcctcatattattgtggatgaactagaaaaggagtttcatcactttaccagtagcaatggcaagcatggttctaatgaggaggctagcctatttgatgatagcatgagctagactaccaaacctcctttagctaggcaattgttgcgtctctcagcctggaaagcacaagcacaaatgaaagacattgataatccaactagagaagtgatagttcatgatgatacgggctcattcattggaaattttgaacaactgttcctccttgtggaggttggtagattgccacctccacaggaacaatgagaggaatttcttggaactgtagggggttggggtagacttctacagttctcaagctcaagtcccttattcgggcgtgctcacaagactttatctttcttaccgaattaaaagtggacacatctcagatggtacattctcttaataatttacatttttataataatgttgtcttttcagctcggggtgtgcatgtggaattagtttggcctggaaaaaataatttaatatttaaaagcattagagtgatgaaaaaatagattttgggtcttatccatgcggatcctgctcattattcttggctcctcacttgtgtttatgcccccttactttcatgagaaaaaaagattctagaatgatttgatggggttggggcagcggtttggaggcccatggttggtcttagaggatgtcaattttgtgcttagtcctactgagagagtcaactctaaaggaaaagattagtttgcccagttatttttgagttgatcaattctaatggtctcattttctttccaatcaaaggggacaatctgacgtgggataatcatcgtgatggtcaagctcacattacatctactttggataaggggttggctaatgctcagtggattggattattccctaaggcagttattcattccctccacacaacaaactcatatcatagacctttgtgcttttacgcaaggggcctggaaacaaattttaaacaacaatttaagtttgaagtttggtggactagagatgagcagagtaaattagtggtgaatcatgcttggtctactgttaagcgtcattgagcaccagctagaatgttcaaaaagattggtgctacgagggtgagccttcttcaatggagcgaaagataatttggtgctattgacttaactattcgcaacctcgagaagaagctttagtctttacaagatcaacccactggtcaacgcaattggaaagatgagtccaatctcagaaagtctcttaatgaggcgttaactagatgagctgcatactggaaacaacgatctcatatctcttagcttaaagatggtgacaaatgctctaaattcttcttcatttcaaccactgttagaaatcaaagaaatgcaattgaaagtattcttaatagtaatgggggaatggattacctctcgcgaaagcactattaatgaatttatggactacttgggtagtatttttttgacgtcttgtgcaacctcgttggctagcattgaccagttgattcatgaccaaatctctagtagggagcatgatgagttgctaagtatcccaaatgaagtagagattaaacgtactctatttacaatgagtagtcttaaagctcctgaccttaatggtatgcatgttttattcttcaaacattattgggaaacggttgggagggatttttttcattagaactgggaacttacacaaaggcacaaatgcaactaatgtggtccttatccttaaagtatctaaccctctaaaagtctctcaatacatgcatatatccctttttcaatgtcagctataaagtaatttctaaaatcattgcgaatagaattaagtcaatattgccgagacttatttgcccaacccagactgcttttgtactatagaggaatatttaagacaacaatgttatcatctaggaagttattcactcttttaagggcaagaggggaaaataagggctttttgcgatcaaaattgaccttttaaaggcttatgacaaattgagttggcagttcattgaccatgtcttcaagagtttcaaggtccccgataaattttgtaactagatttctcagtatatttctactacaattcttagcatttgcatcaatggagaaaatatgggtaagattgccccatgtagaattagacaaggaaattccctattcccctatatatttatctggcgggctgcgatcctttcaagtttattggaagatgttatgaaaaaatgtgtgattgaaggcattaaacttagcaaggatgacccaaccttttcacatatcttttttattaatgacctaatcctcttggggtgccaatataaaggaagccaaagaaaaaaatgagtacttaattgttagaaatcttaaaaatgatactaccattatttcccatgagaatcaaaaaagcattgtcattgggtattagtggtgctcagtaccttttagaagtggcaccctacaattgattagcgagttcctaaaaattattacattaaattatataaaatctaatacttaattacaccaatagtaatatgatacatagaagggtattaggcaccgatagtaccttttagcattatacttagagaaatagtaagggacaccttatggtgttaagcaccgcaagagataatataccgttattagtgcaaattaatatcagatcccacacaatttaatttaataaaataatataaaaaatcgctaactaatcacaacacgctacatcggtatggtattggacaccatatggtgcttaatagtaatgctcttatacttatggccgtgcaatggtaatttcccaataaatacttaaatctttaaaaacacccacttccatgtagcacacttggagcaaaaggtagtcaatgaaacaaagatgttatttaaataagataagaaagaaattatcaagctaatctgatgtagcaaacatcatcaaattttattgtttcaaggcaaaagtagagataaatagctcctacataaccgtttacaatgaatgaatcatcacaagactgcacaagcaacaaatactccaagtagagatagttcaagaaactatttcagtaggtacccactcaaaatagaaagtgcgtaaagttgtataatttatcatatgcacacacctccaccagatttccgtttggtttcttgctatatatacacacacacaaggtttgtgatcaaacaaaaatgaactcttcttcagtgtactaacagttgacgccacattgagatgcagcttttgcagcatctgaggtgaatggatctatacgcacccaaagcaaggagaagatggaagcaagaagaatggaccaaacaatgacaattgtaggagtacggttttgtcgacccaggagacccttcaagaaggggtacaaatgggcaatgacccatattgcaaagaagagcttcccaaacagtggtccccaagactggtagccactgtttatggcatgtgaaacaccagccacaatacctaccaagttaattataagaactgtagttggagggatgagaagagctgtccatttaaacacatagagctccgcaaagtctccatcatcatcagatgccttggaagtaacagtgaagtttgtatcaatcccagcaagaactttcaacaaaccttggaagacagcaaaaagatgagctgatgttcccccaatgacccaaaactgttcatttctccaccagtcctcaatgctgacaccactccacctgagctcaagaattccagtagcaaaaatggatacgaaaagcagtatgaaccacatgctagccaagttgcttaactgagaaggaaaaaaaaaacccatttattaaattaaggtgcccaagattttacaaaaaagaaaatgattaattagacaatggtaacatccatcacatggaaatggaagaatcatgaaaatgattgttattggtgaactatccatgagtttaaaacagaagagatgctagtatagacacatacaaaatcattatccttcaaaaattatctcataaacttaagagaacacatagtagtcacacacgaaaaaaccttctaatcaatgcaaactactgcttacctccggaataataaattttccagtgagaaggcagaaagcggggagggcacagtaaaaaagcagtggaatagaggtaaggggatacacaatggtgttaatgtatgccaatcgctccaaaagtctgagtttcccattgtaaccataccaaatggggcaatgtctgctaagcaaaatttcaatggatcccaaggcccatcgaagcacttggttcaaacgatcagaaagattgataggagcagaacccttaaatgctgggcgaggaggcatacagtatattgaaatccagccacgagcatgcatcttaaacccagttaaaatatcttcagtcactgaaccatagatccatccaatctcttttccccattcagtcttgtcttcgtatccacagctgattacatggattgcttccttcagtagtgttgccaggttggttgatggtggaatacctccttgttccatgaaggtggctgcaataaaaacaggagactgtccaaaacgtttctctaagctcttctgggacataagaagtgctct

SEQ ID NO: 79141 - DNA, 4772 bp, Cannabis sativa
cagcaaagagcaggttccggctaccggtgacgtgtcaacggcggcctctggtgcgacgtggtgcgtggcgaatgaaaaagctgggaatgagaaactccaggccgcactggattacgcctgtggtgagggaggtgctgattgccgtccgatccaggaaggatccacgtgttacaatcctgactcgcttgtggcccacgcctcttatgctttcaatagctattatcagaagaaagcacgtggtactggcacttgtgattttggtggttccgcttatgttgtcactcaaccccctagtacgtactctctctctctctcatcttttatttttatttttaattatgttttttcatcaattaatttcggattacattggtcttagctaatattatatgcattgacgttgtgtcaaatcttttcaatattttatcaataatgacgataattaataattaaaacataggataataggtaatgaaattcaaatatttacacattatgtctctaataattttcatttggaataggttacttaataagtatttttctttattttttttaagcatagctttataagttagaggtttttaccaatgtttaaaaaaaaattgaaaaacagattacaagtgtgataattttaagttatatatgtgtgtgtgagtgtcatttttattgttgatttattgtataaaattttaattgatatcttaaattgcatataaaatcatccaagtggacgacgcaattggattaatatatgtaccatgatgcttgaaagtgaaagttaattataagaaatagagtaataatacataaagttgtgctcctttatctatacgtgacaacttaaaacttagaagggctatacaataataaaataacagggtaaacaatattctatatccaagtggacaagtgagaattttatagtagaaacaattaaaaagaaattcaaaacaataagtgaaggatcgatcatgtggctgaaaaatctgactaaaactacatataattcatattatataggttgggaataagacgtattaggatgtcataatatagtcacggctcacaatcactaaaaaagtttctaatactttcaactattttatgtcaacacttttattaattcgatttttgacttctagctgaaaaggttatctcctttaactgatggtcatttattttatatcttttgcagaattcggtcgctgcgagtttcccactggtaactaaaaccatgaaaattgagccgttgggtgaaaattcagatacagatttgttgggggattaggttattctttttttgtcattgctttctttagaaaattggtggagttattattatttgtttataatatggtaagattaggtgtggttgtttttgtttgacgttcgttatgtaattatgttccaatagatttctgattctatacggcttcatatgtgttatctattattcttatttattttttttttgttattaaactcggagttgtgaaggaattttatatttattgtaaagtttcaacacgtagttacctattattaattttggttgcaaagtagcttggaaatattagacgcaccaaagaaactatatttgttagcatcgaaactatattttactactcaccaccattaaaaatttgttacaaattagttttaacttatgaaaaataacttaaatatatatatatataaaatattacaaaaataaactaaaagtaattaaaaaaataatagtaaaaaaattatttagttcttagcattggttgtgctttcttctcttacacgcttggctggagaccggaggcaaggaagtctgcctcttccataattgtatccaaaagagttttcttacatacattattttgagtgttcaccatggttgagatggtggggcgactagatatttttttttggctttgaatgaaagcaccaaaataatcaccttgagatttttggaaaccaataaaataaagcttaagaaagatataaaatagtaaatgataaataggtaatttttacgtggtttgagtgttgatcattcctagttcacgagtctgttgtattagctttataggcgagtgttttaatattctaagtgtttacaatataaaccttagctttatattccttttgtttctcttgaagagtaagaaagctagtaggaattttagtagaggttcggtaagtatgacattgttcaccttttgcacattaaaaataagggtatttagaggcatacatgtgggtaagggcatatccttcaccgacttagcatttcatactcaacacgccacaagggcagataccacaacatgaccattagactgtaagttggtaggaaaccttcccatcgtgtggtgtacgtctgttgtaaggaattttgtgtgaatgaggacacatgtcactcaaaggtttcaccttgaaaagttgttgtctagatagtccattggataaaaagggggcttcagaggcacgtacgcgtactaccatggcttgacgcaggggacaagatttgatttggtgttagatgatatgtaactgtcgctttgagctccggatgggatactgttaggtaggttctaggatcattaggccacatacttccaagatcgcgctaacttgctaccttcttgggatactcactattttaggggactctaatcctctctagtagcggatgaatagtgagagtcctggaaaccttcctatccttgctaactatgaggacctttgactaactcctggaatataatgccctccgtgatattattaggcaaaagatatgtactgattgcagatagtctaaagcacatttccgtgattgctatatatgaggcattcaagaatagggataacaatgtcacacttaaaggttctttagtttcagttataaaatgacaccaaaagacttgcttatgatttttaaacacgagatatgcctaaaacaaccatattgacaacataataatgaacaaaatgaaaagcaacattattaaggaaaacaccaaaataaattacaagaggaattgaataaccatttatgaatagtttatacaaatacaataagttaaagtttagaaattcacaaatttaggataaaaattcccaaatatttgacgaatttcatcatttgatactgatgcatccaaattaaatactacaagagttcctcggttaatattcttttcagatgggttgtcctggaatgttaggagaaaaaagtattatatgattgctaatattgctcataaacaaatcatatgggatgggttaaaaacaaaccttgggaattgaaaaatgaatgtcaagttttctattcctcaagggtttgttctgcaacgtacgcatggttgtacgagcagctgggataacatagtaggatatcatcacaaaaactctatgcttggacgccgatatctccatattgctataagaatggcatgaatttcataatcattaagcaataaattaaatgtaatgaatatgattacaaaagaactatgattatttcagtaagaaaaatgcagaatacctcaaaaagagttttcaattctgaatcctccacgttaccattaatatttctcaggaggaaattatcatacaagccataccaagcaattgtaacctttgtctattcattacattcccagaaagatgtatgtttatgtagttaactgtcgagtacaagcctgtactcctcggacacctgaaatcaatcacaaatggaaaattcagcaatcttcataagacaattaacaatagcataataatatggctttgttgaatctaggtacctcaactagccaatctattagaattgccctcatgcttggagttacatcattttgaactgtctccatgaaatctgttgaaggccgtttattaacttgaaataattccaatgaattgagcaaagctaagaaaaaagaaataaagctcaatgcacaatggtaacatcatgaaaaatagttcaattcaaacctcagatgcacgcaaatttttataaatatcacaagcaatggtagcacacaattggggatctatgaaattactatctacatcaacactttgaacataatcaatttccatgtccactgacacatctctattacaaatgttcccaacattaaattttaaaaagtaatttcagcacaataaacaaaatgaaaatgcagaggagattattggtacaaacctgttgttgacttggaatgttatgaaatgtaaagattgctaaatgtcttcttgttaatagaagcaaagctcaagactaaccctaaaaggacaattactgtaacaagcaaagctcaagactaaccctaggtaatcaagtctaacaagatagatagatccataataatatgcaacccacattattttataaattatggttaaactcacttctaacataatctgttgaaagcaaattgggattcctcctctaacaggttttggggcttaaagattgcctacaataaacaattatgtcaagaaattaagtcttcaattgtactaaaaacatagatcaattgtttcagaaaaaaatgaattaagctgaaattttgccctgtttcttgaaagaattgtatgtatatatataaatttctttaaattctacacatatgacatatatagttgtgaacaacatttcatggccacgctcattcaataattccaaaaagactgctacagaaattaattcttaaatgctactaagaacatacatcaagtttcagaacataaattaattacgctgaaatttt

SEQ ID NO: 79142 - DNA, 5765 bp, Cannabis sativa
atgtcaatagtcaaaggtcaactaaaattacaatgggctcttagtgagacatgaagcccatcctacccccttaaaatgggccaagcccactacccttcacctcttatctcatctcatcaaatttacaaaaatacattcaattaaaacaaaattgatatataactaaattaaagaattagaacttctcgttcctaaatttatagttacgggaggttatcatttttctctggttagacccatcaggcttccttaggcattagtgcagcttggtcgagattgtattttgctatttcgattcgatttttactgattcgattaattttgtctctgtggcatgattttaattgttttagtcttgttgtctttgtaacatgtttttgttttgtttcgttattgattcttctttgttcttcgatgactcgccattaaatcgctgttagtggtcagacggctgattatttgactcgtttttctaattctaatcctaatcgtgttccatcaagagagatgtctcaattgaattgcaagctattattttaactgattgcttacacaattcatgaaaaaaacaacaacaattgatatttactacctcataacaattatttttatagtcctaatgtaagatcagtcaaaaatacattttaattatcatgttccttaaagttatttcgtatttcaagcactgatcaagtcaaaatctcatttcaatcgacttgtaagagttatttaggaatgtttgatcaaattagcatttttaatattgttgttcaaagtatattagttcaagattttaggggtctatgctatgaaatgccaaactcaataaatattattccaatcacagcaattatcaccacatgacattaatcttatggacaaaaaaacaaacaaacaaagcaaattaattgtttattatgtagtcaatcaacttatttacatggaatatgtggggtgtgtcttgatgatataaacaaagaagcaatgaattccattcaaaaaaaccaggaacaattccattttcaatcatttgtgttaaaacttttgaagccatgtcaacatctccctctctgcaaatggcaaccatcacagcattgtaactgcctgcgtcgagcctgcatcctcgtccaaccatgtcttccatcagcctcactgcactatcacttttgccttgcctgcaaaacccgagcacaagcgcattcaatgttgaagaagtgggagaggagcagcagccgcggctaatcatctcgttcatcaactcaaatgcttcccgaacacacccttcttcgcaaaagccatgaatcaactggctgtaaacaacagcacttggagctccaccttcttcaaccatctcatcataaatgatctttgcatcctctactttcttctccttgcacaagtctaaaatcctcaaactcttctcaacaactctaggaaataatttccccatgttggtcaggaactcaagtgcttcatctgtttgattctgtaaatacagaccatatacaatactgttataaggactgattcgaccacactctctgctctcctccattagttgcaggatccgaaatccatcttctgtcctccctaccgagcacaaacctcttatcaatgtatcataagtaacaaaatttctattgaccccatctgtcaccatttcattaaacaagtccagagctgaatccaacatcttatactcacacaaaccagatattaacaaattgtatgtctccacattgggaaggcagcctttagtctccatctccttaaaaactctatgcccaactctcacttttccaaaggcaacaaaacctttaattaaggtgttataagcaacaacatcaactgtgcctcccttactcccccatgtctctaaaatctcaacagcctcggatacacggcccgagctgcagagaagttccatcaccttggttacaggaacaatgtccggtacaagtcctgaagagtagcacttgtgcagtagcaccatagcttgtatcaaattttcttcagcacaataagcacaaatgaggacattaaaggtgacatcactaggcttttctatctcattcatcaaactccttgccctgcccactttcccattcttgcatagagcatgaagcaatgtgttgtagatgatggcattgggagtgactcccttggtggatttgatcagttgcagaagcttaaaagcatcagcaattcgattagtggagcagagtcctttcatcaaaatcccaaaggtgtaatcatccccaacaactccagtagccatcatcttcttcctgtaaaactctctagctatgtctatgttgtccttgactagaacattgagaatggagttgtaaatcttgagagaaggctttccatgaaacctggaaacaaagttaaggactttgatgataatttgtggggttgttcgagctctagcaagtcctcgaatgagagtgaggaagatatcttcatcagggggtgagtcaatggatgtgggcatttcgtcgagcaggtggtggacagtgtcgaaacggcgaaaagtacagagcttgtgaatcaaagctcggtaagtggattgagaatgggtgaagttggggagtttggatgcccatcggaaggtttggagagcttgggaaggagatggttggtctaggatgaggtgagcaatgtggtggtgggttgggggtggaatggaagatgaagagaaagattgaagacaaagattgagacttttgagggaaagatttggtgggttggggttagatttggatagtatgttctgtatgggcatcgaatgcttagttcttcaaacacaatatctcaacaactgaactctgctcttctcttctcttctctttgtcatttgtttttaaagaatgaaactacaaattactaataaggaaccaattataatgtgccacatgctttgcaaccatgtatgactaccctaatgaattaaccattgacgttttctgtcctaatttgtggacaaatttacggtcctaataaaggacactcaatattgtattttcctttgaaacagtagaaatagcaatgtagtaatgatgtgaagtttattcaaattctgtaaatgtaatgatgtgagccttatttagtgcttaactttccttgtttattataatgtgcaggaataatgatggaacacaattctcacatcacacattgatggaaataggagggtgtctttgtctggtttcttaatgatatttatgataatattagctatcattatgcttgtatttatcacaaatggaaattggtcaagaataataacaactcaagtactagttgtaattgctgttctcagtggtaccacctaattatgagattgattattaccatttggtcccacttacatactacaagacaagtgatgaggttctattattggtaaacaactacacatttgttttgtatgatttgaagatttgacaattttgggtgttgcagaaaaattcaagagatgcttgtgtgtcagcagcagccttttgtacgacccaattagttttagtccaagactagttaaatattagtatttgttctgcttggaatttagtattagctagtaataaatttatatatgttcttaactacaacaacttatatataataacacataacatatatgtataatgtgtgatttagtgatgtgacaaaatggaaatgtaaatggtggaccaaatggtgagagcaggagctgccagcaaataggtccagaggaagaggagtgagcattcttcttgggcaacattgaagagttgtgtcatggtactaatattcatggctggaggaagtgtgaactgcagcattaacaggtacagaaacaaagggtctgagggcaacaatccaagttggtttgctcctttaactatcaaaatcccaatcccaggaagtagtatgtaccggctgcaaatcactcctatcaatacctttgcttttatacttgttttgttaccatgaatgaggttccctcctagtaaaagggtgatgcatggttgtgttccatccctgcacatcccacacatgtacacattcacatccaaactaagtcaagtcttaagtcataaacataaaccagattatcagattaccccagcaattgagccgagccttggatcacacgcagcggtgcatttgggccaattatcagatttttgagccacttggttgccccaaacaatagtcccacaaactgaggcagaggcagagacaccccaccattactcaacatacattatcaatttcaacaacattacatatatgtatggcaatgaagaaatgactgaccactgcaatggttgggggtgccaataactcctctcttatcatgtgaagaatttgaccaactctactccctgatgataatgatgatatgtgctctagttcctgtagtgacttaaacaattacaaataaggaaaagaggaaaccaaggaaggggtgacatgacttacagtagttgttgtagtagtgttgatttctgatactataaaatcaagatgatgatgatgatcatcattattatccttgttggtattggtaagaaggtgagtttggtgatctccatctagatctgcattgggtgtctttgtgatctcctcctgttggggctgagcttgagattgggatgcttctagtgctttaaattttatagatgatgttctaataaggtgataagtgtaagtccagatgtaaaacccacctagctgcagagaacttataaatcattatgaattcagatagtaactagtaactagtaactagtaattacatactgccatagagaaggatgcataggagagagcagcagaacggcatttgttggtgtcaccaaatggggttccagtttcgttgcagatagcaggcacaattatgatcaccaggttacccaagttacctattcattcattcattcattcatttggatattatagatattatagatataagagagtttgatttaggtacctgcagagcaagtggctatgatgagaccttcaagatgaggtttaggccttgtaatcttcaccactatccatccaagtatccctcctattacaaaggtaagcaagatattgagtggcataaaccacctgcaccacaccacaccactcttacttttagtctcttactatatatgaacaaacatatttaataacaaaaacatatgttattatatatgtctaccatgaaataagatcttcaagagtaatggtctgaactagactggcgaaaatgtaacaaggagagaaaaccacgaacacaagctgcatatccattcacatgatacatatcaaattaatatatgataagtaacatagattgattgattgattgattattattacataaaataaaacacagagatatgggctttaataccttgttcaaggaagataacatatgaagaggaagaagattagaatagtgagaagccaagaaagctccaatcaaactcactatcagaacttctaagatgggcatagaggccacttctaacatattccagaaccccatttcgtccaacttaaccactaaactctctctctctctctctctctctctctctcttactcaatttcttcagtaataattaaataaagatagaccctttgtcaaaaataaaatgaaaaataaagatccaagatatgtggcgatgcatacttataggaagtaaccatgcaagtagtactctaccaatttgtcattatttcatgaatcacatctacacttatgtcacctgtttttt

SEQ ID NO: 79143 - DNA, 3222 bp, Cannabis sativa
ttttttttactctagatttacttttgattgaatcatatttaagaatttgataaattgttgtgaaaaataaatttaaaattatttatttataagtttattgtattaagattgaagaggatatttagagttcaagtttttgaaaggattgagaacaccctataagggtaatggtattaatattttcagacttaaaaacgaaaaaacctcataacaaacattagaaaaaacaataataatcaagttattttagcttaaaaagaaaaattatataacattctaagttttttatgaataattttgatatttttctaaatataatagatttacaaatatactttcacatattgttaaaaaaaaatactcaaaaattaagaactttgttatgtagaactcaaaaatttgattgtcagtttttttttctcgataacattttgttatttcaagcattgaattaccaaacaaagtggaactcatggatatatgcgctaaaaatcctaataacaataagagaaaattgcaaccaaagtaccaaactttcactttaatagcaggtaaataccaaaattttgatgacaaagaatacaataatgattcatatcataactcaggctcctctagctttcaaaaatccctgtatgttactattcaataaaattaacacaacaaaattgatcagttgtactatctgctagtttcatgttttgttttgtctacataatatatattagcacagctccttcattttctagggacaaaattgttgaaccttcaaagttagtaacagcaaaattacaagagaaggcaatcaaagagttctctcatatccatttctttgatctgaaggatttcatctattgcctcagaaaagcactcaagtgacagatttgatgaatttggtgatgtttctcaaaccaatgattcatttctaacttctatcttcttccattggactaattcattctgcaatctctccttcctctaattctaattcatcctctgcacctgtctcttccttgttaagtataccttccaaaccgaaaaaatcgccacttaagttttttaagtcatcagtctcttcttcttccttgttaagtagaccttccaaatcaagaaaatcgtccggattaatttctgcaatcaaatctgagtatgcgtctattaacccctgatcaaaatcaaaatccaactcatcaaattgctctcctttattggtaggagattggaaggcacttcctgctgcagctcctgcagacaaagctccccttgatgtgctatttggtactttcccagacttactttgattggtgaactgttgtggggatgttgagttcaccgagctctcatttttcataagatcaaagacttgaggagccaatgagctgtcagtttcggctatttcttcctctttaaaaggaacacctcccatctttaatcgattattgcttccaaaatttctgaagtccggtttgtgagaagagggataaacatctttaatgacttcaaaatcaatattgtgtgaaggggtaaacacatatatggcagggtactccaaaatcaccctatttgttaattgttgtctcagtggaaccttaacatctaactcatagaaaggtgaagttgacccctgaaaataccaccaatgaaagattgtctcaatcaaacttacttattatgcaaaaagaatgactataacaatcaagtaacacaagactatgcacaaagacaatgcaaacaaacacttggttacatttaccttgatcaagctcatatattctaaaactatcaaagtaatcagttctaagacaaacaatagcaaaccttttgatatttcctgatgaagaacctaagattttccaggtcttcatcacaaaatcgcttcaattgatgattccaaggaccgggctttaaatggttcccaacaatggaggagatattcaggttttcatcaattctgtatcagcatcaaactcattaaccactaagaaagtaaagaccttaacacataactcaaaatgctagaaatcaccaagctcactcattatcaagtaacacaacatctgttgaatgaaaccgccactcgatcgtccagtaaatgcatttcttcctaaagcatatcaatcaaagaaactttaaaaaccaataagcaaactaacattaaagcattatactaagttctaactaaacaagtaaattcaaccaagaatactgaacattaaaaacttatgatccttcccatccatgaatttgaaaggaaccatttaaaagccaactacctttgatcatagtgagtttgattcttctctctttttgccatgccacttggaagaaacaaaatttttgttctcctacttgcagcagcacttctaacactcctaaggtgaaacggtagcttataatgattatatctgcatagcttatttctcattctttgagcagattcagaaacccttttcacctcctcaagcaaattataatctacacccaaaaaaacaacccaattcaaatcaagaaaagaaaataaatttcaacaagtcaatagattaaaaaaaagtaccagagatgagttgattatcgtcgaactgagaaatagggacaaagtgagtccggctcctcttgccagtacaaccagttcgttgcttgtgagacttaacgcagggaaggctacaagagcgaaaagagcaaccagggcatttgtattttgaatgcttgaatttgcactcttcacataaatttgagtcttttcgttcttcctccattttcagtctctggggtttaaccaaggtttatactttatacactgtacataaaaacaaatagtaataaactaattgtgatgaactttatttggtgaaaaaattgtatatatgcataaaaaaaaaaaaaaaagaaagacctagtgatgaagtgttgggattcctccagtgattattaattatggcagagatgaaggaaacgagagctgatgaatgatgatgaggacaaggaggaacagttgagcggcgtttcaaaatcttttcttttatggactctcctgtaaagacagggcccattgaacccgaaaagcactgactcgggccgacccgaaaaattattctatttttcatttgataaagaagattgggaaattctagaatgtaccccttataatggatatattgatgcacccttatctgttttagtactcgaaataattttttggtcaaattttttctcatggtcatg

SEQ ID NO: 79144 - DNA, 4410 bp, Cannabis sativa
tttgaattggaaatattatcaccaggttttttttgaaagaactacttgttcattgattaagaaagttgatgggaacaacagggggattaccctccccttagtacaaaactgccaaatctctattaattctagcgtttttagctacaccatctgccaatatattaaagctacgattaatgaaagaaaaacaacaattatgaaacgttttagattggttcatgattaaatagaacactctagccaccctccagtcagggactacatttgctgataaagcattgactgctgtcttcgaatccgacagtatatgaacttctcgccaccctaagtcaactgccctgttaagagtaagaaaaatagctgagagttcaacttctagaattgaaagtgcctgaatcttttgcgagctgacaaaccagcagccagttgaaatgtcgatgctgattgcagcaatgcctgcttccccttgaattcacgagacattagtgagaattatattgcggataccattgcagggctggatgttcaacatagcagggttcacacatgtcccatgcctccccatatctgtccttgctccaccattgcagcaatgcctctcagatgtaaattaatcttttagctctgcaacattcttttcaattttaatcagagcggcagggacattaacagctatattttgaaaacaaaaagcattcctctggtgccagatttcagacatgatgcagccaaaataggtaagcaattccttcctatcaaaaccatcgaaaagatcaattaacatttccagcatactgatcacattatctgctggtatgtcatctagtttcagagccagattactcccaaaccagatagctctggagaagctgcagttccaaaaaagatgaaaaacactttcctcctcaacttcacataagctgcacattttattctgcagaaagtgaagtcaggttttcgtgggaattgcctcgttgagaattctccaaagaaggactgacactcttggatggataccggcttcccaaatccatttccataactttttctctggcgcaaacctctcagcattttccacagtataggcagctttcacagaaaatttgcctcctgggttttgcttccaaaaaacctgatcattcgcggtctggggaatcgacctcataggctctttggcaaaggggaaaagaggtgtccaatataaagttgtagcagtggattatttcactaagtgggctaaagcataaccactggctaccatcacattaaagaaatttcataactttgttatcatgaacattattttccacttctatgtaccttagaaaatactgtcaaacaatgaaacatagttcgacaatgacctattcactaagttttattctaggcatgggattacaaagagtttttcagcagttgcacatcctcaggccaatgtctaggtcaaggttgtcaaccaaactcccaaggatacctaaaaaagcatctagaatagggaaaggaaaattgggctaaacaaatccttaatactttatctaatttggtgaatccacaaattttttgattaagtgctaagcatggaactaaattgctaaaagttcttattgatactggcagcaataataatttcatccaagcaactttagctaattttttgagagaaatgtgaagataccaggtgcttcaaagattacatgggtaatggtaactccttaatgtgatcaaaaatatgttgtggacttgaactgtggttgtaggggcataaatttgttgtggatcagtatgtgctatctatttgggatcttgatgttgtgtttgaaatgcaatggctccaaactcttggtccttgtttgcacaatcataaggcccttatcatggaattttagtggcaaggaaagactgtcaagttggcgggtttagctgatttgggtgttcattgtttcacattcaatcagttttgtaccttgctcaatgaaggggaagtcttagaggtgtatcgattaatgacagtagcaaaagtacacaattacatagctttaaacaataagagttgggaagataacttaccaagtgaagagaaacacttgatttttgagtatcaagaggtcttctaagaaccaaaacaattacgtcctcatcgaagtgttgatcataaaattttcctttagcgggaaatctctcctatcaatgtgaagccttatcactatcctcatttttaaaaaagatatcattgaaaacatggtgcgtgattttatctcttgggattttgcaaacaccaataccaacccatactcttctcctattttattagtcaagaaaaaagatggtagacggcggttctgtgtggattatcaagccttaaatagtgtggatgtcaaagaccgctttcccattcccaccattgatgagatgttagatggattgggtgggctaaggtgttttcaaagctggatatgagagcatgctatttttaaatttgaatggacccaagagacactcataagaccacttttagaaatcataaagggcactatgagttcattgtaatgtcattcgggctgaccaatgctccatcaataattcaagcggccatgaattgccaattttaacttggcattcgaaaaaatgtcattacctttttttgatgatatatttgtttatagcaagacatgggctgagcatccggtacatcttcgacaagtacttcaactactttagcaacatcagcttttggctaagggatgtaagtgtcagctctttcaaacttcaattgattatttggatcatttagtttctgcactgggagtgggagcaaaccctctaaaagttgtggccatagttgattggccacgacccaacaacaactcaggggatttcttggctttacgggttattataggcggattgtttcccattatgcttccggtgtagctcctctaaccaatttgttgaagaaatacaactttaattggtctccttaagtagcaaccacctttaacactctaaaacatgctatgaccaataccctaattcttgctctactagatttttctaaggagtttgtggttgaaatagatgcatcaaatgttgggattagaggtgttcttatgcaagcatgtcatctaatttcttttttcagtcaagagtttgtcccttaattctttggtacctctgcttatatgcgcgatttgcgtgctattgtgggagcgatgactaagtggcgtcaatacctcttgggacgtcccttttttatttgaattggtcataagagtctcaaggagttgttgactcaagtaattcaaacaccagacctacaaaaatttcttcaaaattttgggattccaattcaaaattgagtacaaattgggccgtgaaaacaaagttgtgaatgctctttcaaggcagcatgagggggctaattcgtttctccaaacaaccctctttttagggtggtttgacattttagaggaacttaggcaggagaacttgagcagcccagatctcagactgatctacactcaactacagactcaaaacgaagccacttcccaaaatgtctttagatatgggatgatgtactttaagaaccaaatccttcttagcaaacactccaatctcaagcttactctcattcgagaatttcaggacactcccattggtggccatgcaggaatttagcacactttccttcgcctatgtggcaattttttctagaagaaatgcgttgagatctgcataagtatgttcaagcttgtctagtttttcaaacagtcaagtacttcccacaagcaccatatgggctgctccaacctcttcaaattctagagcgtgtttgggaggatttgaccatggatttcattgtgggattgccaagctcgtatggattcaataatattctggtggttattgataaattaaccaactatgctcattttggagcccttccaaatcattattcatcaaccaaagtgatagaattattcaccaacatggtcattcgtctccatagaatgcctcgtacaattgtatcggaccgagatcctattttcatgagtgcattttggaaaaagatttttaaacttatggggactacattacgaatgagctcagcctataatccacaatctgatggcaaaatggaggttactaattgttatgttaaataatacctttgtgcttactgccaaaaattcaaaatagtggagcaagtttctcgcttgagcaaaataccattacaataccagctaccattttcactacaagaaaagctacttttgccggcgcataagctcgccggcaaaagtacgtgtaactcgtcggtaaaagctgccggcaatggctcgtcggcgaatgacttttgccggcgacataaagaatttaattgcattcgagcaactccaacaaactcat

SEQ ID NO: 79145 - DNA, 5235 bp, Cannabis sativa
  modified_base (694)..(704): a, c, t, g, unknown or other
ttaaaaaaaataatataatggggtaattccccaaaattttattagccacctcaaataaaaagcctagttatatatatcataacaatgttacgagtcttatgacaaacatcacgcatgcatgcatgaattaaaatgctttttttttaaaaaaaaaaactcatattaattggttaaataagaaataataaagggtatctcttactcttaagcagcaatacttcacataatattattgatgtaatttaatattaaattctatatatttaagttaaggtatcagctagttagcggtgactaatactaccataaagtaacgcctcacgaatagttaataatattcaataaaaattattatactaaatcataatttatagcgtaatttacgacataaatacttaagttttaactccgggttgcaaataaatatttaagtttaattttttacgataataatactaaagttatattttttaaactctgtaagtatctaaccgttacctattaagtcattaatatgggtatatttaaactaaatttgttaaaaaaataaaaatttaataacttagaccaatcaaagagattgtcaggtgacaacttatttatacttaatagccaaagacaattataacttaagtatttaaataatgtgtaactcaatatttaatttcacacgtaataataataataataatannnnnnnnnnnaataataataataatataatagtaaggctcattgttgaatatataaatacgaaacaaacatctacttatagatggttttgaactttgaaatagtactattcatttcaacaccacctctctctctttctccttgttatttcaatgtggttttgataaggttatggcatgtttagaaatgtacaactccgatcataaagcccaccaccaccaccaccttcttcatcatcataactacccaccaccagtgagcccaagaatctcattctccaatgactttgccgattcacatcaactcattaaccaacaccaccttcgacctactcctccgccctcgtcggacttcgaattctcggtcaccgaccactccatgatgagcggcgccgacgagcttttctttaaaggaagactcttgccctttaagcaaacaaccccatcttcttctcacagacccaccaccactcttagagatgagcttcttgccggagatgaagatcgtgacgtcactctccgaccctctaagggtagtactgggtcgaccaggtggaaatcctttttgggccttaagaaggcccacaatgggcccaactcaaagaagcactctgaagcttcttcttcttctgcttctctttccaatcttagcaagacctcttcacaggttattattacaatcattatttattttgttctttgctaatgtttattttttttatttatttattaactatgatttttttaatttatttataggatttattgaatattaatgaaggagggtctacatgccaagatgttgagattggaatatagcagcattggttcttttggggggtgataatatataattatatttatatattttttaattaagtctttttttttttggagtggaggactgtttttcttttcattttttatttgaagaggaagtttaaggttgatttcttagggggggtttggtcttagtaaaagttaattattaatttcatctttgtattggtgtttttggctgttcactgtacaaatatgtttgcagtttgaagaactctctttttttcttttattaattattagtattaaatcatttttcttcttcttcttcttattttgtcattatctatttatgttacaaaaaataagattacgctacatgatttggatctgattttattattattgaatccagcataaaatattattaatataatatcattgtgtccttttgtgatatctaagagttgaaaaagagtggcaaaatcccaaaagtccatcttcaaaaacaattacaagaatttcacaacttaattaatataacccctaattaatagcatcaaaagcagtattattattgtttctgtatatatcttatgaaaataaggatgatggtggatagtgtgactgtgagccattaatgttgacagctaagacattgctgtttgagggttgaaaaacttgtccagatctcaaggtggatctgtagccaaattataattataaatatttacacacataataaatgcaatgtattataatgttgggtcagtaagtaaaaggctgattcatggtcaaagatgttgtgtgttactgttttcttcttaaaaagcatatagatacctaccccagcttacacccttttacacacaaatccatagccctgcattatttttggaccagagtacatttacgtactggttttatggtacttgtaacttattgactgccgtaaaactaggaatgaaatcaaagattgaaaaaacacaaaaatgtttttttttttattatttctttctttcttgtcatgtcaaactcaaaaacaaaactccccctaatatgaatgattgaaagtaactatataaactaatcaagttactgactttagactcaaaacaagtagaagtagtaaaagagagttttggttgctataaggatcagaaaatctgcaaacagttaagtattaacatatttgcttgtggattttgtcaaaactaaaatcccatggttgatcacacaacacattgtcagccatccttgtttttagagatgagaaatatatagaggaaagtaagagatatggtatgtatttttgggtacataaacgtttatgacaatgtcaccaaggagctttaacctctttgtggaacttgtgctcgtagctttctgcttgtgagcctagtttctcaatagctgcatcaaatcgaacacatgcgactctcagttccacgatctttgtctcgatgtctttcattccagtttcgacttcagctcgctcttttcttgattcagcatacatctttgcatctacgcagacttctgagtcgcgggaaagaccagtaagacgagacagtcgagaacgtagaaatccaacattcatgcccaaaagctcgaacgctctaagagacttgtcccaggcttcaaaatcaccgcgagaggtagtaagcttgcaagcttttatggcagaagcaacttttacagtctctatgatggtcccaacaatcaatttgtgattcattcccttgataatattgtcatgaaggaaagctttttgactggaacagagcttataatatgctcttctaatatcttcaggaatctctgaatctacaagcattccatctacaagaatattgaaattcttgaaagatttcatgtccttaaattgaaaagctggccctaatatcttggactcttccaaaacttcagatgcaacttcctcactgtcgttttcagactgatctgctggcttacggggagctgatcttggtgaaacagtcttctttttctttttcttctcgacaacagttaaaggaagagacttttgacgtttcctgtttgtattgtgacattctattgcacccaattctgcataatctttatctgggtgtaccatccatatcaaatgaaatgaacatgaagcaatatcaaaatcagatcacagctttgaagctaggaaaaagatgcatcaattgtcttacctgcatcactctgtttagattgacaatctaaatttaagaggccaagagctccatccacttcagtcaaatcattcgcccttattacgtaaacctacaaattcaatggccagtggcaaatgaaatacgctagacatatataatcacggcaaaattatattttggtcttcagaggttttctagttctcaactaaatggttttttcttcggatgaattataaaacaaagatggtgtggaattatgcccgactactacttttggtacaactttacagtagtgttgattataagacttgttctttaaaactcaatggaacttgatccattctcatagcactcttattgttcagttttctttgccagtggagcctgagtcagctaaaataaagaaagaaaacctcaaattatcaccttaaatttggtgggttcaactaattggaagaccaaaacatctccctcgagcaatttgtgtgcaacagaaaactgtctccaaccagcactcaaccctgtcttgtatgcaatgtatttaacatgatatcgttttccgtcctcatcctccaaagtgattgtagtatcttcatctggtaagtgtgacttgcaaaatggcccaggaagcccctgccataccaccaacaatgttattctaaacatgtaaatgtcattcattctaccaacattatactcggacactcttaacactacggtctacataccatccagaagcagcttgcaacatgtgatctaactagagatttcacaaaactagggaattcggtctctagatttgatcgaacctcctgtcctcgaatcacagcagatgacttggcttcaccagataagggtgatgcatgaattgcagccttacttggtgtaggagtactaatgaaaaaaacatgaaaacaatattgtcctgggtaaatataatgcatacaacaagtaaaaaatgaaaacatgaaaagacattaaaaaagaaaatagttttacttacttcaaggaattcctggaatggccagatacaacctgtttgagcattaattagtttatcaaaaaactatcaactaataaagaacaatgccatttcatgcatgctactctttggcaccaaattacaccttataacaaattaagcatgattcaggaaatctcttatgcactttggcataaaatcaatagggtatataatgtgaacacccactgatcttaatttatggatctcaattcccaaattgcaaatcaaacaattttaggtttgtaacaagtaaatttcccaaaaatcctgaaaatgaaaactacaataaaaacatagaaagatcataacatataggctcctcttacaaacttaatttcaggattccttttcttgacaatacaaagctcttcttctttctccttaaggttcttcttcttggcctgcagataataatgcaccataaattaattaaaaaaaacccttacaatcatacaacctcaaaccaaagatagatataaaataaataaataacaaatagagagaaagagagagtcattttccttctatgacagctcttgctgcatttctcatcaat

SEQ ID NO: 79146 - DNA, 3720 bp, Cannabis sativa
ctgagactcatctaataatgtcacggatacattcatttcgtaaaagtacatcacgagacaaaatcatatccctgtatattatatatacatacacttatatactgtatatatagagagagacatgcacgtgcacgtggtaatcacgtgcaagctccacctaacaatgtcaacccaaccacaactttgtttttgtgcttcgtaactctccttctgaaacagtgttattatgtctctctgaccactcctgtacacaaaccaatgcttaacttgtctcatatgccaatgtaaatgccacacacatacatacaatactatcaattcaattcccatatttatttaccaacacaaaaaactccaaactttgaccatgccactaccacaagctctacacccaacgttctaaatttatctgaaacaaaaattcagaacaacatttaatattaataagtatttacttgttaaacattacaagccggtggcccaaaaagccacaaaattaagttcatatgctaaaaaagataataaaataaaataagacttgatactagaagaaacaatgaccaaaaaaaaaagaaaaaagaaacatactctaattcgtgtcttcttctttttcttcttctactacttaatatcaaacattaaaaacaccaaactaaacagagagcaaatcataaatataggcattattactatttattacattattgagaaaccatttgtattatcatcactgaacacatggactgcacaagatttagaggcagagccataactatgttcatcgtatgagtatggaatgggatgaaatggagctggagctactgcataaggactgtagttatagtaatagcctgtgcttggaggaacgaagggtgatctctagtacatcacttgtggctgttgttattgcatcatggcattttgtcttggttgatgatgcatattcatcatgttcatgttcatgtttgtcatcatggggtttggtgacgatgacgatgttgatgatgtatggttcatcatggatggtggatactgacctgtggcgtagccgttaggaagccctgtagaagatgcagagtagccattattgttggattggagtttgtatcctcctcctaaaccattaatgggatttcccccacttccaacacaagtagagaaattaggcccatttccatgaaaactacctaagttcatcatgttgttaaggtcacttgcctttcttccatccactgcagcattcatatttccacccccaaacttaggattgctactcatactcagggtagccaaggtcttgggatcaatttcaccatgtggagaagccttcattcccatgttctgattttgctgacctttcttcccatgaggattattattaccattgttgttaatctttccagtgttttgagcagaggccatagcagcagtagcagcaacttgagagttcttttcacttcatttgcttccattgctttctgcctaagaaaaccaagttggtttactttctctctgaaaaacctaatatcatcttcttcatcctcttcttcatcatcaaagtcatcatcaccatcaccatagttgaaagaagcaaacttttgttgttgctggtttttgaaggcctgaagaccctttatcaagtttggtttgttgtggtgattccctttgttgttgttattttcatctttgatacagttgttgttgttgttcttttgcttctggttttggttgcctttctgggttcaaagctcagcatgcttaccagctcgaactagtttatttatcaaacttgcagagtctacactccctgatactgttactttttgctgctctgaatcaatgtttacttggtaaacacctacaagaaagagaaaaaaaaaatactatttttattccttgcatattcatataaagatactctttttatactcggataagaacatttgatcagtcaatattaagttattataccattataacaatttttaaagggattgtattttttttttcatatatcccattacatatatatatggaaaaaatgagtaaaatttacatgaaaatttgtaaatagaacacttcactaaagattaaattttgttatcattttctcactggaactaaacaaacaagcaatgtgacatgaagattgggaatatggtaattaaaaaaaaaaaaaaaagtgactgctgagaagaagacaagagaatggcaaaacttaaaaagatgagaagaaaagtgatgatgaagaccttcaattctttgtaagagtttcttcattttctgcttgcacccatcacaatgtatgttcactcgaagaacacacgtttgtagatgaaaatttaaattaaattattaccccaaaaataaaaagggaaaggtataaaagcaaacatgaaaacaagaatatggaagatgtgttagaggaaaagaccaatgcctaactttgttgtttgtaaaaggaagagaaaaatacacaagattaaaaaagactcaaggaaagaaaaatttgggttttaagattagaatgacctggatcttgaggagcttaaagtcttcttctttagtcatttcttcactgctgttttttttgggcacaatagctttatctccctcaatcaacacactccttttatattttctaggaaaagagcctagtaaaagctagttagagaaaaaatgtaaataagaaaatagattttattttgcttaagttttcttctacacaactatagctatagtagaatctttttccctaagtaccagtgtaccactaattcactcctttcacttctcaaaatattttatatgcatgtgtaaacagtgttaaatgggtgttgaactattccagatgatactattataataataaaaagaaataacaagaacccaaatgccaagacaaatataaacaaagaccaaagggagaagaaaacaaagtgaaaggaaaatggtgctgaaaagtcagagaggacataaacaatatttttttgcatggagaattaaatgaggatgtctatatgaaacttttcaaaggttactgtccaaaaggaaatttaccaacaaatgcaatttacaaactcaccaaaagcttgtatggtcttctactccagattcaatcacatgcctcaccctcgtacttacctctctaattactaaaccaattatttataagcccacaaaaaaatagcataaaaggattcaatcacattttgggtatcttggtaatattatgggccaataatatagtttgatcaagcttaaagttttgggccacttcaatttcgtagcccatgattgccattttacccaatcaattccaaggtctcatacgcaacaatgatcccacaaacacaatggatagcttcacctcacgattaccatcattatcgttgaacgatctttcatgtactacggaatcaaggagtggaactactctttccattacatgtctactttgggagcaagtaaatttgttctataaatagtagccaaatacaatgaaaatgcatcagattttactactagttattataccaaaattatttcttttctttccttcttttttattttagtttattaattttggtgtaaagacaatgcattttcgaggctaatttctttaacaaaactcaaatgtaagttcatgcaatttttacttttctaacacattgattctctttgttcttcatttccatatttattatattaaatttctct

SEQ ID NO: 79147 - DNA, 4089 bp, Cannabis sativa
  modified_base (27)..(49): a, c, t, g, unknown or other
  modified_base (4024)..(4042): a, c, t, g, unknown or other
gcacttagtgcggattggatgttgttnnnnnnnnnnnnnnnnnnnnnnntcggatgaacacccctacttacaaccaccccaattcctgtcttttctttcttcacatccatttgcagcatctatgttcaacttattaaacaaccatatagtggtggtagattctcaaactgatcttgagtcttgatgcgattactaggagcacccactgatttgctgacagaaatcgagttgtaattctcaatctattacccttctatttgacgtaatctttggtggcactataagggatcaaacaatagtctaccatccatcttttaaaatatgacgaatttgaagaaagaggaggaaaggttgtagacttagccagatgataaacggtttttactgtcaaacatccagaaaaatgatatcccaaccaatagtagatatataccctataggaacttcaagactataattaatagtatcattattaaaataagtactaagtttactaccctttgttctttacattaatgttattgtaaaatacattaggagtagtactattatataaatacagctttcagttttgatcgtcagagatttcaaagtacataagcttatactttctttttcaataatattattgttacagtataaagttgactatagtcttagaatcccacacttaatttaagtgcaaatcaaaacggcccaaaaatcgattaatgccacttattatgaaatcaaaagggtccaaaattaacttatttagttaccacacagtgatcactctctcaattaaatcctctcactcccaccccccataaaaaagaaaaaagaaattacaataattaaaataacccgtaacattaatatattcacgacatgatttagttaaaaaaaaaaaaacatatttatgataatcatctattaatacctactattaccaaatttaacatgcttttaaaggctttccacataaacaagcattgtaagtaaacgacgacgcttcaaggtgatcaaacggcgagcctgctggaattgggccgcagagttggttatggctcaagtccatgtgtccaatatacgaagctgaagatatggatttgggtattgggccagttaatttattgtatgacaagtccagtaccgtaaaataagatcttggcccaaaaacatttggaatacgtccctccaatttatttctgctcaagtttaagttcccaatagctgagttcatcaaactcgccggaatattcccggagaccatatttccgtcaaggttcaaagtcgccagaaccgccattttccctagcgactccgggatcggtccttcgagtctgttcagagagagatccagatccgccagacggtatatggaagatatggaaggaggaatcgtcccgctgatttggtttcgactcagtagagctcgactcagcattccgagtctgtggaaatctcggggaagacctccggagattctgttgtttctaagatcgaggtgcatcaggcttgagaggttagttatggaggcagggatcggaccggagatgagattatcagcgatattgagaacagttaggcggcggagtctgccgataccgacaggaatcggaccgccgatcttgttcccaatgagatcaaggattcggaggaacggcaaggctgttatgcattgaggaatgactccggtgattcctttccagtcggcgattgtgacgctggagagtcgcggaagcttgcaaatggcgggagaaatgtaaccggtcatgtacccggttcggtgagccctttcgaaaatcgggtcttcggactccccacggagatttatatcggcgacccgacgggttccctgatcacaactaactccataccagtttttacagcagtcggttccggtccaggagttgaagattcccaaatgaggctcgtggagggcggctttgaaggccattagagcggccctgtccgacggtggacaggcctcggcgtgggccaaagtagcggccaccacaataatcatcactaagcccaaacccatatctaataataattaacgataatcttcactattgattactacagtattctcttcttcctactactttatttgatggaagctaaaataggatgaaatggagggataaggtcgtaaaggggtttgttattgtttatatagagaaagttctgacatgattttattattttctgtgacgattttgcccctaacgtggcattttagagtgacactaggcctttagggagggatgtaaaagttgtgggttcattcattgcaacaggtctcggtgtttttctgcttccttcttagccccttcttcttctcgttcttgccacgtcattactctttcatataatttttaatttatttatgaaccttaacaagacatactgtgagaacgagcatgtacatttgaaactccaaatcacaacttagttaaattatgaaagatcattttcttttgtcggttcgtaagtctcacatacgtggataaaaattacaatattaatagagaatgatctgaatataatttactgtgatttgtttggtagattgagatatttgattaatgattgattgctattgtaatttctaaggtagtactatagtcaatgtcatttttaatgacgaaagaattatgaagggttgaatgtattttacatatagctagtctgttcattttttcttattattttaaaatattttttttttgctttataatttgcatataattgtagcttttcattttagttttattatttatttgtagtgcaatttttggattctacttttccgattcaggtttttgggtgtagtcttagttttcaaaattatattgtctttgcgctaaaagaaagatatttttgtatgaaaattttgtgtttttttttttaaaaaaatgcgtttataaaaaaaaaaaaaaaacatatgattacatgttctaattatatgtacctttatggcataaacaaatattaatttaaaaattgttatgtaaatgatttgagatatatggtgttcaaagaaaaagtagttgcgtgacttgtaatgaataatgagaatgtacttttaaatgtagtagtgataagaattaattgaagaatgaagtgaatccagatgtgtttgtttggtataaaattaggcaaaaagttaagctttcttcactgtatattatatgcaacatcacgtgtttgaagcttactatcatctactctacagttgggagggacccagttttcaaatttctttaaactttctgtttgtttctgtatataaataagtaaaaaaaaacgtcggttggctggacttgaagtttgtattatcatatctcaattatacaagtttgattttgtgtgtattaacataatgatgacacatatgcctatctataaagatgaatctacctagtaatggttgtaacggtaataatattgacttattgggatgaaattcgaggttaaaaacataataataattgttgacaatgcttcactggctgaaagccaggagaatttgagcaacttcatttgatttaatgatgagagttattatgactaagagacgaagataatttattgtttttttcttcttcagattcatatattaaaagtgagttaaaatatatatataatgaagacttagataacatgagaaatcttcaatctctactttgatgcttgcaagtttattggcatcaaagatctagagttcattgattaaaagcaatgaacaaaaaaaaactaaattcttccattaaaaaaaaaactacgtttagatataaaaataatatcattacgaagttaaaattgaataatggtcattttgtctcctcttttagatagtattggtgttgttgttgttggaattattttaccagcatcttacatttactaacaagtatgttatttaacatcctaactatgaacttctaaaacgatatgaaataaacacatcgaaagtataagaaaccttaaaatggttgcagtggaataaaatgtctctttccactcagatctnnnnnnnnnnnnnnnnnnntgtagcagagtatcaccaagatgtgagtccgaatctccttctcttga

SEQ ID NO: 79148 - DNA, 1387 bp, Cannabis sativa
atatatttatagttttaaaaaaatatacatgataaattttgtaacataattttatttgacttgactttttttttttacaatatttctcacttttctccgaatgaatatacattgcattgcatgtacgccaaaaccgacgcataaaaatatatatatagtaatgtcatgtgtaatatttttgaattatactctaacacaaaagatttctgtttgtatttaattaattaattaaatttatcaaatctcatataatgtggtcaaattctttggatcactgacttgtttgcacgtttatacccttttagttttagcaaggcatctttcagatacacaaacacaaattaatactatattatatataaatttatgttataaaaaaaagtcaaaagagtttgataaatatatatatgtgcatatgcatggctggcaatatatatataactatagtttttttctttcttaattattataatttttattttgttaattatattaagcttaataagattatgctcaatgctcctactttacactacacccggtatttacaagtaacaagtgtcggtcttaactgttattacaagtcaattaggttactctgcctgagtacttattattttcataataaaaataataataagaagagaattaatcttcaatttttaacaccattaatctcaatcatgcacgtgtgttatgaccaatcacccattgcaataagctagatgagtcattgaaaataaaattgttactagtaagttttagttaatccatgaatagatataagaactctccattcaaataataatgtgacaataaatggacaaatcccatgactaattatattgtaggttaattatgaattatttctcgtagtaacagagtatgttttattgaaagaaataaaaatataaaaatatgaatggaatcgagattgagaatatgaatatgaatacaaatagaatggaattgaatgactttaatatttataggaaacagatcaaaaaagaattatattatgattcttttcatcttatattagaatagtcattttacttattttgagatgtattcacaaaaaatagtgaaattctaaatttattaaaatatgttagagaatctcatattattaatgcgtataaatataatattatatataaaatacataagttataccaattagttaaaaaaaaccttatttttagtacccgttcacactaacactaactgtaactctaatatatctttattttggcaatagcaatacttacatcttttttagtgtagtacttcactaccaaaaaaaaaaaatgagctactttaattgtgatttttagttacaacaaaaaattatttgtgactaaaatataatatttagatataagtt

SEQ ID NO: 79149 - DNA, 1328 bp, Cannabis sativa
tctaatgtcttttgtattgtttaataatattttctactttttctctgcaataaacccgtatttttattgattattagttgtttggttttgatgaaatcacagagacattcacgaggctgctcagaatcttgttccgcctaataaattttttgcagacgcagtggatgctcggcaagtcagtagctttcctcaccaagccaaatacatttcgactcacattcatctttgtagttgctgacatttgttttcgattgcaggaaatagatcttcgtattggggcttcttttacgaggtttcagactatgttgttgagagatgcatttgttattgatgctggtaatgatgagagaaaccttgttctaagttatggtccttgtcaggtatgtacttcatgctaacttgaaataccaatgacatagctgatttcaattttggattattagttgctttgcattttcaatttttactcctttttctctatacagtttcctacacttggattcgtcgttgaacggtattgggaagtacaatcacatgagccagaagaattctgggtcatcaactgttcacacaaatctgatgaaggcatttcaactttcaattggatgtaagccatccaaacatctatgcagaattttcattctttctgagttttactcgtcattatatttacaggactaatacacttttaaacacgcaggcgtggtcatttgtttgattacacttgtactgtggtaatttatgagatgtgtgtccaggagccgactgcaactgtaagtgaaattgagatttgcatatcgaggtctttgaggtatctatttaaacagattcccctcccccttttggttgttggttcactgtaggtcacaaacgttagaaagcaggagaagcttaagtatcctccacatcctttgaacactattgagcttgaaaagcgtgcttcacgatactttcgcatgagttctgaacataccatgaaggtgagcatttcacatctcacattttctcatctttgttttaattgataatgtcattacctattgaagaagaaatctagcagtttatgtgaatcggtagataatgttatcttttttatctcttggaggtgaccagacttgatgcaatgaattgcacgtttcagatttttcagtatgcaagctaagacatctcattttcattaatttgaaaaggaactctatttattaggatggttaatctgaaattctgtataaactagaattaacacagggaaattgtaatcctgggtactatagaatttcagattagaaagttaacatagggaaattgtattcatgggtattacaaga

SEQ ID NO: 79150 - DNA, 2200 bp, Cannabis sativa
aatatatattttttaataaaacatgttattgtgaattaaatatattcatttacaacaacagataatatagggaaggggacatcttccaaccaaactaagtcattaaccaattctaaagcatgtttagttaagttatgatgagcggcaaaattagcatctcgtcgaacatgagatacaacaactctagaaaaaaaaaaaaagataaaagaccaacaccttctacaataatatctgcaaaagataataacatagatattggctaatttattgtcatgaagactcttatgaagcccaaaatagactatgaaaaagtgtcatggcttccttttcatgagttttaaaacatctaataaatggcttagacaatgttgtaatcacacgaccatgttcgtctctaacaatagcaccaacactagttgcatccacatttagcttcagtccagaattggcaagggcttccatggttccttgggtgctgggacaacagctagtggaacaaaaactgggtctgcatgagcttgtgctgctctatattgcaccaagaagtttgttgcataagtagtgagatccactattgctcttgctcgacttccatgaactacaccatttatctttgtctaaatggacgatattgtacaaaaaatacatatttcatttcagttttggaaaagagagatgataaatgaaccaaataatattacagcaagaagtttgttgcataggtagtgagagttattgccggtcatgctcgacttccatgaactacaccgtttctctccatcaaaatggaccacattgtacaaaaaaaaatatgtttcaatttcagttgtggaaaaaaatgataaaagaaccaaataatcaccttggatcattgaattagctttttggaagtccaaaagaatatcccaaatatctccaaatagccattcacgcaattcaccatcaacttttactccatgttgggttaaaaaaaaaaaagataggagagaaaagatatgagagaaaagtggaaggtcaaaaaaaaaaatatttgtatggtaaggaagaaaatataatggaaaagtgtttacttagaaattgaccatgatgacgtggacatcattttttacacacggccagaaagaaaacaaacccagagtcgagagtccagaatcatagcgatcaaccctgggcatggtctttagctttacacctaggttgacatcgggggatctagtatggatatttagatcccgcaaagtcatttccaaatcaccatccttcaatgtttcgaaccaaaaagtcaagaagactctaattcacaaacctggaaactgacagatatcaatttggcatcctgaaagccaacctgggcgcctaggatttcacccaacgcccaggttgacatatggccttagggtttcagtttctggtcctgtattagtacaaatcactcgaactttgtacttagacacaaataagacttgccacaagcatgttagaggcattagaatcattatcaaaacactcccgtttggagcacttgagcacctggcgcccaggtcaacctagggttgtccccattgcccatgttgacatattgtcaatctaggggcacttccaaccctatttcttaaaaaaaaaaattgggcactttctctgtctacatccaaaatgaagacataagggcttttgggaaataaacagggccatctggtggccaagaagctcacccagcgcccaggttaacattttgtcaacctgggtcatttctaaggactttccctgagaaacctctcgagcattttcttcattttcaccaacaatgaagatacaagtgttctcagtgagcaaatgagaccatctaggggccaaaacacctaaccaacgggttgacctaggcactggtcacttaccccaggttgacattcaacctagtgtgcatggttctactgctctgacacaaattctattatggaattcttcttattttggtctaaaacaggggaggagccctcgtttgcaaattcaagtaccatggaagtaccaaaacaacactccggaagcccataaataggcacccaacgcccaggttaacacctggcctagtgcgttaggttatgccactacaaaaaatgtcacttttgccagcacatttttatgctggcaaaagttggtattgcgctggtaaaatagaatttacccatgatgtgttggcaaa

SEQ ID NO: 79151 - DNA, 4493 bp, Cannabis sativa
  modified_base (45)..(51): a, c, t, g, unknown or other
ataaacctcgttgattagcaaagagctgcacagtacgtttaaaannnnnnnaatacgcctaagatagttagggtgctacactgatgcagccgttaatgctactttgcaaacctctggttttggagctgttctacggaatagtaatggagaaattgtggctaccatggctactccttactgcggctgtttttcaccacaagtgatggaagctttggctcttatgcataatcttcaatggctaaaagatcttcaactacctatgcacttcattgagacaaaccctctcctagtagttaaaggattactttcttcaagagagctaacttttgattttcactgcttgttaaataacattaatcatttagttttcaattttcctgaagctcagatctctcatgttgatcagatctctcatctcctcaaaccatgaaaaattagtattcactgagagtgcaaattttaccaataaataagcggtattattagttgacctaaacacacgagagatctaagcaccaggcaaattgagtattaaaaagaaaaatattatctaagatacaatcaaaatcacaaaccgacattgtaaattacaattgattaattatatgccttgtaaacaaaatattctaatataatgcgtcataaaatttcccaaaatatcatatatgaaatataaataattatgaaaaacatggacagctactaatttgaaaagataaaataaaaaatctttggttttaagttttgaccgaaattccgtgtttctttcgggagacttttttaaccgcggatctcctaaggtaccttcgcaagaaaaaaagaaataattgaaaatccccaaatttataatcaaagtttgatttttgagatttttatatttacgaggccttcatttccattgtccgattctttccaagtttctgttttttttttcgttatttaaggtttcatcttctttttaaggaatttctagctttattttcgtttgaattcccactaatatcttttttccctttcactttagttattcgatttcatcgaatacaacttgaactccagcaaagattgtgtaagaacaaattttgaccagaataaggtatgttattgtttgtaatttggatatggtttgctttgcaattttatatgtttattgattttggtgggtggtaaacctttggccttgtttgttttgagtaatcgtggtctcaactttttatcttcttttcttgttattgttgttttcaaaggaatttgtaatgcttgggcttgaaatttggcattaattctcagtagctttgtacacaaactttcaaactactgtgtaatgttacccttaagcagagaattttgttgatttattcaattttttgatggtggggaaagtggttttaatttttcgatgtgggtgtttatattttgattacataaagcacactggaaacagggggaaggaattcattaatggaagtttgtatacaaattctcttttgatcttgagattagtgtttgtccattttcttctaatattagatatcatttcatggtgttatgaagtataatttttataactaagtttcttttagctctcatactataacacgctatgccgggctttgattatgttacattgcatagcttagctttttacctaacaatttcagtgattaaaacttttaaagtcgttgatctaaaccttcatgtggttctcttggtaaagatttaaacttatgtattttcttgtgtgacagatatgcagagccaacttgtgtgtagtgggtgtaggaatatgcttttatatcctagaggagctacaaatgtttgctgtgcaatatgcaacacaattacctctgtcccccctcctggtatgtctcttttctatttccttttcctcagtggaaactttgtaaatatttcacggaaagcttttggggcagaaaagattaaatttgtgaatggaattcgatacaatggtactaaagttattattaatgatgttctgggtgctgtgaaatatagaaagaaagctcaatttctgtaaacaatcataaagagttcacacacttacaaaaagtgcagcaatgtgcatttttaacaattgaaaggatgaaaaagatataaattagatgtgatcaacaaaatgatgtcatgattggtctgccaactgtaaagatcttctttcccgttggcttcatgctcttttcttttcgtttcttaatccagatacatgaaagaattagatttggttgttcaagttttgttgattagacaagatatatacgagtgtgacatcaattgtgaaagcaaatggatgttggtcaagttcttaaattgatacatctggagagataaatatcaaagattcaagcaagtcaattacaattacgtctcctagctataattgttatttattttgacaaggaatataacctagttgaggaaagtgaagagaaagtggagatcattttttttattgtttttggtataagcggaaagaaaaaaaatatcactcgtctttttgatacaaaagtaatagatggaagtagctaatgttccgtgttattcataataatatgttatattgcttagaatctttttttatgtgttctttctctgcctgctgtaatttgtccaatcttagaaggatacatattgtggattgattggtgacatcaaatctgtacttctattctgattattctctgccataatccctccctatgatacaaccataaataaatatcaaaatccacctactaatttctcagtgcatctccttcacttttcctgccaaagatagcctaatacattatacagtatattttgcatgagatttctcaattattagtacatgtatttatgtaagttataaaacaatatgctattaacatgcctagcttcttcccttttttgaatatgttctgttactgtgaaatttttgcagggatggaaatggcacaactaatttgtggaggctgcaggacgttgttaatgtatacacgcggagcaacaagtgttagatgctcatgctgccatacagtgaatcttgcaccaggtgcggtatatagtgcttatgtagtggaatttgtttctttgtagcatgacacggcaaaaagttattcttattgcctgaatgatatgaacttcacactgtgtttaaatagaaatgaaactttgtatcaatcgatgagataaaatacaaattaaaaggaacatgtgaaacacatgttgataagtgataaatgaacctgaaaaccgctaaaaacacacaataatcagagaaagaaagacagcaaaattacaagatattagtccattatttgtttaagtgtaagatagagagtccctcaaatcttttggatttataatcccaagtttttttttttttttttgcaagaattataatcgcaagttgctacccagaatttatctttttccagagtttttcttttgattcatctctgttgtcaaataatctgctgcttctgtccaaccgcacagcccaaaaaatggtcagtactgctgctgtccacaaagatgaggcccgtctatctcctttaaacttacaacacttcattcagttttctataccggaaattctgatcatacacttttggactcattggacatgttctttaaagtagcagttattctggaagcataacatcatttacaacttataattgttatttttttgcaaaaagatattatgagatgataataggcagaagaacattacaaaagatgataagaattcttctttggatgcataaagagtagcaagtcatctaagattacaaccagagatttcattctcagagtaaatcaggaaaagaaaagtcaataagttttcagacttaaagattcacataactgttcaaacatgactttttttttccacaagtgcatcaattttgttttgatgttctgaaattcaactgttcctttcaagccagagttgccaacatagctaaaggagccatgttccaggcctttttccttttacttgaagtgactcctgttcgtttttcccatgacaaggcgaattgtcttgatagtgatgcaacgtcacacaacacttggaacaatcccatgtcttagaagagaaaaggcaatgtttaaagaagttgtctctagggccattactttttctgtgaagaactaattgtatgaatttaatgagctgacactggaggaagaatctgattccgtagacatttgctaaaatcgtataagctgttctgttcatcatctaattgttatgtgtgctcatatttcatttagaaattacctaggaatgtctttcaagtttgagtattttatccttcatacttcttaatgccttttaagaaaacattttgtagttttggttcattgctgccctttgtagtattttaatacagcatttgttaatgcatatgaggactataattgtttcctccacaactttgttgggccgttccccgcttattacagtgtacacacatctgctgagt

SEQ ID NO: 79152 - DNA, 4766 bp, Cannabis sativa
gaactaaaacagatttgtaacatctaaatattaccaaattaccaagggtggaggtaggccaaacttaacatctaacaaaataaataatcttgtacaagaaggatggatcatgtatggaacgaactacaaaataatgatgtttatatcaacgtacctaacgacggctcaaaaggggatatcttcctacgtagtgacatatctactattttgaacaaagactggcacttcacgaaattcctcaacgctagctgcatatttctcttcaagaatccttagttgcagatgagttggcgtctgatgaattatctttctggctcggtgaagccatgcttcctcggagtttcatgtccccgctttgctgctgctgctgctgctgttgctgttgttgctgttgctgctgttgctcttgctgcatatgttgctgctgaagttgatgcagttgatgttgctgaaactgatgctgtggcttctgagaatgaatttggagctgttgaaactgttgtgcagttaaaagagtatgcatagcatgattgttcggataaaactgttgactgcccccaaaagacgagaaattcatcataggtccactgtttggcatcggttggccagtcattactttcaaatgctgaatttcctctttgagtgcatcatttaatgctgtgaaaattaaacagaaaacaatgccaagaatctgtaagagctccatcttggataataaaaatgcaagttataacatgttcatgggatgaagaggacgtttgaaaacaccaacacttggcaatagcttcatcttataaagttcaagaatcatccatttgtcaaaacatcacaatatttttctttttccaaaaattaggcatgcagagaataattctacttattttggacaagtaattatcaattttgttggagaaaaaagtatttgattaaaaaactcaacagtatttacccacacaagtatcactgtatacgactagaagtatccttatagttttaaacatcacacagatcaacaaacccagcaaccaaccaagttttatatatcacctctttttttattagaataggggagttggggtgggtgatgcaggagcaagtttcaagggtagaaatttaatcctacaaattgactgacaatttcaacccaccactcatctagtttaagattatggtaacctaatccctctaaatgtcacacaaatcaaccaactaccaactaaccagcatagaaagaacaatatctcaatttacacaaaactgaacatgctatggggattttttttccccaaaagtaaataaagaccaaaacacacgatacaagagtacagtattgtaattttttaatagaatttttaaagcttagaaagatttgagcatctactacaacactgagcacaaatcatcaaagtagaaaagcatatattattaactccaaacctattggtttccacttggccaaatagtcgagtttggttagtacacgacgaaggagctcctaacatattttaagaatgattttggtttaacatccatttcatgaagaagataggattgaaaggctatgaatgtaggaaggtcacagttttcttcagatttttctggacccagcataagaggtaactgaaactcaaagaatataaattgtcactattctttcccaagtataggttggcaataattgcccagtccacatcacactttcagtattcatcaggtcagctgctaaaactgaactcgaaacctattttgaacttatgtcctaagaaagtatcgtaaaatagaaatcatatcctttcctcacctcataagacaaataattataaggaaaggaagcaatcagaaacaggtataactatttagctgagagaaagggagacaaagagccctcaccatcttgcaagtgaacctgctgctccatagtttgcaaccgcaatttcaattcactgttttctgctgtcagaccatttgtatctctctgctcatatggaatccacagaaggaacaccagtcaatcagattcgttatccataaaatttaaaatacgtataagccttttgatagatcaaatcaaggataccaaagtcgctgaaccttagtatttaccagaaaaaagaacaattgtttgctaaacaaaagcaaatttacctgcaagagagtcaattgggcagacaaggaagttgcttctgtttgcagggtctggacttttctttcaagctcagcaatgtacctcatcttcctttctttagacctagcagctgattgtctatttgcccaaatcctattgcatgacataaaaaggaatgtcaatatgatgtttaaatggaatacaaacaatgtaatgttagttcaacacccttttcaaattcagaaaagaaatggcccaaattgaaattttaacgcagcgcttaaggttaattaaatatcaattggttcatttcccgccataaaaagtacttgaaaaaaagtgtactataacaaaatattaattttatggtcaaaatcatctgagttacagcctagaagaaagtataacactataacttactgcaaactaaacagccaaataaacaaaagcaacatgtacagaacaaagccatgcctttttagagccaaagctgccgaccacactaaaaatttaaatttgcagctcaagacagtccctaaaaactttcgtcataaaataaaaaaatgaataaaaacaacaatgaaaattgtatatctacctctttgcgcgcttgggatcaataagagctagctctgcaagcttagcagcagatattgctttcttggaatcaactgaagagatatcttctgaacctggaacaagcatttcaggcttgatagttgtcgatccatccattgactgactatgttggtgtctaactcttggtctctcattagcaccagtggccacctctgcagatgatgttgctacacctgacatcgcagtttgcattggagtggctcccgcagaagagggctcgcccaattgaaaggccgatgtagcagatgaagaattaaacttatccatatcaaggtacatagacagcaagtcttcttcagtctcatcagaaaacgaaggaccatccgcaccaccaactacaccaagatcactatcaaagctgatatcatcgggaagggtcagaatttcagaatgcgctcgtctgtgacccaaattcctcggtgggttatccggcattctactaatatcatggctaaatctacctgaatcagtagccaatccatgcccaaaatgacccgcttctgaactactaccaggggccaaaggagggaacgaagaggtggatggttcgggtttcacattgaaattacttccaccagatgaaaaacctgaataccgacctgacgggggaggcaagccacccccatgaccaggagacttttccttatccatcccagacattaatcctaaaggtttacaaaatcctattgttagaggcttcaaattctggtttccaatccaagaagcgcaaaaacagctacctccaaacaataaggggcaagtctattattctagcaataacaatcaatgctaacgttgaagcttataaaattcttaagcaaaacaaatttagaaccctagaatctcaccccaaatgattcagaacctataaaaatgaaaacgaaattacaatacaatataataacttacacaacataaaagggcttcagaattcaaatcttcgatagatcgcggaaacgaataaaggagatctaacacagtgcgagaaagaaagaaaaacaacaattacatacagagaatataagtgttaaggagaataactcagctccagataatcaccgaatagctaagcgaagctggaggttggaatagaagggaagtttcggggaaaatatagggattttctaggaaaatgaaacattcttgagcatgggaatgaaatgcaggatggagagaatccaacgggttttctcgcatgaaaagggaattgtttttaatgagagcagcacatggagagagagagagagagagagagagagagaaagatcgaacagacaacgatagcaaagaagcttctccaatacgatatagtatgtctctaatatatactatttatatgcatatatagtaacaaaatatatcccatgtcataagatcacttctctccgttacatagataagatattacttggtactaatatacataaacataataatacattttctttaagttgaaaagtttcatctactaagcaccaagctctaaaaaggtggggtaagaatttattcaatcataacatatcaacaatttgtggatacaaatcaaattatatggccaccaaatcacattactagctgataagattagtttagctaaaaaatagcaacaacattataagatttataataatgacaaaactaataattttgaacctattacaatgaccaacaatgtcattcaacactagtcttaaagaagcaataatagatacattgctcttgattttaagaacaacactcaaacaatcaaattcaataataatattagcatacctaaaagaaagatattaagccagcacattgcgaataaccataacttctgccacttcaaggttaaaacaaccctctgatctccaacacgtcgaagaaagaactacactccattcatctctaatcaccatgcctagaccactacaaccaccaatcaagtcaatggctgcatctgtgttgattttgaggcaacctaacggaggaggaatccatctatgcaccatcaggattg

SEQ ID NO: 79153 - DNA, 4251 bp, Cannabis sativa
accaactcctcatccagtggtttcggcaagagagaaaaagagcaaccgaaaatggaaaaaacaccaaaggaagacactgaaactgtaaatggagaaattcaacaaccaacctccattgacggatcaatttgtggctacgactcacttcaccatctccttgctgccaatctcaaaccccatctatttcaggtatctctcccattttccattttatctatttttttttgtaatttcaatttcggatcctcaattaatgtgctcgattcgatttattcttttgacattagtcaacgaggcgtaattcttcctcaacttttcactgtagcaaagttatatttatagagagggagaaaagtatggcgatttatattttgagtttcctgtgcatggatgattaaagtgacactgacagtaatctatatctcattataatctgcatattttctctacttgtaataattaatatctttgaaatttccactgaattggatgtgtttgttttagcctaggttgttaattaagaaaatgggtttcatcttttgcatacttctgagggcaatctctttgatttagacataattattgtgaatggtagcatctaagatgtaaattagtgatttaaagagctcacctagcaaagaatgtactggaaataacacaacatttgttatttttgttattttattagtatatttagcttttaaccttaaatgattgactagttatattcttttttgattgttttacatcataaaattaatgataaagttattactttttatattagtaaaaatattaaattttgcattaagttttgtaattgtgtatgggaccacaattataaaagttgatgtaaatatatcacaaagtcatttttttgtgtcaaatatagcacaatcggggatggtctagctatctttttattgagttgattggttctgtagtttgcaaatgatttaatagaggtttattagcttatgttgagttttacaacaatagttgcagcttataaactttactcatcaatataaatacacacatgtaatgatgactgtcattttaaagcaaaatgtgtgcttaatttagtcccccattccattcgaaaacacttctgcaagtaacagttatttttcgatgtcttcgtggtagtgaaggttgtttattcatgtaatgtacttttgcaggaagttagccgattgcttttgggactcaactgtgccaaggcacttgaaactgctgtgctcccagaatctgccaaagctctctcttcagaacataattttgatctccaggtgtgcatctcattcttatgagttatggcaatccagttacaccttttgtttaagtggtactagtgccttattttggtgtttttgaggggagtttataaggtttgattgtattgcgtaatgtagttccatctgggtttgaaacataatagtgatttgaaagtaattttgacttttttctgggaaacctttacagctttatgttgggaaaggtgttaaggaaagttgatactagataaactctgcagtgagtgtttgtgtttctcaagtttttctttgccagcaataaaattgaagtgtatttggatatcatctacaattatgtttttttttttggatcatcccttctaaaagtatgtttctagattcaagaacaattattgggaccctttggctgaagcagatgatatttttaaaggttactgaaaactattttgactttgttctttggtcattgtaaatttattcaaagatttttatttcttttctattgacaatttttaattaccatgccggtactgatattctgtgattatctgtaatttctttcaggctttctgcttccatgctgataaagagttaatgagagaacctcgagtagttagggttggtcttattcaaaactctatagttcttccgactactgcctcatttttagaccaaaagagagccatctttcaaaagttaaagttgataatcgatgctgctggtgcttctggagtaaacatattatgcttacaagtaggtcataccatcatttgactttgtagtgaaaaaaatattttttttgatattctatattattctagaaaaagtacatgaactcctattagcttaattcaggaggcttggatgatgccctttgccttttgtacacgggagaagagatggtgtgagtttgccgaacctattgatggggaatcaacccaatttcttcaagttcttgccagaaaatacaacatggttattgtgagtcctattcttgagagagatattaatcatggagagactatttggaatacagctgtcataattggcaatcatggcaacataattggcaagcataggaaggtaaacatagtgaagttcatctacgtttgactacttttaggattttgcattctttcatagtttaatcaatatcaaaataccgttgaacagaaccacataccaagagttggagacttcaatgagagcacatattacatggaaggatctactggacatcctgtgtttgaaactgcttatgggaagattgctgtaaatatatgctatgggaggcaccatcctttgaattggttatcttttggcttgaatggtgcagagattgtcttcaatccttcagctactgttggtgaactaagtgaaccgatgtggcccattgaggttaatttccttaactaaatttctctttgtgtggtattttccccttataaaaccaggacccaaaattgtggacgacaatgagaacggttctgttcaagagtgatcgactgggagacctcccagtcgaactgccagggccaaaaattgggaggtctccctttgaatccaactttcagtcttaaactaaattttatagaagttgcaggtggcaaattgtgccatttggagaatttctggatgtggcttcaatactgatagtggcattttgttaactcaagggtctaattgtgtgatcttttgctttctttgtgatttatttttagttcttaggtcatggtaggtgctgaattttgctgcctatctttcttccattttctttaggttttgatagcttcttcaattgttttcctttcaagttttctccatttcctaataatcaagcattgtcaaatgtctagtactatcacattggaggactacaaaccttacaactgttatttctcaaacacttcaaaccattcatcaagttcagattaatttcttcttaatatttactataaaaatctgaatgattttctttcataattttgatgagataaaaactgcaaatgaaatcatctcatgccttataattcacatatctacatttggacatgcatgtgtgtggttatcaatgaaccatattagttatttcccaacactagaattggacagctttgatgttgtcaaattcactgattttctctatgagaatttattttttatatttcaatgtatatactatgttcagtagttatctatatcccactctagttttccttatttatgtaacttcattatagattaatatgatatttgatgatgttataggcccgtaatgctgcaatagcaaacagttactttgttgggtcaatcaaccgtgttgggactgaaacattccccaatccgttcacttcgggtgatgggaagccacaacatgctgacttcgggcacttttatggttccagttatttctcagctccagatgcttcatgcagtccatctctttcacgctgtagagacgggttattaatctcggacatggacctgaacctttgcaggcaactgaaggacaagtggggatttcgaatgacagctaggtatgagttgtatgaagagatgctcgatcattatttgagcccagactttgaaccccaggtcatttctgatcccttgttgcatagaaactcttcataagctgtttatgagatgcaactgaaaataagattatatggaccgaattcccgattaagaaaataagcatggtccttgtgtttatatttgttttaatgttttgatatttgaaaaagaaaagagaaaacaatcataaacaaaattgaaccagcttggtttgaaattaaaaaataacatgtatgaaagttgaatcccttcttttatccttgggtagcattttcatgattcttatacttcttgttcttttctttgtagtgtttaatggttgtgaccatattcatcatgaacatgtctttcatagaaaaaataatggtttttgttaattactatatggtcattgcac

SEQ ID NO: 79154 - DNA, 3942 bp, Cannabis sativa
aaaggacatagcagttatccaaggtgcaagtaaactacattgtagattatcctatcaattaaaccccgtgtactgataaattataggaatagatttaatcatacgatctttattactttcaactgtgttgacaacacaaaaaataagaatatcactgtgataaggaactggatgaactatcaaataaatacctaaatgatcacatgaaccaaataacacattaaataagtactgaaaataaatatgtttctttattaataaatgaatacaaaagattacattgaaatagaattttatttagggcactaagcccaacatgttcatggtatattccctataaacagtgcaaccattccattatcaagggacccgtgttaagacttttgagagagcactcatgctgttaaaatattttgtaagatttcatcaaggttgttaagaaactaacttgtccaactccttgtgatcttgataatcttcgaagtaatacaaatctaaaaggagtaggctattgccataatcacggggccaaatctctataaacttctctattttcttattgctcataattattattctattactattaatcaatataatatcactttaaagactcagtgtcgttggctaaaagtaaggttaacattatatttttcatattttatggccggtaacaatagaatgcgatgatttggtcattagattcactgagatatggttgagtatcttggatttagtgggaaagtttttagacatttagaatattggaataattcaaggttatagttttaaactatttcacccttaagttgtgagattacttcatggtgaagaaatgacaaaactatcattttttccctaagctattaataacttgtttttagtgaatctcttagattattctaggagtttttaggcagattactacttagaataaaacaaaatttaattagataaacctaaaaaaaaaatcaacctctttctctctcttggcctcaccctaaatcaggaaaccccaaccctttttgctgtgaattcagaccaaaatcaagagaattcatgtaggttttgaaggttaggtacttataaaatcaaaggtaactatagtctttcttttctttcttgaatttttgagttaagcatggtttaatgagatgaaattattgtgacagttttgttagattttaatgctattaggtttaagttttagggtttgttttatgatgaattatgttgattttgaggtgtttcgttggttatggttgtgtttaggcaagttacagtttgaaactcaaagcttgttcaactatgacaaaatttgattaagaggcttgatgttgtaatttatggttggaatatgtttattatgatgttattagatcttttggaggttttgattcgacttagggtaaaattgaacttagaatacagatttttgtattttttgcagcaaaacggtccaccatttcctagaaaacggtgaatcgttttcccaggcagaaccttaggaaggagtccaccgtttagggatctggttcaccaggtggtgtgattttaggagcctcagatttcgtgtttccttgacatataaggtattgccacgctatttatcgataggaaaaattctagttttgagtaagtcccagaatgtgatttagcgggtcacttacctatgttatgtaaattgttacttagggcctttaatcatcgagcagcagttttcactcaggttaacaagcacagctgaattcaaaattgaggtaagattgatataatggacatacatgcatacatgtttagcatacatatttttatgatttcctattaggtaacatattagtaagagcggtattggtgtcgatagagttgcactggataccgatagatatatgttggggaatttagtaagtatggattgatgctatcacactagtacgactagagtactgagtataggttgatagtatggtcaatcataatatcatgaagaacattcaagacctacacacgttggacaagggttatagaatcttgattaggtgaatgcgcgccaagttacagctcacttttatgtttatgtcttatgcttttttaactgggtctatcaacaaacagatttatttacacgcataggtaaaggcaaaggcaaagtaaaggttgagcaacagcgagtctggcgcttcttaaagattgtacgtatttggactgttaggcctagagtattctggttttgggatagtatgggctaagattttgttagtccctggaggacacttttgtatatgcaatatttttagttatgattgtaaaataaaacgggatctcaaaattatgtaactttatgtatttaatatttagttattgaaagctcaagattagttaaaaagctttatttaatcatgttttttaataaactatttgattagtaaaagattgcacagtaattaaaaaaatatggcgacatgcctaatcaagtaaggcggtcaaaagcgggtaacgagtagaccaaggaactttataatctaattagtaggagaactttatcactcaagattgaggttgaattgacctatggtcaatattagtgatatgaccaaattagctagctacctgtacattctgttatctaatattaattctgttatctaatattaagtctagatcgatccagtacgatgtaacaaatacatctgatcttatctacattaccaaagtcttgaaaaaaacttaacacttagtgtaagtagaactcacatagattagctaatgagtgtaaatctgatacactgactaattttaatacttcaatattttgatcatgtaatcataattattattttaccgttatttatattacaataattatgactagctatatgctcgagatttaatagaatttaatgttaaataaataatcataaataagacacataagcaatataatttgaccaagtcagaagaatatcatttttttttattgataataataataataaaagttcacaaattaaattaggccttaattaacgcataaaaccccaacacctacatgaaactaggggcaaaattaacactcatcttcaaaagatgattgtaaagtttcaaaaatatacagtttttgaacttgagattaatactcaaactcaaatccatcttatccttaatagttagaacaaagagatagaaaatatgagagattgagagggggacaatcgatagttggaactggtttgttaggggctttaacggtttgagcgccatgagcttggtcatgaggtttttgggaacaattaatggttggtgagagagatacttgagaaagagaaagagaatgaaaggaaaaaagaaaaagaaattataatttttgatataaaataaaaattcttaaaaaaaagattaattcggtaaatctgatttgatctaggtaggcggatcattatatggttcggatcatatcatatcataatttaatcagatccgctctgatcctgtaaggacttggttgaccgagtcaaaagtgaaaatacatatataataaataaataaatagtataataatatatatataaaaaatcaaaatcaaatttaaacagaccccctcatattctctctctctctctctctctctcttgaaaacacaaaaaaaaaattaacccataaaccaccatcaccaccactctccggtgacccatctccggccaccgtatagcccacgtggtagaccaatcgaaaccccaggtgccggcgacctcaccccccaagcggcgccgcttctttcgccgctgttagctcaggatcgtaagtcaaagtttgacggctcaaactttgaacagattttttggccacctccgatgtccgtttaacgagccgtcttcaccaatagactcagctcgtcaagaagaacaacctacactaagctatcttgcccaactcgctactttt

SEQ ID NO: 79155 - DNA, 3288 bp, Cannabis sativa
ttgttgttcactgtaaaatatatgcatacgaacaattctaaatataatacagaattgtgcatctccaaccattcatacaaattctcacagatggatcttacttttacgctcacttgctcttttatgatatttttatgtgggttaaattatccttatatttaaatgttgtgatcgaatatcattgacttactccatactctatattaaatctccattgttgatctgacaccatactaccataatctataattgactcactccatactctagtaattatgctatttggttaagagtttaatctacttactctactgtttattaaatatatcgaggatgagttgactatcatcatgatgccaatgaactaagattcctcctcctataactataaaataataacacaattatctgtaactacaatcacctcaattaatgaatctgactttataaaattgcacactctaaaagcaatacaccaattaattttcgccatccacattctttacacaactattaattaagccaagccaacaacttcttaggcataacttttgacaaataacaaaactctttcacccagagagggtgttgatcaatcaacatagcagagaaataccagatcaagaatatagttgataatggctgaagcttttctcactgttttgtatgacaagctatttgaaaggatggactctccagagattgccaacttcttcctggaaaaaagatcaatttgtgagcagctaagggagttgaaccttaagctaaagacaactagtctacttgtcaatgatgccgaagagaggcaactcgaggagccggatgtgaaggaatggttggatgatctcaaacatgtaatttacagagcacaagacatggtggaccacgttgactatcaactcctatccaacagccttggacatgaatcttatagtactgatacaactactgtgcttatgaaaatgaagttcttcctctcttcaatgactgaatttgacagaactattcaaggtgatcatttatagaatatttatgagaacaaaaatattattatgagaacaaaaaaacttgtaactaataacatcttttattcccttgggcagctgagatagctaagatcttggttgatacaaaccttcttttacagaaaagggttctcctaggtttgaaagaagataatcagaacactataccttcacaaagatcagttgttccactaagagaacaacaacgagttcatgtacatggaagagatgatgataaagacaagataatggaatggctgataacaaatggaacattaggtagtgaaaagattggtgtgcttccaatagtaggcatgggtggaattggcaagaccgctctggctcgccttgtttacaatgatacaaaattaaaggaacatggtttcgagcttaaactgtgggctactgtatcagctgagtttgatgttgtaagagcaatgaggattattttgcaggctgctactaattcatatctcactgctgacatcaatgtttcaattaaggaacttcaagatagaataaaagatgccttgagaggcaagaaatttctccttgttcttgacaatgtatgggatgaaaatgaacacaactggaatgtcctaaaactggtctttacatctggtgcgcgtgacagcaagattatcgtgactacacacagccaacaagttgccaaaattgtaggaagtgggaaaacttatgaactatcacaagtatctcctggctattgctggaaaatatttattgatcatgccttcaatggagacttggagtcaaataaacatttgcaagaagttggaaaaaagattgtagttgagaaatgcaagggcctcccactagctgtcatatctcttggtggtcttctacgattcgaaaataattcaaacatatgggagaagatcttaaggaatcatgtttgggaatggtacgaatgcccgaacaataatatcgttccttcgttatggttgagttatctttatcttccttcatatttaaaacaatgttttgcttactgctctatgtttcctaagaatcatgaatttgagaaggaaagaatggtcttattgtggatggcagaaggctttttggaagataaccaattagaaaagagattagaagaagctggtgaagaatattttgacaatctagtttcaaggtcattattccaaagatcaagtagagatgactccaaatttatcatgcatgatttggtgcatgacttagctatgtttgtctcaggagaattctgtatggcagtagaggacaataatagctcagagcttctctcgaataagattcgccatttatcacacacaacaacatctgttactaactgtgactcagttaggaacggtctatcaagagcactgaatttgcgtacatgggcagaactaagtacaataacatcacacaatgagatcactatagaattttttctagcaacaaaattcttaagagtactatctctgcttagtttttctatgccagccatgttgcctgattcaattagtaaacttaaacatttaaggtatctagacttatctcaaaatttgataatagagttaccttcatctatctgcatgttatataatttgcagacactgctactgtcatgttgcataagccttagaagattgccaaaggacttgggaagactaataaacttgcgtcatctcgacactattggctcgccactagaagaaatgcctccacatatgggcaatttgaagaagttgcaagtattacatgaatttgttttgggtaaaggacatgacaatgcttcaaccattagagagctgggagagcttcaccagttaagtggagaactttatattttgggtttgcaaaatgtagctaatgtaaatgatgctcttgaagctaatctgaggtataaggagaaactcactggcctaactttgtattggttgggtgagaccatggacacaagaagagaaagggaggtacttgaagcactgcaacctcacacaaacttgaagaaacttataatttattcatatgccggttttagtttccctaattggattggagattcatcattctcaaatatagtgtcaattcatctgagtcataataaatattgttggtccttgccatcactggggcagttaccttcacttcaaaagcttgagatccaaagttttcatggggtggagacaataggcgctgagttttattatggaaataacccatccaataatattactccatttcagtccatagtaactttgatttttcatgacatgtt

SEQ ID NO: 79156 - DNA, 4875 bp, Cannabis sativa
agggcataaaacccaacaatagtagcagtcaagaactgtgtgaccaagacgatgacacagctgacattgaattcttgatggtggtgcaggaaatcgtcctcctcttccagtgaaagtgttaccacgactgttctgatttggttgataagatttatttcttgcatcacgagtgttgttcccaatatatcctcctctcgaattattgaagttgtttctaataggcatgggatatcgcatgttgcgattgaactgagctatgttagcttcaaggctcagatctagatcaaaggcatgatcaacttcagtctttgcaagatttacactcatctcatgttcttgatcgattttcttaattctggactctgaggcaagcaacaatgcttcaatttctgctacaatataaccttcaattctggtattggtggaaattatgaatgtatcatattcaacagggaggcctttgaaaatagcagaaatgtgatttcgatcgtttagagtttctccaacacttgctagcagatctactgtttgctttacttttagtaaatactcattcaaagtcatcgatcctttgtgaagattctgaagtctggtgcagaattacaaaatttttgatgaaacacgaagagtaaagtacttttcgagagcgttccagatctgcctagcagtgttgcatcccaccattctggttaataagctctctgtcatggaagacaatagccatgacacaagaagttggtcttgaacatcccactcgataaatgcttgattgaaaacaccattagtttgatcagtgtcattgagaaattgaggaggaggagctgtattttgaatgaacttctatagccgattgcctcgaatggcaggcagaacctgttgtttccaaagaagaaagttatgatcatttagtttgacaaaaatcgaatgattgaaataaactggtgagttctcatcttgatctctatttcgacttcgattctgagtgctggtttgatttccaccattgttgatcgtcgttcctccattagcagctgtaccaggacctgagctagccacattcgccatgagaggtggccactgctctgataccatgttaggagagttgaatctcctagccattagagcttagatgaagaacataagcaataaagaaagaatagagagaaaagatgaagagaaagactgagaaaggggaatgaaagattgattcattactgggaatattcagtacaatatatactaatcaaagatgagtgatcatcaaacaagaatctgttacaactgaaaagctaatcctaacaaccgaaaactaaagcagttgagaaacaacttagcagaaaataacagatttaactgaattcccttaatagtctatgatgatatatagtttaaagagtagaattaacaatataggcaaacaatgcactttacagaaaacatgaatgaaaaccctaataacactttcaattaaaacactaataagttgccaacgttgaatcattaaaaaatgcaaagaattctagatctcgaatccaaatgaacatgtgacaaatcacattattagacaatattgtcccacatggatcaaatgtaaaaatattgagtcatatataagaatatgagctactccactcattatcaattgatttgaaatgaaataccatgattcttgtcatggtatcaaagtcatattaggatttttgatccacacatatccagatagttaacctcctgtaagcgagcaaatgacactctcaatcgcgaacaagaataagcgagcaaatgacactgtttgtgataaggtgattcaagattagtgagaaaaaatagtcaccatcttgatggggtatattggacagcattgttccacatggatcaaatgtaaaaatacttagttatagataagaatatgagctacttcactcattaccaattggttttaagatgaaaccccatgattcttgtcatacacctatttaatgagtatcaaccaaagatcttccaataaaatttgggtaacaacaacactattattcaatcaagaataaaacgaaataaccaaacgaccaacatagcgataacaatcgtaacaaatcatcacactataaaccatagggcaataagaatctgagaatctcccagatctgaatatgggcaagtataaacatgttggttacacaaatgtgttttggaccaattgagattttcccaacgtcccaaaaagaaataagacaaaaatttcatgtcatgaataaacaaagtcttattaccataacaatagcaaggtggtgtatcaacattgttaacttagaatttcgttaacataaatgtggcatgataattaatgcccataattaattatataatagataatatatatttgattatatatgataatgagagaggagaattttttttcgtgattttgtaattaaaatttacatactccatgaatgtaaattatttttgagtttctttgagttgagattaattacaattttacagagtttctctaagcctgaaattgtttcatgcttacaatattttcactgctatttataggattaagatagcagtagtaaattaaaagcatcaaaatatcagcaaagccactcgacattctaaagttccccatatgatcgttcctgtttttgaatttctagatccaaacccccaccccaaccatcaacttctaccctgaccataacagaaccccgaccattaaccacacagattgccattttgccatatacttagatccccaaagcgaccgaaatagtcccaaaccccgaaagaaatagcttgaccctcgaaacgctcgatccagaccaaaaagatgaagcctagacccccacccactaccagagcccacaagatccacacccacaaagtcggactaagcaccacaaacgaccaccacacaaatcaaaccaatgctggccaaccttgcattgaatccacaacccctcaactagagaaaaggaccccaaaaaccaaaaatgccaccagaggaaaatgagaaaaatactctaagaaaaccagaccactcataaaaattcccgaccacaggcacacctaaggccaataatggccgtcgagccctattcggtagaaaaaaaaaaagaaaaagcgactttagagggttaaaaaaaatcgtagcagagcctcccatataaaatttaaattatttaacattagtattcaataaagctaacctaccaacttaccaaaattttcttttacatgttcttagacataacataactaaataaagttagtttaaaatttaattacgatttttttttagttttttagggcaatgagcaatttggtttagaacatgtatagttagataggattaatttaattgtgccacatatatcatcacttcatttgaccatctcaccttttttcaatctaattatttcatgggttggtaattttcttctaattaatctttctacaaattttgtttactaaatcatatattttatagtataaccatactgttagaaatttaaactttctcttcagttatataaataaaaataagtaaaatgcataaaaacaacaaagagaaaactttcaaagtagaccttcaaggcttttatattcagttttaatacaaaaaaaaaaaaaaagcggaccttttgttgttataaaccctttctctttgctttgttagtcttcgattttgaaattgccaaaaatcgaaagaaactaccaaaaaaattgaaaaaaaaaacattttttctagtagtattgcgatgttactaaatttttatctttccataaattcacttgtgttaccattgttattttctttcctaccaatgaaatgagttgtcttatgagtgaaatcagtggtataattttgtatattttttttcttctccattttatttttggtttttgttttgatgaaataacatctactcgaacacttgtggactttttcatcttcattttgattatttttctagatttgactgatgaaatgacattttctatgcaccaaaaaaatgacaaaagcattatcattgcagtaagaagaaaaaaaaaatgtgattacgaattaattattggcattattaattcgtagtgccaataattaatgacaaagcattagtctattaactttatatactttgacaattttcgtttttttttttttggaaattaaagaatttccattaaataaacaagtcaatatatcatttacttaacaccaaaatgaaaggatggaatggaattaccacaaactaaaattatataatttgatttatcaagcttatattctcatcctagtgtttttaggaaaataatgccaagtagtcaagtgggctaaagttgagattgatgagagaatgagttgtgatgatgttcacacactcttggctattgtatttatatatagagagaaagttacaagtacagaattctgttaagaaaagcagagaaagaatataactaactctgtatacagacagtaactaacatgtaacagaattagctaacttactaactgactaactaactaccttctccaacacccccctcaagctgtacttagagtgttctaagtaaagcttgttacataaaaattgaaatctaggagaagacagcggtttagtgaacaaatcagcagtttgatcttcagtaggtatgtagcagacttgtaacttgttttgagaaatttgatctcttatgtagtggacatcaagctctatatgctttgttcgtgtgtggaaaatagggttgagagccaaggattgagcactttggttgtcacaccacaacacaggtggtgttttgtgaagagtgagaccaagttcagacattagtgagttaatccacacaagttcagtggcagct

SEQ ID NO: 79157 - DNA, 7202 bp, Cannabis sativa
  modified_base (6923)..(6925): a, c, t, g, unknown or other
aagattagtattgtaggtttgaaaaaagtttgtcttataattataagggtaaagacaaaaaagaaaatagatttgtaataaaattaaacttataaaggtaaaatagtctataaatattacacaaataagccacttttataatagtaagatataattattttacatgtatatttatgtaaatatcatataacaggagaagacagcaacaacctaaaaaaataaaaaccctattacaaatttacaataagaggtgttaacaaataactaacaaaccaaccaatatccaaacatttcattatattcttttatctcattcctatgtttaaacaccaccacacctctggttggacggattttcctctacttgtttatgataacagagtttctattttatagacttttgattgaaatctctagaaaatgcccattttaaataatgacctcttgttgtagcaggtataaataaaattttgacttctctctcctactacctgtttgttaatttgctagagagaaaagacagaaagaaagaaaggaaaacgaaagagagatagagaaagattgagagctctgtgggtggaggaggatagattaaacgagctttgtgatgaagaatatgttggactgaagtgaggagaggaccccacatatcacgttcaccatcttcttcatcaaatctttattctatctatcccctcttttcttttttcgtttctttctgtaaaacttaaaagaatattatatcaccaaccaacccaccaccttaagatcctcctccttcttgattttttttccttttaattttatggtcatttccttggttttactcatattaactgttgggttcagcttattttgatttaacaccaacccatcaggtatttgtttttcttttaataccttattatttccaaaattttgtttgtttcaaaagattgaaatttcaagagattttgaagatatgggtctttgaatctagacttatcttcatatccttttattgggaactccaggtgtcagagaaacccatatcagatctgagtgccccacctctctttctctctcttcattagcttccttgattcatccaattaaaccccatttacttatttttttttctcctgtctttgaatgacagctgtttaaggtgtctgtacgattgggttcttgttaaacaagagcatatcataaagatcaaataaacacgtattaactattaagttcctttaatttgtagcttggttaaggtggctgactgcccaccaaatttgtctaaaatttacccttttttctatcttctgatataaaattggaagaggaggcccaccattgggtttggtgggcttcgttaaactaattcaataaattaaacccaaatttaatcaaagtggggagttgggttctgtttaagatcccacattttccatattttctttcattttttcactgattatttgtggtggaaagaggaacgaaacacaagttcaagcttccaatacatatatttttaccattttggttttgttaaactttttattttttttatcatttatgccaaacttgagtttgacccgtaagagaaaaaatattcaccttttctcatgctactctacttgtttataacttgtgttcccttcttcctctttttaaagtctctctctttaaaaccactcccaccatgggcaagtgagatgagattgttgtcaacctggttctggaaatatttgtccttctttaacaaatcccagctcacaaacaagaagaagaagcaaattcatatcttttcaagtttgtttctttctcaaaatatgtctctgaagaggaagactaatctgagttcgaaggtggagaatgtcgaggagatgggacagatgtcgtttcttgacttgccagagttggtgttggactgcattcttgagagacttccacctgaggctttatgtagcatggcaggtgtttgtacttctatgagagagaggtgtatgagcgatcgtctttgggagaaacacatgaagctgaaatggggtagtctcattggccaagctgcttacagagagtggcaatggcatattgcttcaaaaaatgatatgggcaatctcaaacaagggaaacaaagaggcctgatgagaattctttctcttggttggcctttttcatggattgttagatcaaaggttgacgatattactagtaagcagaggagtactttgcctgttgattccatcatggcttggtatcttgctcttgaaaccggcaatttctttttcccagctcaggtctacaatcgtgaggtatatatatacatatattcattagagtaatttatttccatctttgaaaactgaggaaaaaaaaagggttcttctgcatctgatgtcattttcttccaagcttcagagtttgtgctttggtttttcattggtattcagaggtttccacactgtttattgatatctattgttcttcatgtctgtattttatgcagaatggtcatgttgggtttatgttgtcatgctatgatgctcaggttagctacgaccctcgtactgacaccttccaagccaggtaaattgaagcttatttttttatataaaaactgatttgaactttttccaatggaaatcttgttacttgtattgtttagctttttgggttcaagagtttcttcctattagtttttttccctctttgctttccacaattagtatgtgcttaagttggtgctgttcttttaactttaggctcctttattttaggtacccaccacacggaaggagggcagtggcagttgagactggtgtaccatgggaaaggcttagagcaccacctgttgaaactcctcctcatgatcttcacctctctgactgtttgcatgagttatgccctggagatcatattgagattcagtggagaagaaacaaagagtttccttacggttagtctctggttttaccaaactcttggctttttcatcttattgtttttttagcaaaattattgttcagtttcttttgaggatctgggctttattttccaagtatgttttccatttttggttttcttgatttctttctatcatagtttttgggggttggggatgttgtaaagcagaaaacagtgatgtaggaaagtttggctacagtttccagatagatgattctgcactacacgtaacatatatttggattttttaaagtgaaaagaagggaacttagtttgcaccaagaaaactcatactatgatttgattattccattgttgactcttttaaagtatggtatggtgttgatttatacaataatcattgttctaatggttcaaaatattcttcaatttgaaatttcattaacacactcatcctatgcatatcacttgtattattctaccaaggtatatgtatctgtataatcaattttcagtgattgatttaacatcatgacatgctttgctatgtatatgttataggttggtggtatggagttgttggtcacttggaatcatgtgatgggaatgaaaattactgccgctgccatgatagtggtgagatgttcattattatctcttagctttgaaagaaaacaaaaattgaaaattctttttcttttctttgcaagtaggatttatcctttgaattattgaatagtatagctgaaagaattatagctagattccaagccttattctcttcatgtttttccttattcactttctctcagtctcatgtgcatttgacaccaaccaacccactattgaaagacagagagagagagagagatatctgttaaagcttatattgtttctgaaaataaaaaaaaaaatcctttcatttctttttggaagacaccattaacgtgtttcaagttgtggatgacgtgaatgtaaagtttactttcaaagggcagacccagttttggtttggcctggtccttttcttgatgcccatttcttcaattggtggaccacttttctttgagctatttcattggacccctagacatatcattgtcagtatgtcgtaatttccacaaacattgtgataacttctgtctcagcagaatatttatggccaaccacactgatagaacttagtgttccctctcaagtttttttttttttttgtttgataaaatggaatcttcgtgctatgtggggctcaactacttgtcctaagctaaattcgttgtttattacttgtctctctatcttttttaattacccaatacagtgttttattcttttcaactggttggtttaccaaaaccatcaacagctgttgatcgaactctactcagtggatgaaatcatcttttgcccaaaaaacaaataataaagtaatatgaccttttgcatagattgttgcacatgtaaatctcagccatcatccccaaattttcattgtcccaattttatattatttgtacatttctttcattattaaattcaattaggaaatcttgacatttttctgttcaactgtggtgatacattgtctcatttttctctaagtggtttcatgttaacaaacttaaaagttttgctgacattgaacatctattttcagacactgtggtgctcgatttcaaccagtacacaccaggttcgcgatggagacatacaacagtcagtagaaaagaccatagagaggaaggaaatgaagctgatggtttctatggcggaatacggaagcttaacaaagaggaagaaatttcgacatggaagaaaatttggcctgctgaaacgttggattaggcttttggctttaggattttaggagagaaaaggatatactactaccacttcccacgcttgatcaatgtacaagatccatttttattcagatcaaaatgacttctcattcaatcttgcttgatagaagataagatttgaatcgagatatgtgaggcaattgaatgaattaaaatgccatacattcttatttactcatattccatgaagttaagatccattatgtatattgctccaaattggtgcaacattgatgatttgatgtactataacacttcataatagaaagttgtacttttacactatcttctcttgttcatataatgtgcatcaacttttaaattcatctgtcttctatggatttgctgaaaaaattaatgagaatttaaagcaaagcaagtgcctttacactaaacatgttattatatgtgaagggagaaaaacatttatattgtatacagcataacaagaactagttctacgattagtctttaaaaaatataataattatatgatttatttatttattttatgatctctttagatttgtttatttatttattttgattactagaaatttttcatttgaacaaggaacagagccttatttacgctaaagtttgttactatgcatgcaggaatgaaatgcaaacatctttaacaaccaaatggtctcaaaatgtgtagtgtattgcctcaatagcctttttgtaactagctcttttttttttcctctttcacacatgcttataagagtgaaaataatatagattagtggacattcattttttgttagcattgttattaagtattagtagtgcctaataccatttaaaggtgacaccttgcgattagtcttataaatattattacattaaatcatatgagattccatacttaatttcacaaatataaatatgataacttggtgactttataacatttagccactgcaaaataagagcctaagtgtctacttgttaattttctatcaagatcaaatagtgttggaaaatataagatatcaaatgaaagaaatataaaagaggaataatatgaccaagaaaatataattgtatgcagcaaatacaaggattagaaaatggttaataccattttagatcatgtgttttgtaaaatttattaatcagactctttgttttgtaaaatgatatattgaactctgtattttttaaaatggtaccaaatagtacactgaactcaaattttaatttttttttttaatataacaaacttgaagacaatttttagcacgaacaaatattttttgtcataacaactttagaccgaattattattaattttattttgacaaaaaaaaaaaaatcaattcataatactatgttgtacaatttcagaaaatataaggtctaatttgtgatttaataaaatagatagtctaatcagtaacttttgcaaaacacgaaattcaaaatagtatttatccattaaaaaaatagtgttacaactctagaacacaaaatacaagtagaaaatattaaaaaaaactagaattacaactcaaagcataaaatatatatagggacatgattttgtcccgtgatgtacttttacagaatgtattctgtggtattttatgggtctcaggttacattagatgggtctcagggtacgttaccattttttaactctaattacccctaaatcaacctcagccctcagatcaaataactcctctatctaacggttgtcgtacatcacggaatacattctgtgaaagtacatcacgagacaaaatcgtgtcccaatatatataataacaaaaacaatataaatatatataatatagtatgtatataatataagataatataatagatatatatgtgtatttatataagagtgtttatattaatatacatgtaatatatagtatcaatcatcattatatataaaggaaactttttaagaggtgaagtggcttcttctctttctattcttctactttctctaaattgttgttttatctcctttttaattttttttatttaatgacccatatgtaatgtatataataattgtaaaacatataattaacatctatataatgtatgtaatttatatataatataaaggaaagcacaaaataagtttaggtggcatcttagattttttttattctatttttaaatttnnntgaattttttctattttgtttagaaaacaactacaaaaatatatgaactaaatgtcccacattatttataaattatgtaagtatcatccatgtaggttataaatattattctttttataccatattaattcatgccaaagtacttttatttatgggtaattgattaatttcttaccttataaatttttattattttatttttaatatcttatagtttttaatctttcatctaatatacattttattatttatatttttaaaaataattatttaataa

SEQ ID NO: 79158 - DNA, 2787 bp, Cannabis sativa
aatattctgttaccaaattttgcaccaatattataaggcatatagaatattctgttaccaaattttgcattaatattataaggcatatacaatgttctgtttccaaattttgcaccagaattataacgcttgaacattaatattttctttctgaacaaaaaataaagaaaaaatattacaaagcaaaccttgccatatggagtccaacactattgcaatgtgaaatgactataaaactagacgcataaaactgaaactcatatcaacttttttacatatttactagcctttgagttttattactatggctactagaaattctaaaaccattattgttacagctatgtctattgtaacatttactctaattttgtttgctggttcagtccaaggacttgaagaaaaatctattgagtttgataaacaactcaatcttatcaataagcctccactcaagagttttaaggtatattcaagggtcttaattctagaactccaaaagggtattttcaatttttatgttgattttattccaaactaatgtgtgattgttcttaataatccatgaacagactcaacatggttatattatcgattgtattgatatctacaaacaacttgcttttgaccatccattgctcaagaatcacaccattcaggtcaactatctttattttgcaagattttttcttttttctttttgtaagtacttaataaactttagagttgatttgaggttggttataatttacagatgaagcctaaaactattccaaaagaaaatggaagagatgaagaagcttcaagtactaaactctacaaatctccaatcaacatgcctaagaacataaagtgtccagcaggatcagtacccatcaaaagggccacaaggaaagatcttttaattgcagaatcttttaagtctatgggactaaatcatcaaacaaatactactcagcacactaatatagttgaccctaaaggccattatgtaagaacattgagtactatatataattatatgaagctttcttgatagaattattaatcttcaatcactaataagtttgttaatagtttcttaattgtgttgatgtagtttgcagtggttgtgtatcgagaccatgtttatggcgcatcatcacgaataaacatatggaaaccgaatattaatgatggtcagcttagtattggcactacatgggttgtaactggtcctaaagaagataccaatagtatacaagctggatgggcagtaagtacatatgtttcaactttaaaatatctctctcttctgatttaaactgggattgtcaaaggaattgtcataggtagaaaaaaattgaaatggggcattttgtaaatgaaattgttgtgctataaaatgaggctcttttgaaataaattttaggccttttgtaaagaattttttcagaagattggatgataaacacaatgctatcttgacttttttgttcttatcacacttttcaggttcataaacttctatctccaagtgatgcaacactgtataccttttggactgtaagttttgagaaaggcaaaacaaaataaaaccacttatccataacactaacttctcaaatatattttggttttgaaaaatgttgcagggagatggttaccaaaagacaggatgttacaatgttctctgcccaggatttgtacaagttagcactcaaatcgccctcggccaagttttaacaccttcaactcacaacggtgctcaaaccgatatgctaatcagcatatacctggtgaaataacagcacccatacatctctatatctattccatgatgataattcatgtttaaaaaaaagactaacttctcttgtgttcttaatttactcatcgatatcaggatcgccccacagggaattggtggctgatgtatgaaaaggaacctgttggttattggccaaaggatatcatacccaggttgggtgaaggtgcaactgctgtgtcatggggaggagagatttatagccctgtaggcacggttagtcctgcaatgggtagtggtgaattaccaaaccaaggctttggaaaatcagcttatataatgaggattaaagttgacaaagattacaaccatccccaatttcttgatcctaaaaaagattccctttcaactttagttacacaacctaaatgttacaatgcccagtatggtttccaagctgctgcagcttggggatactatagtttttttgggggacctgagaattgtttgctatgaatagagtaaaatactctttttataattttatttttttctttgcttgtaggaatcaataattaaaagttatttgatactagattttattatgcctttttgggtagatgatgcgagttgaaaatgacataaatttgtataaaaaatttgtgtgtgaggaactcataatcataagtatttattaggaaaatttttatatatatatacataatatatattttaataacataaataactttcatcaattaaatacaattatataacgtgacacgtaatcaatatataccgtatataaaaaaaaaaaaattatttaccgtaatcaaaaatacaaattagccacttcgcactaaaaacatactatattctccattaattataatagcaagactttgaattagtgcatgaaacaccaatcaaaatgaaaacttataaagttacttcttgtaaaataataaatcacaaatcgaaaactattttccaccaaaaaaaatccattaatgattaaaaaaaaagcttcatccataaac

SEQ ID NO: 79159 - DNA, 2064 bp, Cannabis sativa
tagttagtgggaaaaggggttgaaaagcatgaaagaactatagtataattcaggtaattaacacacatgcaaaaacaaatcattgaaaaattctactttcaaatctccatgttcagctaaagtttcatgcatcagttttcactctcaacataatccccaagaattatgtttctttttttataagacagtaatccaaaaaattcagccaactcttacaatatcattaggataatataatccaatgcagatcaaccaaataataggcattgacactatggtatattagttgattaaaaaaatgtaaaaacgacaattacctcctccctttcctctacagtaaactgcacaggtggcgcttcttttgcttcactttctttctcagcattgctagtctcaatagatactggagaagtttgaacctcctcatttgatcccatgttactattttcttctgcactctttacctccacactcccctcagaagcagtcccagaatttgaaatatgatcctcagatgtcatactgctttgtgggaaatctgtcacatctttttctttgatggcaacttcttcagggtttgtcttgggtttttcttgcacctgaggctgaatatcaccttgactattacttaaagcttcaacaataggatggtctgactgagtttcaatcttctcagaggcatccttctcagtgacatccttctcagtgacatccttctcagaggcatcatccgattcctcaccattgacaaattgatccaccaacttttgaatatctttgtcatccttgttctcaacctcatccttaactaaatttagagaatcctgctgatccttacggccaatatattggtccaaataaccagtttggtaagccgccataacagcagcaccaataagaacacttccaaaaacaactttcggaaaagagccactggattcaggaggcttgcctgtggatttaggttcagggggtgcattcttctggggtttggttgatagttctcttcttagagagatgggtatctgttgtaattgtccaattgtaacagatacaaattaaaaacgaaataagggaaaaatacgagtaagatgataatttctttaaaaaaatgttatttatcgacatgaatgcagaaatttcaaaattgcattcacccaactgctctgctcatccgagcacaaacgacataaaccgtgtcattttctatttcagtgcgccctaatcgacattagcaagagcttaacaacagcatcttgcaataaactgacactatcccaaaacccatagtacaatagttaaatcaacaaaattgtacgtgcctgagttgtaatctgccttggaattcttctgcccgctcgatgagccgaaaactgccaaattgacctgaaaaggaatcatgcaatcgggacataaaattcaataacggcatggtaatatcattgttgaataaaatctagggtttacaaggttgaaaaattgcctttaagcatgtacctgagcaacatgattacaagtgttcgacaaaatgactgagtgaacaaaaacaagtaaggaaaattcaactcctggcgctaaataatcgtagagtttctgaaagagatactagggtggtcctttagcgaagaagatgcttaggaggagcttccgtacatgagcagaaccatcacccgttgccgaaacccaccgccacagagggaactgtccgaaagagtacatcgagcgaagttccgctttgccttttaccgcaacacaatgtcgtttttaaattttgatgtcgttttcggacaacaaatgtgtcgttttccctatggtcggttattatataataatgtcaaaaagaaacgggcacagcggcatttctctctctctctctctcacctcactttcggtgaacacagttcttctctctcgtttcaatcatttggagacatacggagtcttttcaggtagatgagttaaatttgtttatgaaattgatctcgcacaccagttgtttgtgtaaatgcctaattgaaaaacttatcgagccactaccgaaacgattgattggcttttgctttt

SEQ ID NO: 79160 - DNA, 3328 bp, Cannabis sativa
ctccagctcctctctccgctgcttcaaaatagaatcaaactttgatggacatagtctctggaatcaatcctcttcctattttcttcagcacatagattttctactgcttgtaatgcttcttcatagcttaaatgctcacatttttgctcacagaggctctgtagttgataaaattccttctcaatcatctggagtatttccattccttcacttgctttttcttcttttacacgcatccatgatgctaattcttctccactagttggacctgcataaatccaggacagaaaagcactggtatcatttagatcactatcattcacattgctgaccactgcagaagctccggccgaagccttgcctgtggcatcatgatgactgctaacatgagtggattcatctgataacaaacattcatcaagaactacaaatgatgcatcttcactgagaacaagcagctccttaatctctagacatttactaccaatatttgcctcatccatgatactacttttctcagaatttctacctaaaccacaagaatgagataaatcctgtaagacattgaggattttctgaagctcggagactcccaaaaagcaaatgcacataggtgtttgcatcaccccattgttaagaagctggaatcctatgttcattttctgcaactcatcaaacgcaaattgtgtcacccatttaagatggcttgttgcaagacatttattcctgacaagcacctcaaacaaagcagatattctttcaagaagttttgcacgctcagagtcatcagatacaggccagctatcagcaatagaagagtgcgccatagacccattggcctcaggacattgtccagactctatgttggtaactttttcatggataccactctcagcagcagaaatacaatgactatccttttgatttcccttctcagatgaagaatcccccatatttttccccaaagtgcaatccttgacaaattcagaatctttacattttgtttgattttgaaccatttcaactgcagctgacacatccacaggtttccaagaacacttatgaagcatctcaatccattcattattaacctcttcaggcaacattgacctcaatttaggcaaaagacttgccacgtgctccttcgtaatgtgatgtaagtgcgaatcagaatcagcaaatctctcattacacctgcaacaaacccggacactccacttcctaccactattagtctcagtaaaagacaaggcttctaataaaacatcatttgccaagccatccttcaaccaagcaaaatgggatttaatatcaagaatcccaaccttaagtaagtctctcttcttatcaatactggtggtattccaaaatgacctgacaaaatctcggttttccgcacaagattgacttttccttgtattgcttgacttccgccgatcgccagttctctgaccagatgctggaagtgaatccaatcccttatcagtcttgtctccatcaatttccaactgaggcacctctgacttctgctgcaacaacctagccgcagcaactctaacttcaatctccttcctccgctcttcttgtgtcttggtggccttcttaatctcattgggcctcctagctggaggcaatctcccctccattgggtcctccgtcattctccttattggaataagccgaaatttatcatccccatttcccaaattcttcatccaggacgatatagaggcaatattagacttttgtatcagctgtcttatctcattctgcacattaccaattcgagcttctggcgttgatagcttttcttggctgtcctcctgtgagctctccttagcaggatcgacagggttttcaattgccagcaaacgctcacattcccgcacaacctcctcatactcctttgcttcattggccgattcaaacatcaagttggcgtagaaatgcccgaactcaatcgagtttggagacaactcaactgctctacgagcagattcaattgcacgcctcagatgccgatacttgacgttttggtcttcaataacggaggccatcttgctacatacagtactttgaactctgtaaacaatcgccaaatgagccgacttttcgtaccgctgacatagttccttcgtcaaccttagagctttggtatggttcccgcgcctaagcgccatgagggctcggtcgcactcgagtctgacattagcttcagatgaagcgtccgattcaacggacttcggcgatacgatcttactctcagaaacaggattaggggtatcgggactcagggtaggctccagttcgtctggacttaaaccatcagcggttccggcggctccgtcgacaacctgcttagtcaccgccgccggtgaagccgccggcgattgtttaggacgcgccgcaagatttctcttcttgttccccattcttttaatctatgtatatatcaatccgattgattcacatgcatacgcctaaatacaaaaacgaataaacaaaatacaatcacaacgcacgcatatatcgttcgtacatttcttctatatacatatactcatacccgcatatagatatatagatatagagcgagacagtgtgtgtgtagtataacttacttgtaacagtgaatgaaaatgcgaggaggcgaatgaattggaatatgtagccggagatgccgtagagaaatcggcggtgaaatcgaagaggagagagagtaacttggtatgggtttcggagttgggttcgggttgctctgtgtgagagcgcacacacagacaccacctacccagagagagagagagctttgatatgaaatttcctaataccaaaatctaagatcaaaacggaaaagctacatccatcactctaaattaaccctctttttccataaaattaaaaaattaaaaaaattaaccctcttttttctataaaaataataaccctctttttcctttataaaaaaaataataataataataataattaaccccctttttctatcaaaaaataaaaaattaatactcctttttaataagttattagatttttttacacgatattagaattttcctaacagattttctgcactttttttcaatactttaccaaaattttacctttttttattttacctcaatttacattacattatacattgcatattttatattcttctctatatcatttaaataatactagattattgcgtttttactttttatttttattatgtgtatttttaaaaagctaattaggatttttgccccttaaactttaacatgtaccaaatcatgccccttcaatttttaaggtcgttaaaaat

SEQ ID NO: 79161 - DNA, 1642 bp, Cannabis sativa
caccattcatgtgatcatgtgatgccagtgatgccatgtcatgccatgtcagagtgtaaaaattgggataacaaaactcatctattttagaagaaggaacaaataaggtggttgaatgaccttaaagtgtttttagtgcaggtaagtgatgaaatcagtatattctattctcttgctctcttctttcatttattcagttaaacttttagttggagattacctattgcttgtaatgcttatgtcctttcttccttctgtctaatgttggtgacttacttgcctaaataaattaatcttattttttgttaattctgaagttgaattttgtaccatgtttttacttactgttttgggcatttttgtgcagctagctattccttcacttttgatgtggaagcatctaaaatgataatttagttgtaatataaattttgttctaaagattttatatacacaatcagttaagttggaatttaaattttgttctaaagattttatttacacaatactgatctgttttctccatcagtatagaaaatgaatatattatttaatgtgaagctgatgtgatacatatctcttatttgttagagtagggtggagcgtatacttgatcccttgccttagtttctattttgtcatttaaatttcttatctactgttttatttactccatcagtatcttagaatatttcttttgagtagcaactttgaaagtacacatatataatatattatatattgatgagcaccttaggcttacccattttattctatgtttgagaataatatgctaaattatgtactcctaaaaacatatgggtaagatggccacaaagtcaatgaggagcttatgggttgtgattgtctcaagctgctcttcaaattgggactttcgaaaaataaaatgagaagacttgtcttcttagagaggtaagagcaagttgaaagactagttgattgtgggagttacactttcatttagtatactctttttgttgcaggacaaatatctatagtgaacgtgtttcttattgtttataatcaattcttacaccttttgctctcacgaaaattgcagattcaaaaggaaaagatttgggaacttgtttaacctcatctgaagcttcaatgtgttaagacttcaagactgaacaatattgataaattggtataatgagatttataatacatttacaaggccaatttagtttgtgcttgagattatgtttgatagaaatattttgtatttcatattattgaatattttttttttttttgctagatattttcaatcacaaaatagattttatgaaataaaattaactaatctttctaattaattttgttatgaagagaaaaaaatattatggaaattgaaatttttttaattatattttaggtttgggagaatgataaataataaaaaaaaaatgtattattattaaatattttataataataatataagtgtaaaaatgtattatgaaaattaaaataataattatattttaagtagtgaccaagtaatacacaaaatgtattattatattatattcaataatacttttattataagtaaaaaaaaatatattatggaaactaataaagataatgcttgttttgttataaaataatataa

SEQ ID NO: 79162 - DNA, 4209 bp, Cannabis sativa
  modified_base (31)..(31): a, c, t, g, unknown or other
  modified_base (3746)..(3746): a, c, t, g, unknown or other
aatacatatagtataattatatttcaaaacntaatagatcaaatgtatatttcatttttatatataatttttttctaaatacaatttaaaacaaaattaagcattttcttatacatacattttttttcttcgtttaaatttgttatttattattttatttattttaatttgttgttggaaacataaaataacaataatttattttattttgttgctatttatgtgaaaaaaaaataattttttacaaatattaaataatttaatattaaaaagtaactaatctaaaataaccgatccaattcgcacttttgcagattggatttgagctactgtgcgaattggattggatccaaaatataaaatttacacttagtgtggatcagatgcactataaacaaaatagtgcggattggattagataaacacccatatctaatatcaatggtcttagtatatttttaatagagaaagggctaatgaaaaggcttgttttatctcgcttatatgtatttaaaacaaatgtgcatttataggaagttgtaccatatgattttgagttctgatttttgtgggatatgtgattttataatctgcttttttgtttgtttgatttgtataatgcttatgtaatttgtgactgttgtggtattgtaattttggtatgcaaattgtgcaagaaagtatattataaacatatacataatatatacattatatatagtttatgtaaatgtcgcccaaattagattttacagtagtaacataattaatctaagtactaatttgactgacttctgcaaaatattatttggtgattatatatattgtttgaacaaatttactaatttactttccttattttgattgttagtctaggagatgactaaaataatcttgagcataaaaaaataattttgaaagattaaaatgaaaaaaaaaataaattaataatgtgatatggcagaacacaaagagaaacacaccattcattaaaaaaaaagtagagtaggaagcttacagaggaaagagcagagatctgaacgaaagagatgagtagcagagcttcgtaaagaagttaattaatgcttaaggagctctaaaagcaagaaaaggagcatgttgagcagcatatgagaattagcacacatggacaaatcagaattagtggaatgaaggtagttaacattcctttgcaccctcattaaaaaaatacatggattcttgatcaagcgaaactagcagaaactctatcaaaatacaccctcaaaattacacttgatctcgggagacaaatgacccagaccgaattgagaggaaaattgtgtaaacagattgagaaagtaattcgactagattgaactcgctgtaaacaattcaaagtcttaatgataattttttgttgagccaattttcaggatcaacagctagtgtatccacgaacacctcttgaacgaaaagcttaaaaccatggatacgaactaagatgggatcagaaaaggtgtctaagaaagcaacaactttgaatgaaggagatgcttctaatccagtcatggatccaactacagcattgtcattacaaatgagagagttgaattagagaatgatcgcaagagacaagcacaacaaagggatacaacgtctcgtagaggaaaaattccaacaagagcaacatgcagccgaagaaaaacatcaacatgataaggacaacaacaagtagcatcaagaggatgttcatcgcactatgcaaaattcatagctgaaatgacaaacatgcaagctaaaatgaatagaactcaaattcaccatgatcatgggcaaaaaagtgggtcagatccttagtagataacttattagatgcaacttgtaacaatatctcacaactcaaaaagaaatgagaaatcagccaaccatagcattcaaataataggaagttctcaatgaagtaaaaaagaaagataaagcaaacaaaagtcaaaaaaatttccaaaatcaactaatgtcataactacagagcaagtatttcagaaatactttaatcaaaaagtaataactgactaaagaaggatagagcgtgatcaaagtccacctgtaatatttcataaggtgttgataattaatacatatgcacaacatttgttctctgagaggtttggagaagatttgtcactaataaaagagtagctgatgaagggaattatgagaaaatttgaagaaggaaggatcacaatcgaaacagagcagaaataagaaatgaggataagtctctttctaccaaatggattgttgatgagcccaaaaagaaagactttactatgtcgaattttacattatttaatgccaaaggagatccattggaacatgtgctccgatcccaatcctcctggaccattcttgctacctcacttcgagctggtttctcccatcaaatagttttttaggagatgacgacactatctacattatttatgaatttgctagggaagaattaggtcgtctaggtaggattagttccttctgcatttcccatctttatgatttttcatgtgaatgttccctcacatttttctatttgtttgcagccaaaccaatggatgtcatcttcgcctcaatggatgctctaagtcccgccaaaggtgacactgttttggctaccaattttttgagggtcatagtgactccggaagtcctaacacaaaagggactttagacccaaaagtcatatgcatggatgatgaggatgatccggttccattggaacaaaagaggaacaatgaggctgaggactccgcatcttccaagaaacttaaggcagtcaagaccccttctcataattctggggacttaggaattccttccgaggctaactcctgttaaaagatcaacacccactctacaagtatctagaattttctatcattttggtaaaattatagaatcatcttgattatatagaattaatattcataagaagtttcaagaaagttttagatttagaaatttgctagaacattctagcacattaatccaccacccttgagtagtataaataggggagttggtcctttggtggtgtgtggtgagttgagtgataattctagtgcacaaataagtgtaatctaagtattccaaagactgtcccaaaagtgtgttatatacaagagtgttgtaaaagtgtctagtattaaaatacaaaaggaaatagaaatacaaaaggaaactaggtggtacctcaggcaaggaaagcccgagaaaggtacaaaaaactaacccctaaggtctcttctggagaaggggtggtcgttattgactctgagcaagagacggttggaaccaagcccttggcgactaagagctcgaaggttccgccccttgctcctgccttattatcccaaaattcaaaggacaaggcagtggccacagtgcccgcaaagctgaagcgtgcagaggatatttgaaataactatcttaaaaggtaccgtgcagaggccaaggagatattgaggggagctgacattctttcgactgaattcttactaacttagtgcactacttctttgatcagcacaacacttactgcaaattccatcactgccaagtaaatccccaactcttctccgtccagaggttttgatagaataggaggttgtgcgagttgctttttttagcccttgaaaggcttcttcacactcctccatccactcaaatttcttgcttcctcggaggatattgaagaaaggaacacattntcagtagattttgacacgaacctgcttatagcagctatccaaccagtaagactttgtacttcttctacttttgtcggcaatttcataactctcgtgcagattctgtggcaaattgtgaattcgcaccttctcactcgtgacagcttgagtaagtttcacatcactcttgagtctcgggtctgtcctgtctgtgaagaccagttggaatcgcatgatcaaatctttttcagctgtgccttttctcgaagggttgtggaccgtacctttgaatggctggggtataattcttggccagtcaggtatgttgattggaaagcttgacttactttgaatgactcttgcttgattagaagaattcaaattgccatccttgcagcagtgtgctatggtatttggttgaacaggaacagatgcattcttgacaattgctctagaacagatttgtatatagttgttgaggtga

SEQ ID NO: 79163 - DNA, 4936 bp, Cannabis sativa
atattaaagtaaaagtggaccgaatattaaattgcacccgattacacctctgaatagggaattattaatagcgaacaccgtttatctgtggctctattggttcctgggcttcactgcctttactcaaaaaaacaacacgacaatttcggcgaatagaaacctctctgattcggcgaacaatgccagttatcggatcagtgaagattttggactctagattcccttctagatataaaattgaaccgggaaccgcatgcttcatgacaacgtcacccaacctttcggggtaaacacaaacccgatgccattggatggaactgcgctcagcaaactcttgcgggctctcgttctccaatggtcgtcgattgttgcgcattcctcccgttccaactgagaacattgtcagcgttagcccactcttcagcctcttctggattggtttctgccccactcttcccaccactatcgccttataaatgcccatgtctaggccattctccagcaacggctccttgaacccgtggttcctaaacgaatcttttgttggagtgggctcgagggagggtgattcagagtcggacaaggttgggggatcttccaagtcggagccttctttgtctgatgtgggatgagttgtgctggtgcagaagggagtagagaactgatagctctgaagagcggaattagtattcgataggagagagcgagacagccttcgggatagagcagccatggacgttgccattttcagagtgttggttttgttttagatacttgattgaattgctttgttcaacctaaaaaaatgaagaataaaaatgaaaacttacaacaatccctattcttctgatttaacaactataaatactttaacatcctcaaaattttattaatcctaatattgacgctaactaacttacaactcatcttgtaataataatactgagcattttcttatataataaaatcactcatattttctcaaaaaccaaaagcaaattagccaaaccaaaaggcccaaaacagttgcaaaaaattacaaataatagatagagcaaatgaaatcattcttctcactaaaacaaaaactaagattctaagaaagacaaaaggaatatacaattaaagtcgacccaaaaaaacaacttatttttcatcactaaaaatcagaatatacaaaaaaaaatgtatgaactacaccatatccacttaacaaaatgaagaccaaaaagttaactacaatatatgtataaactgaacacaaaaatgaggaccaaaaagaggaaccaacggaagaagaaaaaacagataaaatatttttgctgaaatttcttttataactcatcatcatcaccataatatataatacatatatatatatatacaacagaaaataaaagaccaaaaactgaagactattcacacaatacaaagttaaagtttgatgtattccaaaacaccaacagaataacatgccaaccaaacccctttagacaattttatatgatttcagtaaaacaataacacataacatattattattatataatttcaataaacaatatacaatcagaaaacaattgcaaaaatcagattgtaatatcattattttaacaactaatatatattcagtttcaaacaattgaaaataataaaactagtaaagtagacaacattggtaataaactcagaaacaaatctgaaatcataagaaaaatataatattaaaaaatgaaagagagtgagagagtacctgagagtagctgcttagggaagaagatggatagttagagagagagagagagagagtgagaatagagagcagaagaagagggtttagggctcttttaagagcgggccgggttgggttacacgggccatacatgggccagcccaattcccatccaattaaagtcggcccacagtaactaatatgtatcttattatttatattttatatccaaaccaaaggggtatattgagtgaaagccaggtgaagctgactaccaactaatttaattaattaattaattaattaaagatggaaaggcagagagagagagaatgattgtatgtgaaagagtagagaagagaagactacagaagaaaaagaagaagagaagaggtagagtagtagaatagtggtactatagcagtagagtggttttaggtttattaataataataataataataataataatccatgggttcctgttattccaaatctactaataataagatcaagaagaataagaataagaatgagattgggattgggattgagattgggattgggattgggatccctggaaggatgtgcttcaattcagcctctaaactctcatgcttgcatacccagcaaggcaagaaaggaaccaatcaagacgccatgctcttttgggaggtaacaaatcaaatcatccttaatttctattttccaatttcattttctgaaaatcagttcattgaatccatattatatatatgtaaacagaatttcagtgggcgtagtgatactgtattttgtggggtatttgatgggcatggtccttacggtcatatggtatccaagaaaatccgtgattcacttcctctaatactctctactcactgggaagctacctttgatgaacaagaacaagaagaaaaagaagaagaggaagaggaagaagattgcaatgacaatgagcatgatcataacaataataacaatgatgaatcactcccactcatgtatccacctcttaaaaatgctttcttgaaagctttcaagttaatggataaggaattgaagctccatcctactattgactgcttctgcagtggctcaaccgctgttactttagtcaaacaggtagctcacacactcacactcacacccattcacttctctttcttcatttggaatatttagttatttcttaaaactaattcaaatccatttgtatggcttctcattctcagggtgaccatcttgtgcttggaaatgttggggattccagagctgtaatggcaacaagggatcaacacgacactttgattgctgtacagttaactgtggacttaaagcctgatcttcctggtcgctctctctttctcattctattacctcatacatatattgaatatgattgattgtgtacattataattttattcatctctatgaatgaatactgcaagagacaacagttagtagtttagattatgctacatgttttaaagttggtttgaatttatcttgtatgaactgaaatcataaaagccctttttctctgttttgaacatttgtgcaacttttttgtttattgtactatcttctatgcaacttgattaggtgaagctgctaggatccaacaatgcaaaggaagggtatttgcattgcaggatgagcccgaggtagcgcgtgtctggctgcctaataatgactcacctggtttggcaatggctagagctttcggggacttctgtctcaaggatttcggtttgatatcagtcccagatgtttactatcaccatcttacggaaagagatgagttcattattcttgccactgatggggtatatctctctctctctctctctttctcttctatgtttctttttcagtgctggaaataacaaagtgaattaactcctttcatttcaggtttgggatgtcctatcaaataaggaagctgtagaaattgttgcttcagctcccagtcgcgcaacagctgcaagagctctggtggactgtgctgttcgagcctggaagcttaaatatcccacgtcgaaaaatgatgattgtgctgttgtttgtctatttctagaccataagtctccagtcagtgcagctgttattgaaaatgataggacaaagaatcatgaaggagcaatggaaatagctgatgaaggtttagaagttgattattctcatggtattgttatcgatcctgatccccattcgggaaatataggaagctctagtgagattgtacctgttagagatgtgacggaggaaaagtttcctgcaaagagtcaatctaggagaagcctagctgagttcatttcaaatgcagatgacgatgaggagtggtcagctttggaaggcgttactcgggttaacagtctgctaagccttccacgatttttgtctggtgataaaagagcagcagcaaactggagaaagtggttgtgacatctcacaagaacagaacaggacttgttttcatttttgtttcactgatcacgaccatatttactttgtagaaaggaattagtttgtgctagctcactggctgtaaaatataagttgttgtttttcatttatagaaattccagggccattttattatattagggagttttgatctctgactgtgtcattgaatgtgcaatatttgtgggtcgtgaatgtgataagcaaatagtacacattcaagtgacttgtgatttttttcagttttgatttcacttcaaatcaacaatcaacattattcaccttcactattattatttgtttcttatctagtattagtctgtggatcatgattttaacgttcccttgttgagaatacacttgactagttgttaaaattcagttatttttggttttatgttatttcagttggttagagctagttcaagcttttcttcatcttagttctcttgactaactctataaataattctctctgtaccttggggaaagcaatcaactcaatacaaagattttctttctctctcgttcttattctcaagttggttcatccatgactaccctttcggtgtcgtgcacctacaaacacttttgctattccaactttgatgttccttctctttgtctggatcacaccgtccgtattttcttatgtccatatttatggcaccacatggagacctttgtaatagtttttaataggggtgttcaacaaaatttacaaaccgtccaa

SEQ ID NO: 79164 - DNA, 3843 bp, Cannabis sativa
cacctaaacctaaacaaacaaacagcccattacaatcttaaaaagataaaaaaatataattaataaggaattactaaacaaggaacctagtatactaataaaatatacatggcttccatattaaatccctaatatataatattatttaatatcataatccattaataataattaatatagagaaacgactcaagccaaattataattcatgcattaattaacaaaaccacacaccacacattcctactcaaactccaagagccacgccatgcagtggacgcttcatttcacaagacagcttcagaacctcatcgagatcaacaggctggatcgggtcctgggcccacttgaaatggcgaactagatttgccacccaaagggtaacggtcaccagccccagattcttccccggacaaacccggcgacccgccccaaaaggggccagacggagatcgcagccgcggacgtccacgtcagcaccgccctcgctctccatgaacctttcgggtctaaagacaagtggatcctcccacacgtgcgggtcgtgggtgatggcccacatgttgaccatggcaacggtgttggctgggatgagcatgccgttgctgagctggacatccgatgtggacagcctggcccaggagagtagtgggcctggagggtgcacccttaaggtttccttaaccaccgactgtaagtaaggcaagctgctcaactcgccgtctgtcacagctcttccgtcaccaaaggcggcgttaatttctcttcgcagcttttcttgtttatcagggtttagaatcaactcggctaacacccactcagtcaataaagctgtcgtatctgttcctctaaaaatcatttccttcatgaccaaattaagcaaaattaaactcatcactattaattatcaagctaattttataattaatattataatttgaattcttacccacagcacagcgatcatgtcatcctcttgaagcttctcatccccatccaaagagagcaatacatcaacaaaatcgccatgatcttgaagctcaccgggattgttatcatttttacggcgtcggtgttcttcgatgatgactcggacgagtttcctaactcggggaacgagtttagagcatctttcaacaatacgaaaagggtcgtagaaataactgagccatggaagatggtcagtccagttgaaagcacccaatagatcgaatccttcccttaccatatcctgaagctcacttagctcttcgctgtctatgttaggatcatatcttttaccaaacacacttcccatgatgttgttaagggaagcagcttggaggtgcttccttaaggagacgacaccatttttcttttgctcgtctgctatgttacgcagcatggcggcgcattccagctgacgaccgggttcatgggctaaaatacgcctgggagagaagaggtgcgttgaagcgattctcctcagcagtctccaataagtcccgttaggagcgaagccgatggctcgcccgaacataagactcttagctgactgcttcagtggccggtcagcgaaatgaggagaggtcagaatttctctggcggtatgagggtcgaaagccaccacgatcggggtggagcctaggctgagagccaaaagcttaatgttggctcgactccaagccatgtaagccaaggtgcgatgagctaagccacggctgagtgtgaaaaggctcccgaaaataggtaatccacgaggtcccggaatggaggtaaggcctctttggttcctcccgttcttccatgcaaggccgccgggtgtgaaagcccacgttaggagcccagccgtgagaaaagccaagccgaaagagagcaaaacgtagccgtcaagaagggtttccgagccaagaaaggcaggcaaagtaaacatccaccagctagtatccttagtaaccaggttgttcatagtctccattgtttcttatttctagcagagagaagatatagagaaagagagatttttttatcaagtgtagttggtgaattaaaagaagctgagggagcaagacttaaatatatagaagggcagcacaattacgtgtccttttataaacattaaaattattaataataataataacaataattttcatatgaaaaaaataataataaaaaaaagaatgtaacctttgttatttatttattttatttaaataaataaataaattattgtggggtataaataatattgaaaatggtattaataatagagagttgatgttgcaaaaaaataatatagagagtggaagtcacatgacacgtggcaggagagagagaagagtatggttgtacatgaacgaaaggaaagggggttgctcttttgcatattgtgtggttggggtgagaactgagtactgagtagagtgcgttatggatgatgatatgcttgaagagggcaggttcagtatgttctgcagtgctgggatagtcattaaatgccaacacattttttagactgaaaacggcgaaccaatcgccaccaaatattttcatcataaaaattaaaataaaataaaatatcgccactaatgtaagtattttatttttctttatttttttatatgttttctgagaaaatgaaatgaagggaagaaataaaacaagtaacgcttgttgttcaagcaacgccttgagagatgtgactgattctgaaattgaatgtgggaaaactgaaaacagagagcccctgatagagacttaagagagatctatttctttcttcttatttttctctaatttgtttttctttcctcttttcaattagggagaaatatgtatttaatttcacttcttgtaattaaatataaatcttaattattgtcccaaaaagaatctgaatagtccatactccataccttatatttactccgcaataaatgctctatattttacattttcttttctcgttctttttaacatttactaatcaatactgtatttattgctcgaccttaagctgatcttgtagtaccgttctcattaaacttccactagctggtaccattatacacagtctccattcatttttcattagtgtcatgtttggtttattattacaatgtttgatttaattttaaaaataatatattaaaattacaatataataataattacatgatttaataaaattataaaaactatgtaaccagaattacacattaaattattaaataaaataaaattaaaataattctaatattttttatataaatttaaaaaataaagtgaaaacaattttaccaatttatcatttattttaatatttatttcaaccacaaaccaaacatcataatcgattattattattattatgactaaagaagaaattcattaatcaagaacaaacgatacaactcaagccacaaccaactggctccaacaaaagaccgcacctaatacatcaagcgtctatataaagcattaacttctaattcatgattaatcgtaggcatgctatacaatctatgctttacaatatctttaatctctttaactatgtaaccaaccatgtaacaagtgttgttatatacacaattgttcttatttttctacacaaaataaactgtggcagcaagaatcatatgtaaaagttgagttattttgcgtgaactcttaactgaaagccaattcattcatcccaccttcagcttgcttagcccaagcttcaaacccaatccaactgaacaaatcatttagcactgctgaagagaactcacatttaaaaaagggccaagatgcaaaatgaccctaaatctaacaattaagttaataaatgtccatttttaaaaaaaaaaaaaatta

SEQ ID NO: 79165 - DNA, 4564 bp, Cannabis sativa
  modified_base (4525)..(4525): a, c, t, g, unknown or other
tatatatttacgagatttaatcagcgcagaggtgtaatatcgtaactgtaaaaaaagaaagatcaaaaatcttgactccaatttcttcgtttccacgcaactcactttccataattaataaagccttttcctttctttaaccgcgtttctaattctatcttccttgtttgtttcccgggaatcgcctggaaaagaaacaaactttcagtactccctcgctacctacgcttccactgagtcacccactctttaaagttcgaagctttttcaattgggtaagctgattgcttctacgaatggttgaatttcaattttaattacaattttgctgattccctattctgaaatttgaattttagggttttcttaaggtccgctgctgattttgaagtaatttgttttaattgttatttttctttatacatcgttttgtgcaggaaatttcgagtgattcaggatcatgaaagagtctcagaagtcttggtgtaataatactaggtgttatttcaccaaagaggaaattgaattttcttctccatctagaaaggatggcattgactttaagtacgagtcacacctgcggaagcaatattgctcgtttcttcaagagattggcatgaaacttaaagtgtgagtcctttgattcaatataatgaagatgaggacatttactctttattatcaacagtggataaaaatatttatctgctaatgattgtttggctggttatgtatgtatatgtatgtatacatgcttttgttcttctttgatttgtttgaaatttcgctagtttcatagtaactggtttaatcaaacttcgagtttgttttggaatgatctttaagaaaaagaaacggttctttcttttcaatattcttgtgttcaatgaggattaaggtaatgaacatttcatgtctctaaattattagctgttatttatagacaggacattgaataattatagtcttacagttttcctacttttaaatttgataggatctctgcttttattttgtattcgtgtttgttagactgtttaatgttcaaggatggtagttgatgaaatatttattacaggcctcaggtgacaattgcaactgcaatgatgttgtgccaccgattttatatgagccaatctcatgctaagaatgactggcaggtaagctagatatacagataatactttatgctaatagatatgcagaatgattttttctaagcgagataagtgacagtagatcgaataatgtttatatgtgtactctatcttcgacttgatcacgaaaaaatgtcaatgcatgaatacacattcactaacatttcattaattccgaattgggctctaaccgttgaccattgtaagatttgtttcccagagcatatacattgactgacattgcttgtcaaatgtagatgatttcgtaaatttcattgttagtttgtttgattttgtttttttttttgtcttgttgggaaagatgcagatgttaatattgctatatgtttatgtcagttcgtgtccttgtcacttattaacacagtggtaaaattttgcagactattgcaaccgtctctgcctttcttgcgtgcaaaataaaagagacaccgcgctatttaaatgatgttgtggtcgttagttatgagatgatttacaagtgggatccttctgcaccacgaagaataagacagaaagtatgcaagcacacaaattttttcgacaatcagataattttgttttggtttatgtgcttattgccacttttggtcgtgcaggaaattttcaataagcagaaggatttgatcttaattggggagagaattctgttgtcaactattgcttttgattttaacattgagcttccctacgagccacttattaaagctttaaagagattaaatatgtactctgaccttgctaagatggcatggaactttgttaacgattggtaaagtttatattcaccccttaataaccttattgcatgttgagctttgatgtaaacacttctttctaactgttttctccttctattgtcaattggaatttaggcttagtacgacactgtgtttacagtacaaagccccctatattgctgctgcttcattgtttcttactgcaaaattactaaaggtgaagctaccaacagaaaaggaaagagtttggtggcaagagtttgatgtttcactgaagctattagaaggtttgttgttagattttgtcgtataccttaatttctttttaactttggttgtaaataagttatgtcgcaataggaacattcttgctagtgaactctcataaaactttgaataagtttccatgtccttaccttgttttgtattggagtttgcactttttcgaacttcttataaggttataactttttcgaaatatttttcagaggtcattcaacagatgcacaaattgttggagcaagacagaaaggaaactcaaccatcctccaataggaacaggaggccatctaaagcttcagttgacaaaccattggaaagtagctctctatcttgtattacaagtgaatccgtaactgactgccattcaagccgtggagggtctaaagaatcctctgttactcattgtggtcctaatctcgcggaaggtgacagtagtgttattacaagtagagctgttgagaaaggtccaagttttgcaacttccaaggtttgtaagatccaaccaacaacagtggacacaattcaaaatgcaaggtctaaggcttgcagtagtactcaaaataaacatggcgagtttgatgttattcggattaaggagatgttgaagaaaaggaaatgcaatggagttcaaaagaaaccattagaagccattggtgcagagagagacatcgaagccttgatagaaagcgagctcgaaaatgggatagatcttgagattccattgacaaagaagaaacagagaaaactataatgaggctctgaatcgaaacgcaagttgtgcaagctgctcattgaacttaaaaccagcttcttctccctgaatgaggttcttacatattggtatagtactgtttgggttagtttagtttctataaggtttctttcttaggattaaaaactcattctaagaattttttgatataaaataatttttttttccaatttaaaagtccttttagtattctatttattactaatttactgacaaaatattttttgaagaatttttcataaaaaaaaaaaaaagggttctaagcccaattttttatttatcttatactttaataagctaaagtaggagcttagttgtttatagtaatgtatttttttgatgttttgctcttcattctttacataatagtagtaaggtgtgtagacaataagtagttttctcatttgtaattaaacacatatttttaatcccaaaagaaaaagaaagtaaataatagtcatttgattgaattcttatcaatttttttttttatatttatttaatttgacaccgatttatttatttatttaagatggttcgattatactaattccttggattgtatggataatctttcttgttcataaattatgaatgatatgccatatagatgggcacagtaattatttaattttgcagggtggctagtaatggactacttcaaccatgtgtttgttttaagaatgtttattctaatctcaacataaataggaatttatacatacaagtttaaatttagtttccaaaaaattaaattagttctctgtattttttcaagaggaagagtactgagtttttagcagtgacgatccattaaagagaactctgaaaagttttataattcaaaaaataaggttcattatatgtcacacataataaaaaataattacaagtgtaaacaaaatatttaaattttattttttgttacttatttagattttttttttaaaatttatggatattgaaatatataggagggtactataaactttttcaaaatatggtacaataattaacctacataatatatttatgagaagtttatagtacaatttttaaaggagtgttttggtattctttatttatttcaacattaaggagagttttagataagtttttttttaatgatcatttatgttgtaattatttaagagcatttgtaaatttttaaaaaatttcaaatagttatttgaattttatttttgataatgtaaatataactggttctaaataattataatttatacaatttgtttttttaaatctctcctgaataccaaaataaataaaaattattaaaatatttttttatatagtaaggaagaattaagaagtatgaaagaaaatgagaaagatgtcttttaaaaataataagtatgaaaaagtagaaaataattaaatttgtttaaataagcaattcaatttttattcttaattgaagaaaaatacttagttcataaaaatctaaaggggtgacagtggcacacatatacttggataattcaactgtacacctcttacacccttggagattttagtatatatatatatatatnctagcaaaaagctacgtgcaaggcacgtatactaaattt

SEQ ID NO: 79166 - DNA, 819 bp, Cannabis sativa
tatgtgcaccaaaaatataaaatataaaaatgtcttactatattggtgttcattacctccaaaaggagagggtacgaaaatcacataaaagaataaattctctttgtctttattccatttggttaaagtacggttctgatttcattaagctggaaagtgattaaaattaaataaaataaaaagaatattttataataattatgaattgaaatcacttttttttttcttaactttgtttttattaaaacaacacgtttggcataatgatacaattttggcagaacatgggtaaagaggaagtttcataaaggaatagagattaaaaggactgtaaagaacgccaataaatgaaaggtaaatataccaacaaattgcttggaccatgtgagattttgcagaaagttttaccttttcatataaatacatatttatttatgtaaaaaaattataataattaagtggaaaattcttgacccccatctgacgcaagagaagaatagtttgtttaatgctaggaaagaatagtttgtttaattaattggctttaagtacgccaaaaatagagagtggggtatcattatgaattcaattattttagtttctttcatttgtttggctaaatgactttattaacctatattggatttctttatcatgattttgagtccaatatcactatataaaaattcaggattttctattacttggtttacttaataagtaaaagagcttaggtgatctggtattgtatgtgtcagtgtgtatcattatactttttttttttttcaagcattaaatatatatttataaaaaaaaaaa

SEQ ID NO: 79167 - DNA, 2912 bp, Cannabis sativa
ctaggatggagtcctttcagaccttcaagaaactaaaaacgcattggtgaaggcatcagatcttcctctttcggttcttatagttggggttggagatgcagatttttcacaaatggaggtacttaataaagtttgtatgatatagagcttaattaagttgatctagtaatggagttggtattaattgaatttggcagattcttgatgctgataatggaaatcggttggaaagtagcacaggtcgtatggctacacgagacattgtacagtttgttcccatgcgagaagttcaaagtgagtttcataaatgattaatacactaaaactaagataatagtaaactaaagataagatttatagtgtaacaaagtcaaataataatgtgaataagtgttatgattgaatgaataggaggagaagtgtcagttgttcaagcccttttggaagagctgcctgggcagtttttgagttacgttcgtagtagagatatcaagccctgcaacttacctggagcccacgcttctctctctaagtctaactagttcttacttcttttcatcgatttccaactgtacagtgtacagatatatacgtacataaaacgtatgtatgtattacaattacttgcaataaatttggtcgatttatttaggaaaatgacaaaaaaatttacttgttcacccaacaacgattcttttacaaaaatatagtgttattctttttggtgttttcacattgttggaaaaaataaaaacaacattttttatttttctgaaacctataaaaaaaaaaacagaattcgaaaaaagaaatctaattttaagtgctctatttataaggacataaaaggaagagagaaaatgaatgtcatttgaataattttgttattaggagttctatcacataaataaatggaatttttacacacggcttaaattgacatttttattatcaaaatgctattacatgggatttttaatttttatgcaattttatttatatatttttgttattttaaagttttataattataaatatatggtcatttcatttctttatttttttttctacaaaattttcactttatttacactcttaagccatgatggcaattagctcttgcctcccgttgttgcttgcctcttggcccctgctaacgtagacctcgtcccaaaccctctgtcatcgtgtagatcacatccacagacactattgttcagaaataagacctctactaaaattcctagagagctttcttctttgagagaaataagaggaatacagagttattaacattgtaaacaattgtaatatttaaacactcgcctgcaaggctaatacaacggactcgtggactagggattgttaacgtctgaactacgtaaaaaatctatttgtctatcatttattattttatattttccttaagctctaattaatcagtgtctaaaaatcttggtaagtattttggtgctttcattgagagttgagaaaagtttactggttgttgcattacttcgataatggtgagtaccagtaagaaaactcccttagacatagttatggaggaggtagactcccgtctttggcccccaaatggcgttggctagatgggcagaaaaagttgaggcaaaaatggcttgactgcctgaagctagaggaagtgttctcgattggttatgtgttgtttggattgaatttgggtcaaagagttgggggtcacaaggaccagctacctgtcattggcattgttgattggtggttgggtcaaaagggtgtttgttggtttctagcaggaagacttcctgctttggtagattcagagttttcgggagcagaatgcttggctcttttatcttcccatctaggatggggagcagtagtggtgtgtttcaacgttgtgccaaattttgggaacaccactccttccccagaatcctctttgtttgagaggatcatcggttccttatttttaggaacaacagtaggcagagccaacgatttagtctcaccactgcttccctctctggaagttaattgggtcttagtggagtctctaattttgagtgggggtgatggaggttcgctactttttagcatagaatttcttttgttttcccttgctgtcagcaacaacattgaccttcttaattgtgttcatcaaataactaagcattttggattcgagcgtatctggaaaaattgaaacaccacaacaaacaaatcagtcaaaaaagtaaaaagtaacaacgcaaatcacacagtttcaagtaaagatatcatgtgagtgcaactgtaaaatgtgttattatatggtgcccctcttgcaaacaaagttacttcttaccagtcaatgaagctgtcatattccctaaaatccgggaagaacatattaaggaaaggacccactctaacaatgttcatggggaattcttggttgttagagtgcctaactaattggtctaccctatcaatgtaatccttcattggatatctatgaggatctagcttaagaaagaatggtcaaaatccccttagtctaccaacgacatctgagataggccgggggtatgaattacgtggaaggactgattatctcttcccgaagtactcattctaatagtgctcgtatatggatatggtgctgggaacctatcttggatttcctcttcttctatgaggggtttgtgatggtgactattccaggcagcgacaagaagttcctcatctttggatgctttagttattgcaaccgaaaattccatggcacattgctctttgaggtcactaagggtctaaggtttacccctgccattaaccccgtgaatgcgttggaatgtggctatgaggccgtattggcacaatagttcagttgtcaccaggtcctttacccttaactcttccttggaaaa

SEQ ID NO: 79168 - DNA, 4383 bp, Cannabis sativa
taatcatttatgttatatataataaaaactaaaaagttaaaaaaaattaaaattcaaaattgggttggtcggtttaattgggcgggctggacctattttcaatccaattaacagattgagcggtttgtaattttttcgggttatttcgatttgtaatttttatcgggtttttcggtttcgtttgggcggattacaaattttttgtacaaccctactatccatagcgcatttgtaagtctactcgccaattaaattttatactcttcttattttactttatttttagcatctattcattgtctttctgggcctttaacttataaagaggtagttattgaccccctttggcaatgtgctatgaatgaggaactctttgctttgcaaaagactcatacttgggatttagtacttttacctccttgtaagcatgttattggttctcgttgtaggtataaaattaagaccaagtctgatggatctattgaacggtacaaagctcgattagtggctaagaatttttcacaacagtatggtatggacattgaggagacttttgctcctgttgcaaaaataactattgttcgtactcttatagcagtggcatcagttcattaatggactatatatctcaaatggatgttaagaatgtctttccaaatggtgacttacatgaggaagtacataatcctcctcctggtgtttctcataagtaaggcgaggtttgcaagctaaaaaaaaatcttgtataatcttaaacaagctccccgagcatggtttcaaaagttctctactattattttgtctcgtagttttgtttcaagtgatcatgattctacatgtgatatgattattttgtcaagtgcacatctgcaggtcgtattctactttccttatatgttgatgatatgattattacatgggatgatttacaaggaattgaaatattaaagtcaaaatcagcgtctcagtttgagatgaagggtttgggtctctgtgtttattttttgggtattgaagttgccttctgtccagaaggctatcttttctctcaatcaaagtacactactgacatttttgagtgtgctcgtcttattgatactagagttgttgacactttctccgaattgaatgttcagcattctcctttcgatggatctcctttggaagatcctactttgtatcgtagcatcgttggcagtctggctggtttatctccctatttattactcatctagacattgcatatgttgtttatatttcccaaatatctaggctgacctcgtcatcgtgttcgaaagagagagtaagagcctctctaacactggattcaaccaactcgatcacttctttgccttttgtagacgccataaatagccactaaccaaatgaacaaggagtaacagtttattaccaaagcaaacacaaggaatgcaacactcccaagatcgctcaaggaggatcagtatacaaaaaaaatggagaaaacaaggttaccatacacttagctaacactgtatggggagcattttcaaattttttctttgttacaattgtgctccaatacacagtaatattttatgatgcaaattataacaaaaattaaaataacattattgattatcaataaattaaatatttaatcttttaaaaaatagattaaatattttaaaaaaattgctaatagatattactattgtctagcgattaatattatattgatattgttgtaattaaatatgagctcctgtataacttattttttcattaaaaaaaaaaatactcatatttgtaataataaaataatccatgacaacaaaagtgtgtgagtaattctagaaaagaagcttgtcttgaagagccatattttcacgaggaattttgtgtgcaatcacatggatggacgatatatatataccatctctccaaactgtacttttccctaatttaattattaagatttgaatactaaaagtgagatttttttaatagacccacccggggggacaaaagctgtgaatctaatagaatcaaaggaccaatatcgaaattaacagagttaaaatgtggccgttaagtaaccccaaatttgcaaagaacacgtgttgaaaataccaaacggaggagaacgacaggttaaaatattaatatacagaagaactgggaaactgcacagaaccacgccttgaaaggaaaaataaaaccacatatattcctcgtgctttaactcgagccccccaattaaaataatcaatttcattaaattattattcattttttaaataaataaataaaatataatataaagtttctgaaagagagagagagagagagagagagagagcgagttgtatacgtacacatatacaatatatatataatagatgtcgaaggggttgaaaatggaggtatattaagaccagatatagatgcagagttttcttcaagcaccaacatccataaaacttttttaattaagggattcaattcttcacttaagtcttttcagttttctttttttatctcggaaaatatgtcggtctcatcggaaaacacagaggtttccgcccataaatccgctaggttttctgaaaagcccagtttctctcagaagtgtagtatgttgagtcagtatctgaaagagaagggtagctttggagatctaagcttggggatggcacgcacaattgaaccaaacggtaactgttgatttttttttcttttataatttctacctttcttctttgagttggtaaagcataatttcgtattggtttgtctgttttctttttttccggttatgatgaggatagactaattttgggtttgaatcttatacggattttttttgctagttttagtattaaattggaattattatatgaaactttaatgatgataatcagctagattgtgtaataggtagtaggaacaggaaaagatttttttttctctttttctaaattaaaattgactaatttaggaagagcataattatccggaaatgtggatttttcatttttttggttatttagtattaaaattaagcaattttatttattatttgttcttatcttgcatgtccccgaaattctctgatcaaattgacaaattccactttggttgtttgatatctgtagaactctcctagttttcctgctaagtactcttaagtcttaattgactttcttttgggtgtactattgatagaactcgcttttgggctatcttttttctggtttctgttagagacccatcttagatttgattaacatgtgattaaaaaatccacttgcgacatcttttagacattacaggatctgatatatgttgttgattgttctattttacaggggcaacaatgaatttttttccagctatggaaagccaaacaaatacagcagcatcacgagacctcaagttcatgaatttgtttcctcaacaagctggttttagttcccctcgtcctgagcgagaagcccccaagatggcagattataggtacgcctggttgtttgctgagtcaataacttaaagcttttagtgtattgaaacttaaacatttgatataactttagactgattaatgctttgttcgatatgataacagtctgaacaagcctgccacaggagagcttgaaagatcccaaatgactatcttttatggtggacaagtgattgttttgaacgactttccagcggataaggcaaaagaattgatgcttttggctagccaggagagctcccacaacctcactgcccaggcctctaaccaggcaaagagcaacaacgccttcccatttaacatgacaaagaatccatttgattctggtgtttcggttcctccaagtccgactgttgttcctaacttcgtcggtaaagcaattcaggaatctgttcagccgaccccaagtccgaatgtttgcggtaaacttcttgagcttgatttgtgtttttgcccatctttacaaatgcaattgaatttgtttgctaattgattatttgctcttctattgcagatctaccaattgctaggaaagcttcgcttcaccgattcttggagaagagaaaggataggtaggcatcaaaacataatctgcaaaatatatatatatatatttttgttaggcttcattagctacacccaaccatttttttcattcataataatagcatcatggtggggcttgataccataatatttatgaccaaaaatggaagtagttcttttcttgattggccttttgtgtttatgtttggttcatgggattaaccatttgtttgcttttttgttaacagaatcaatgccagagcaccataccaaatcccagaagtagctgcatcaaagtcaactgaaggcaactcatggctaggcttggctgcaca

SEQ ID NO: 79169 - DNA, 2943 bp, Cannabis sativa
aacgcaagcaaaacaatgttttaggcttcagccttgtaaagcaggaaagatatctgtagggaaaataattacaaaagaaaatgtataccagtttcatgtctaataatgtattatgtgtactatgttttttctttcacaactaaacatggcaaaagaatttggggttacacagttttggatttctcacgaattgccaactttgcactaaagataacaaaaactgataaataaagattctccaatgtcgtaggaatggaaagttcaacaggtaatcgacatggtaattaaaacgttttctacgcaaaaattgaataaaataaataaatgatcttattcagttttcattgcatgattcatagcaaaagaacattctgaatccctcttctcaattttcattgcatgattcatttattttcaccaggcgaaatataaagaactcactgcaaaatacagaaattcctcttttagaagaaataaaaacagaaaatatcttctcactgattgtaagcaaatgttcatgcacaactcattctaccaaatctaaccatgaatgtgtttctcttgtttcataagagcatccctctcctcaaaattgcaactttcatggtttcgccaaaactaaaaagacgaattacatgtaaacacaatatcttcttcatcttcattgaggcaagccagcttcaatttcatcccacaaatctactttcactctaacattttccttgatttgggaaataagctcctttgcctctgctactttcgaaacactcgcaagcccatccacgagtgacttcatagtcgtgaaattaggaacccatttcttagcaatactctccttcgaaatctccaatgcattatcaaagtccttgccttgacacatgaaataaaccagtgtgaaatagcagttactatcaggttggcaacctttgaaagtcatctccctaaacaagcttttggcttcaactaatttccctgctttgcaaaacccatgaatcaaatggctataagtgactgaattaggcttgattccccttgataccataccatccaacaaagctttggcctcatccactttcttcaatttacataaactatggatcctaatgttgtaagtactcacccctaaacgtaatccatacttctccatcaatgtcaagactttccccacttcctcaaaccgttcttcagagtaaaacccagataacaagcacccaaaagtagtcgcatccggcttcacacccttcctatccatctccgccaatatcgagtatgccgagctagtcgaacccgactcagaaaaggcctggatcaccctgttgtaagtatccagattcggtacgatcccataagccttcgggaactcgacgaaaacgcgactaacctctttgtaatccttggcgagaatgcaagcgaaaatcaaagagttcaaaatcctaactgaaggaacaacgccaagttcattgcattgcttgaatgtttgaatagcctgatcgatcatcttggcctgaccatacagaaccatagcgtgtgaaataaatcgctcagttttgaggtcgggacgggacttgaggtcatcgaggaactcgcggatgatctcaaagtgattcgattccgagagcttggttatggcgactgagagagtgatccgatcgagtggggcctcgggtgttagcgatgcagccttacaaatctctacgatccgactagggttcttctcgaacttgatgaggtttagagccgccctagttttttcttttgcggagagtgttttgctcgagtctggagataacacagtagagaaccggcggagggaaaaggaagcttgacggagacgagatatgagagacatggttatggtaagttggtctgagagtctgaaactcaagactcagaagaaatggaggaaagtttgggaagctagggttttgcaaacagaaaaaggaagaagaagaaaaatagtgtaaggaaaatgactgcgggtttatgggttttagggtgtcagttttgatcaagtactgataagtgacgtgtcactctatcaaccgttgatatttttttatataaaaaaaaaataccaaggtaggggattgaacccgacgtgaatcgaacacgcaaccttctgatctggagtcagacgcgctaccattgcgccacggatccttggtgatattgtattattcaaaataatatatattatttaataataaaaattcaaaattgaagtattaacatttgagttcttgagttcttctacatttgattagtgttaagagagaaagaaaatctggattgatgttaattattggaaatggttaatgaattccgttgaaaaaaaaaaggtttatattggatatataaccaaatatattaatccttcctattaatatacctctttaatatgaaaagtgaaaaccaataatacggaataattgcattataattaatcaaaacactacccttttatttatttgctgcccaaaaaaaatttttatttgaccaatagattaatgtatacatcaatgtcatgtgtgatgtgtgtggttcatgacttcatgttaacctatattttaacatgaagaaaaagagagaaaaacgtcagatactcattatttatgcttaatatttatacgtgttgtcaataattgaaataatgcaaagcaatatatttcctctccaaagtctaattttgataagatcaacataaaatgaggctggagtctcattaatgcccattaattaactctgaaatataaacttgagacctctttcaaaagcaattgttcacaagtttaattatgtatgtgtgtttctagatttaccatattgtattgagagatttttgtgtaaattaactaaaagagtctttattttccagaacaaaaacaagaaagaattatactgattctgtagtgggattgttttgacatacattattatggttat

SEQ ID NO: 79170 - DNA, 2305 bp, Cannabis sativa
atgaatattgtctactcctattaaatgtaaatggtccattgttttgattttttatccataccaactctctctgtatatttttaccatatggtaaagataattggtggttttggcctttttttttattgactgaagattggattagacctcatactattgagatgtttagatggttacacagtcattccttttcttttaaaggaggctaattttacactttttgaaagtgtcatacattattactctcctaatagttattacagtttttatctaataatataatgataaggaaccttttttctcttcttcttttgttcctttatgactcacttcatatcttttttatgctgtagttatgattattcaggatatggagcatccactggcaaggtaagagatgaagcttcatattggtatttttcttttgctttttaaaatgtagttttgattgtgaacaatgaaagctttatggaaagttaaagtgggggtgtttcacttgggatttggcagtaataattttgtttttcctgctccttattgatctatttctgtttttgataattggttaaaattttctctttttgcaatagccgtccgagttcaatacttactatgacatagaagctgtgtataactgtttgaagaatgaatatggtgttaggcaagaggatttgattttgtatggtcaatctgttggaagcggaccgaccctgcacttggcttctcggttacagaagttgagaggggtagttcttcatagcgcaatcctttcgggtattcgagtcttgtatcctgtcaaaatgacattctggttcgacattttcaaagtaagtataaataaaatggcttttaattctcctataacttcactttctttctttttaacttgattttgtattgattgaaatgtcctctttgtatttccagaatatagacaaaataccaaaagtcaactgcccagttttagttatacatgtaagtaattttctcttcaattcacatgttggcacttttcttttcttttaattatttcttcatagcctattttgatgtagctcaaagcacatttatgaaaaactgaaaaccaatctttatgtttttcttttcgggttttgattctaaaattttactgggattttcaatcatattgtacttagtaaaaaaagaatttgacctggttgtgtgttaatgcaagttttagatatgagaacatgggggtttgtgctttgctaggctcttctatggacccatgcatttgtggtcctttgtatttttgaaaagaacaactctaagaacacatgtgcagacaatgaatgctgaactggttttgtgtccatacttggagaaagaaaaacgcttcttctctcttctcatttgtcgagtctatttccttcgtttcaggaaatgtgtcaattgactttctgattatcttccacactatgatttttcaatacttctctttgtgatgtatacttggcatggaccataatatgcaggggacgaatgatgacattgtcgattggtcccacggaaagcgtttatgggaactgtctaaggaaaaatatgaccccttatgggttaagggtggtggtcactgcaaccttgaaacttatccagagtacattaagcacttgcgcaagttcataaacgcaatggagaagcacaacttgacaaagcaaacaaagaaacaactcactactaacacaagtatcacagaagtcaaacataacaagtgcttaagatttgggaaaagatagccgtctctgattgattgattgattgattgattgtttttttctttcgttgttcttctcctcgtctcgtctttagggaattagacgaccgaaatggagctcttcagccataactattgcttgccatatcatgataatgtaatcttaagtgtttggcagccaagctagttaggtggcttggtaatattttctgaagatcaagaattaataaggaccatatatgtgggagcttgtttgatctggatctgattctgaagaccatttttaaggtaggaatttaatgcagttaccagtacaatgcacatggcagtagtgtgttcctactattcttccttcctcatctgggtttcatgtataattattgctcagccttgtgtaaaacttttcagcttaatttagaaaaaaattacaaaaaaaaaaaaaaaaagttatattgggttgccattcttttcatttttattaatttgcttttctttatattttatctcaattataatattctttttttcttataatgcaagagtgagtgactaatatttatagcattggaa

SEQ ID NO: 79171 - DNA, 6376 bp, Cannabis sativa
tgttttcgtgttattttttggaaaaccgtaaaaatgtgaaaaaatattctttaaacgtaaaaatgtaaatattttacaaaaaatggtgcctgatgtagttattccttattaaaacggtttatcgtctgtataccaattatgaaaagtcattaatccccaattttatttgggggccgttgcacaggtaatacttttcttaatttttctttaacatcatttcttaatttaatattaaatttgttttcataaattttatttttatatgtattttttttattgaaagcatttatatattagttttgagttttttataatgctagaaggatgagtttttttgtttttttttgaggtagaagtaactgtaaaatatgtattttatacaaaaagaaaaatacccttaaaaaatcccatcactaaggcaaatttcattttgagaaaaaaaaatacaaagatttaagttttacgccttaaacactaagacgacatttgatttggataaaatttaaacactaagaaatgagaacataaatagaaatatgaatagaataaaataaaatttaaaatatataaaaaaaaattaataaaaaattaatatattttttttatatgcattagaatggtctttttttttttaattttaaaatggaatagtcattccaccaaaaaagtggaaatgttattccattgaaatgacatttcagtacttgcacctaaacaaaaaaaaaaaaaaatgaagattgtttctttttttcattctatttcattacctccaaccaaacgccacattagacatcatttagttggatgtaatgaaatagaatagaataatattttctcaaaacgctcatgaattacttgtataaatgaattaaaattttttattttttcaaaaaaaaattatttattatcttttaggtgtatttaatgaaatgtcaactatttaagaaaaaaaaaataaaggcataatgaaatgttacacacttagaagttgttttgtttcataacttaaaaattgttctctgttttttaaaattgaaaacagtttttaaaaactaatagaggtcatttggcaaaaattttttaaagcgattttttgaaattgaattttaaaaagctaaaaaacagaaaacattaaaatgttgttttcaattttcaaaaaaaaaaaatttgtgaacatattatattttatatttttgcttgcatactctgatcctagacccgaaaccatactcaaacttaaacccaaataggttcatgtcatgatatggtgttaaaatattaattttttaagtaaaaaacactctaaaaatagttttaaaaaatttatcccaaacacgattaaatttttaaataacaaaaagttatttcacttttaaaaacataattttaaaaacttaaaactaaaaacacagcacactcccataaactgaaaagaactatctttcattctcagaactgaaaaaaaaaaacatcatcaaaccgaacaaaagactcttcccctattctaaagtcaagatcgctcttactacaaacaaatatactgcccaagtgcccatgttgagcttgatgttgatctttcaaagcatatcattccctagtagacatccccatattaatttataccggatatcaacatgttatcttcctgataagataacactagtgcacttttaaaaattatttttaacactaatattacaagtaaacaaaaacagagcaaaggataaataatcactatatacatacacaaaaaaaaaaagatttacagctatagtactcgattatacgaagaccgattatccgagagaatccgattgtgtagcttcatcatcttcatccattggatcatcattttttttattcccatcagcttggtcactaccctcagtctctgaatccgaaaccgttcctcttttagcaccacttttagcaccaaccttgcttttaacaacatcactgtccgtgcaactctcagtatctgaatctgaagcagaacaccgatccccctttagaagattatcattttcacccatccttccaccaaatcgctccttcaaatcaggagcaacaatcccaatcatttcacacaaggcctgacgctcatgattccgtctgacagcaatggcctcaggggatggattagtttgactctctgccacctgaaggttggaatcatgtagggcagttccacctccatcattgttgacattattgtttcgaccctgtgattcattgtctccatggaccgaaggggcggtgctgcaagcccagctaccggcaacttcagaagttaaaagatctgctgtcctgattgtgcctccagcttctgtatcttccatttcgataaccctttgattttcaactgggctattagattgagagcaaggcgcagtctcttgacaattcatttgacgctgttcatcagcttcttgggcttcatcaagttgcatcgtatccccatgcaaagtgccactcttgttcaaatcaataacttggtcctcattaattccagcaggactttctgtttcgggaacttgttcagtactaatggcatatccctctacaggtgcagtgccaacaccatcaatatcagaaccaaagccactcttcaaaccatgattggttgcacttgtaaactctgcctcttcggtattttgatgtccatcttggcttcctatgtcgcaatcatgcttttcagtaacactgtctccatcacttgaaggttcgacttgaattttgtcaaaatgacgggccgaagtagctgctgagcctactatttcagttctatttgtaaggtactcagttgcttctatgtctcggtttccatttatatgccctacaggcatgttgagatcaatatcaattgatgtattgtcataattctcctcatcttctaaagtcctctgcattgcttttaactgttcttgctgcttggcaaaaagccctgaaatctcctcagttgtggaataaaatgctctaagctgagtctctctgcacccaaaccataattatcaccataagctaatacttgaagaacagcaaaccaatgcacacaggtttcaagactttagctattagaacagaatattttttccctctctttttcttggaagaagactaacaaaatagtttggcagctataggaccaataagaagtaaaatttcataattcagaatacataccgaagcataattctctctttggcagcttttaaccttcgtctctcataatcaagatcccgcatggcagactttatctcaagttcaaggacagaagctttagcccacgcttcctcacgagctgcctgctaccgacagcaggaaatacctcagcttaaaagttagcaactaaatgaaaatcctaggtaagtacacttgtaatttgtatactcagttcttatatgtcaagatcaaacaaaaagggcgtagttcctacctttgcactttcaagcttattccccaatctttttgtttcaagttcaagttcttctactctctgtccgaacaaccaaaagaagcaatgtgaagctatttctcaatcaagaaaactataatatagtttacataagaaggcattgagaagcacaattacctttttcccactttcagatgtcaattgcacttcgcatacttgggtttctagctggcgaactttagtgtcagatataactaatctttgccttgtgtcttcctgcacagacaaaaggcaatttaatacacaatacctcaaacggttcatatcatgtaaaaacttaaatttaaagatgaaacgtgaaatgaactcccagcaataccaatttggatcttaaagtttccaccagtaaacacctttctctctctgattcctgttaatataagaaatctccatatcatcctcaactccatagaaaaataccaacatataatatgataagcagtcttatttcaaataaaagtatatatcagacctgaagtttgttaatcacttcttgttgctctttttctcgccttaaggcagcatcagatgatcgtttcaattcctccttagcctctgatagagctctctgcactgctgcttttaaatctgtggcagcattttctcgttcttctcttctttgttcacgttcttcatctagctgttctttgagttcagctattgatgatttttgactattcaagaaatccagttattagtatattttgcaaaatattaacattactccacttgtaaattattgcatcaaactgagtagcatagatttctactaaaatgaagcagataattaaattacttaactggtcaatgatcacatgaacaagagcggtagagaggaacaataaattgtgctttccaaaactagtaatcaatcctatgttcctctaaatgctttcaatatataattataatctatctagtcaacctgtcaaagaatctagtttcatagagatagcttacacattcgtccaaatctttgaaagaaaaattgaaaccaaaacatgtgttaacagtcttgataaataatttttttacccaataagaaacagccaattatactattgaaatattcattacaaaaccaatggtgaaatagcgtccttacctattcattatttcatttgcttcattacatgactgcagagaagcactcaacctttcattaaggtcttcaatagcatgcttctgctcagcagatattctattgacatctgccatttcattttgtttcacctccagcgtttcacgcaactctttaagttggtcaacataagaatttgaaattgattctttcatctctttcatttcctgaagaattcaaaatcacatgaaagggggtgtgacttcaaaataatacaaatttaaagaggggaaaaatgctaaaaaatacttttgtttaaatttgtattttacaaaaaaacagaaagagaagtcgtagttcatacattttcatgacgctcaatgacttcacgattctcattctgcagtttatctattgtaataacctgattttccaattgcttcctcaattcctacagatagaatattaatatgagattatacagatagaatattaatatgagattattttgcagtgaacccttgaatgagaatttctgtgacgaaatctgaaaacctaaagcacaagaaattatctttaagggattcttctattccacaagccaaaaattctacagctcactttgaagtccaagatatatgaagaaacatgtaccgtattcgatcgttgtagactacgaaaatcatcaagtgatatagggccctctggagcaccaatgccaatgcctttcagtctcttgttttcagtaacaaattcctctgtaatatatatatatatatatatatatttatatatatagaaagagagagaagctattttatatgtcatgattcttaagtcaaaaaagttaaaaaatgattcaaaagaatagtcaaaaaagttatataacatttttcatacaccaaaagtcatctctgagactagcaattaataattcggtaaaattacaaagcaatatatagcagttatattttgacttttgtagccgtggcgacaaccatgagaactcgaaagatatatactttttatgagaacaatacttctcagaatccaaaattaaatacacttgagagtctagttgagctcattaacattaagtaagtgcgcgcgcacacacacacacacacatataatgaagttaacagtaacctagtcgctaccttccccataaacatacctgcttttcgttttggaactgcatcatctgtcctcggggaggagacaggaacttctcgatagacaaatacaaaagcaacttctgttatgtgattcagaaaaaggggtcaatgaaataaaatttgtttaagaaatcaatgtttgcatccaaatgtgaaaagctaaatctacagcacagttcctagacttaatcaaagacttttagacatagctaaagaaaatggacaatggagacggcatgaatctccattaagaagatctgatattcaaaacaagaataaggaaagaatggaatcaaacataagttaagattattaccatgctcaggaggagcagcgaacgaaataatatctccatgatgaacttcagcttcagggcctttctttttcaatttcttccagttgatatatgtcccattggtgctgcagagtctccaagaaaataatcaataaatcgattaaaaaagaagggtagaaaactgaatattcacaaaaaagaacacaatacacaaccttgaatctttcaagaagacagtagttttacatacggacgtctgtttctcctcctcaatgtcgaccttcttcctataaattttgcaatgtttcgcactaaccgcatttgaatcgatctggaatcgagtatcg

SEQ ID NO: 79172 - DNA, 3135 bp, Cannabis sativa
cctcgtagcccgcaacacagcctgtggtatctatctcctcatatttctttattgttcataatataaactcacaaacatcaccaaacctcgttacaaatcaacacaatcatcataataaccatcctcgtactacagctctgctgtttctctactctgccttagagaaccagctttatttcttagaaaacaagaaacacaatggcacgccctgttgttatcatggctctccttgttattgccttagccgggttggtttcagccgatgtaaacagcgaaatgatcaagggtggcactggtgctgcagcagcagccgcgcctctcccagccgctggaccctcagacgacaatgaaattggaaactcggatggagatggacagagcgacgacgatgtggttgaggcccccattggtggacctgttcctcctggtgcattctctcctactgattcttctccaacaggtggagcaactggcctcgtcgcgggctcagctgtctcgggtgctgttgcccttgttgctgctgctgctgctggcttcttattttaagcaaaattttatatacattttgcacattcacatgcaaatattactcatacctatacttttttttttttttaactcttgagatcatctaatatttactgtaatctctgaaaatttgttcataattactagtctctcaaaaacattatatgacttttactcaatagtgaaacatttctacaattttgtctaatgtcatcagcagctggctacgtacacatgaatttgattactgtcatgaaatataatcatgttatgtgatgaaatattccataatccaatatggttaaataacacaaattcaaagttcatgtccttgtaaaaagataccagcaaagaagttttagattcaaataactttgtaagacgaaatattcaccaaaggcatttgaacaagtttaaactatcctataaataaaagggtcacaatggccaacaaaacaaggtggtaatgtaacaagtttgcattaaaaagagaggaataccaaaccagttaaatccagcctttttgccatgactaatatcaaagattgaaaggctgaaattctttggccaaatgtgtgaaacttacatttcatttaaattcaaacaacagcactaaatctatttctatttcatcacccttgtctacatgaggaaattaaagaccaaaaaaaaacaaaaagagagacctttcttcatttctttatcaaccagagacaaggcaaggcttttagtgtgtagctcctatgcaaacttccattaaggagaaaatattcatttcagtcttctaaatttacagagaaactacaactcataactcttgaccccttaactcaactacacctcatgttactatagatatacaccaaaaatatgggaggaacattaagagaaagtgagactacatatatccctcattgtgtcaaattataatttacatttagcctttttattaatgacacaaaccttttaatgcaagaaatggctcttatttggggaagtacaaaaccagtacaagacttttacaagctctttgttgagcccaatacaaggggaaaagaaaagcaagaaagagtgttgttacatatgaaaactaatacaaatcattttacactagactatacatgagaaaattttcattcacatatgaacaagctcataaatagtctttctagatgttgtgttgcaggagcactactagtacatatttttaaggtggtcttttagaaaaacaaggtgaaattgaaaacagtcaaaggtttcttaacacacacttggcagatccaatccatcactagagaaatccaaataaaggcatcccatgtaataattcttccaccatataatcagcaaaggctgattcattcattaaaagaaagagtctcccaccctattccctggatattacgatcagaaggatattagagaaattctctaaaagcattccagtaatcaaccctatacataaatttacaagcatgaagactctttttatcataaaacttgaagttccttttcttactttttctagtgttttgaccttaggtgactattaacatatctcacaatagatgtcgaaagccaacttttggtcaataatcaaggatgacaagttctagcaaatctttcagtgtaaaactatgatctacatgacctgcaatccacatagttctaagccatacagtatatgcacacaagcaagaaacaaaccccacaatgcagaaattagaaaagataaatggagagcagaaaacaaatgacctctcatagtatattcaacataataagtttttagagttaatatcacaagcacaacaaagcaattgtgttgaagggaggaaagggtaaaacagtttttgaataaatggaataagctgcagggcattaggaaccaaaccccacaaactttatcctcatttatatgttactgaaacttactaattgtttttatctcacaatatgagctatacctaattcatttgaacagtaggaaaaagatcaaaaaaaaaacatcttttcatcctatccatccaagtaaaacttacttctaagccacattggaaatggagccatcaagatccaaccgaagtgatgtagacgcgcatagatatccaaggattgacagttcaaattccagggcatagattttgtgggcatggtaaaatcaaattactctgatggcaaacgtctcctctttccataatcaacatctcttgagcgagaccgttgatgatcttctggcattactcttgacctactacgaggtctagatgaagaccgccctttgtcccagtcattgtcattatccaattcatgttctcttcgacgatgatctcggttgtacccatctttctcttctctgtatccatgctcccgctgctccttttcaggtctgtcccagtcctggtctctttcttcatgatgcctccgctcacgatcagatccccgctccctttccctagaagcaacacttgaccttactcctttttcatggtttgcttctccatacccatactcagaagcaccatcatcaccaccaccaccaccatagcttgcttccttgctccttcgaacttgttcgtctcctccccatccacccatgctagtctc

SEQ ID NO: 79173 - DNA, 4281 bp, Cannabis sativa
taagaactcattgatgctaacagatttcttcgccctttcatccctttcagcagcctgcttcttcttgtccttctcggaacccaatttgataaagatgtcctgattctctttcttgcttgaaatctgttgcatggatgcaaattctttagtatccacctttctctcttcagcctttagtgcctgcagggccttcctcttttcctccagcaccttttggtactcctccagagtcatctccttatcctcaggctctttttcttcttgttcagtaggaggggcctccttgtttccatctgcagcagcaccaccttctcctttaggattctcgtccccgaagttcttctcagtctcattgacggcttcttcacgtttaaattcactacctcgcccagttccactacggcgctcaaatggcctgtgagagcgttctccctcaccaccttctccattactgaaatcaccacgaggtcctccatagccacgcctttctctcccagagtctccctcctcaacagcaccctgaccagcagggctttgttcaccgttcgaaaatccacgattgaacccaccactgccaccacgaccacggccataaccacggccacccccacggccaccgcgaccaggttcattcttgaactctatcacagcctgagcaggaggaagaggcttggaaggcagattagccgccttattctgcagagcaggagtatcccggatccttgccagagcaccagtagccgtaccaatagcagaagcagccgcagccaactgcgactgaatagcgatcaactgtgatgggtcctcaacatcgtaatcccccaacaaatcaaaggggtttgcagtcgccattcccgaatactaagaaaaagctcaacaaccgaaaagaacaaaaaaaaccaaaaaatcgctgagaagagaatctcacagtgaagggcgaccacgcaacgctagcttaaaaacaactccatcaaaattttactgtgtacatatagatcttcactctttcagtgtgttttaagagagagaaaaaccctagcggctagatcagaagtgaaaacccaatccaaataacaaaatactagcaaatatttatcattctcgattttttttctgcctcacgatggtggttgggtggtggtatggaactcaaataaaatttaacaatttacgtataaaattgatcaaaaaatttctaaatataccctattttttttttttataaacaatcaacattttattaataaacatcaagtacatctatccatccaagctatcttattatcaagagtgcatgcagagcaaatttatgtgctattatattggatgagcaacgaacatgaatgaattaaatatgctccactaaaattggatagtaaattataaatatcatttaaaacagatcctaaatcattacaaaaaaaaaaatcttctagaaaaagcaaacaccatagctaaacagttcaattcaacagtgctaagcggaatacccaaccccaaaaactaataaagtgccaccataacagctattgcttttgcgtgtataactgtgactgtgagtttacctacacaaaacacaaaataatataaatactttattttaataatttttattttatataaaaattttatttttaattgtactaaatttttttttctttcaattcatattcttaaaaaatacatatcagacaaaaataaattatattttaaatattatgacaaaaaaattatatgaaattcttttaaaaaaatatatctataaatgagttaaaaaaattataaaaataaaattaaaataagtattaaattaacataaaataatgtgaaaaaaaaattagaaaaaaatattaaaagtaatttttaaaaattagccaagtttatatgtttttaataatattgtattgggtgcaaataaaactccccatataagcatgtttggttgattggaatcaagattgtaatggaatcaaagtgagtaagtcaccattacaatgtttggtttgtgtttctaacatttgtaatggaattccattgtaatgggcattactccaatcttataaattctcattacactcttacaactcattaatgagaattacaatgacaactaaacaataaaaaaacaattttaccatatgaagcaagaatatttttgtcagttcaattctaattaccatgctcattacaaaataaaccaaatatgataatagtattctcactactattaccattactattactattactattacaattacaattacattccggtaaatcaaacaccaagtggagccaaacagtctaaatctatgtcagcacattatgctgcaatggtggccagtagtgatcaagtttctgggctcatatcaacgcccaagagagttcgagatcagtgttgctatctggactctggtgagtactatggcactgatcagatttacaagggggtgaaggtgaagccaaacactttaatatcaaacctcctattcagtctagatcatgtagaacatgttacatgtgcaatctataaataagaatttgattagtgttttcaaagtttgaacttgataatggtgtaacctttgaatttcaatctgatttctgtccagaatcaagttaccaaggatgtcttgctaatgggaactccaatctcatgttttcatgttcttttaacaaaagataagagtcgtaaattcatatttcagttcaattaatgcaatttcaattttagtcaatatttcttccattatatttattcattaacttagtaagagtagaaatcataccccttctcacttcacaactgagacaaactagattttacaagatgcattaatacatacatggatatcacattgcttaaagtgtaccagatacatatactatagtttttttcgaaagaatgatgatcacaatgatccttcagtatataaattgataattgtgtgagatttaacccgacttctgagaaaattccatcaaaccttgcctcaaagctccaaggttcaccccattctcaaccaaaatgcatgtcacacccattttcgatacctaagcaaataaaatacaaagaaggatatcactcaagctgaactatagagtaaactgaggaaaaaaaagagcagaatgaaaagagggagagatggatatgaatttaccgctcgaatattcctgtcctcatcatcaaaaaacagcattgaagaaaagggtacgccagtcttattatgaatttcctggaaatgttttgtcttgtgagtagaactcgggtaaatctcctgcaatataaatcttaaattaagaagaattgaacttgaactccatagaataattgtgctattaaaaaaaagtaacctttgcgagaaagatggagtcaatggccaatgttttaagaaatgcagaagcgactttaggagtgggtgttctagaagcaacggcgaggtcgattcccttttccttgagagcattcaatacggaggaagattctgcatacaaacgaggcttgtcatcgtcgtcgtagaactcacagtaaaggggccagagtgtaatcgagatcgaagacgaccaaacgaggaagtggtgtgtactgagcgatgatccgcaaggcctcattctttttcgcctcttcgtctcccattttttccgatcttctccccaaatcgattcgatactacttttcaaaattcctggaaccgtggactgtgtcacggctcttcctttttttttttaacaaaagggttttaagaaataattctctatttttatttgaagagtcacggtcaattttcaattataattttttagtcattttcgtgctccaaaacacattcctaatatctttttcagaacgaaatttatggcagtaattttttttttttttgtatgtggtgatgaaattatattcgagcattttatagttggagaccaaacctccttaaattaggatagcttaattaaagggcatgatttgccaaattatgtactgcaaaattcttattgcaagtcatatgagataaaattgccctcgaaaatttaaacaataaaactataatatcaacaaacagcactctcaactcattaaaaacatttttcctttgttgatagctgctaccagagagccaaagtttcaacttgttatacagaaatgttacttaaaagaacaaacaacaccaaaaaataacaggtattagaaaagaaaatccttgaattaaacttagtagactaaattcaaatttaaacacctaagttcctaaataaaaaaatgggataattgcggcaaaa

SEQ ID NO: 79174 - DNA, 1224 bp, Cannabis sativa
tttcctatcttttctggtagcattttaagatttttgcatcctttcagtcgcaatgtttgcaaattaagcaaataacataatccattaggtaattttttcaaaggattacctgataaatttagatatcggagatgcactaagtctccaatcttgtctggtagtttcttaatgttgcaatgactcatgtttaatgtcctaagacaagtaagcttcaccaaaacatcacatctcagaggaggcggagcagaattcacccgatctattgttggcacaacaaagagtgttcgtaatgtctttacattcttccacggtgtcggacgtaaggtgtgatctagtgcttccaataccaaagtgtcatttcgctcaacatgttcacggtctatgagaaattgtacgaactcatacaccaacaaatgcatcttgcacttgatgatgtttccagcgtaatctcttgaacaatgttgaaacaaacttgcatctactagatcattgaagcactttagaccacttgatccatcaggacccatatctctgaaatagctttgtgacatccacaactccactacatcttctctttcaatctcgtagctttttggaaaaattgaacagtaagagaaacaaagctgttgagtacgagtcaaatgatagtagttgtgcaaaaacggaacaaatgcttttgttcctatttcactttgcaaaactctctcccaaccttgtgtagttgtttcgccgagcaatttgttagccaaaatgcttgcaacaagaggcgaaccgctgcatttgcgctctaactctgaacgaatgtctcctgattggctgttgatttccgcatctgaaagagaggctaccgaatttattatggaccaacaatcattttcagacaacaattcaaggtgaatcattctgtcagctccaaacatgtttgccacctggtaattttgcgttgtcaccaaaattctacttgatggactactggtcataaaagcacttattagtcgccgccacgggttcaatccagcactgccctctaagtgtaggcatacatcatctaaaacaagaaataatttttttctctttaccttctcgataaatgaagctactgaattttctatttctaaaaatacagcaggttgtcctagagcttccataatagctgccattattggacccaagtcatatttatttgttgcagaaacccaaatcattttatcaaacttgcttgtc

SEQ ID NO: 79175 - DNA, 1885 bp, Cannabis sativa
tcgtacgcggtggaggggggctggagctttggttgtgcgtggtggagagggggctggggcttcagtcgtacaaggtggagagggctttggtcgggtctgctcctccgtgcgtttgggcgaaaaaatgggtttggtttgagagaataggggacgaagagagagagagagtgacttttcaaatgagaggggtaaaattggattttagtaaaatgtatcccactttacaaattatgtctactattgtattaggtgtccaattttattatttattaagtatacaatttcaaatttcccaattttaaatacggaatgctttgtgcatgtcagcctgaatgaatgttggagacaaaaaacattacataatacgccaaaactttgaaaaaaaaattacaaaaatacgttaacatagaaaaatttttatttttatggtttgaactaagggtgtttataaaatagtcgattcaatccaatccacaaagtgtggatatccatacgttcgaattgaattgaattgaattgaaaaatctaaaatccgcacttgtacaaattaaatgttatttcacatacaaaaataatcgatccaatcaaatttacttatttatatttatttaaaaaattataaatatattagtatattttaaaataattaaaaaacctaatatgttgtacacataatttttaaaacttaatatatcaaatgaatagtgcagattaaaccggataaatatttcttgtttaaactttttatatacaaaaatgcaataaactagttgatattgttttttaattattttatcatttatttatagttaatttataattgacataaaattgattatattattatcttttttttattattattttggagtggatttacgttgtgatattactttcttgtaagtttttagatattttctcacactttattttttttattttttttaaaaaaataaattttaaatttatgaaaaaatgaaatttggatatctagtaactagctttttcataatctatagaagtactgagctcgtaaacttaatattaatacatttatggagccaacccagtcttgtaaaagggctaggagaccccacacactacttttaaaatacagaagactataatcagaccatcgtgagcaacgtacactactgcttggccggttgtcaaaatcagtctatgaaatacagtttcacgatgtggctcatgctgtcatgaagattttaagatcagcatatgcctatttctactttcaagtgtcgagttcctcggaacctgatcaatatgacagaacagtctccccaatagaagatgtagtctctgtgatcttcgccgaggctgctataaaacattacattttggttacagcccgtacatagaatcataacaaatcatatcaagtaggtgttttcaacaactactttctaaagctctatctgactgcagctatttttttttaggagggatatcctccctcgcacataacttctcaaattttgcaggtccttaagtagtcaatttataagccaattttacataaggttaagatagggttattgatggctgagggaagggtgggaaaaagggcagggacggactcactgaggagggagttcaaacaaaaaaatacattaaaaaaaaactaaatatttcccttttattttgataattatactacaaaatagtaaaaaaaaaaacttccacaaaattaaataaattatgataatatttattaaagtagacctatatattgcctgcacatagcaaaaattctaatcccgttgaaaaagagtgtgcatggggtcaacctaaaatccctgggttatgagtaacaggagataccatttatccaaacgttgcaatcaaaaaaaaaaaaaaaaaa

SEQ ID NO: 79176 - DNA, 7644 bp, Cannabis sativa
  modified_base (2216)..(2219): a, c, t, g, unknown or other
  modified_base (4627)..(4627): a, c, t, g, unknown or other
  modified_base (7595)..(7598): a, c, t, g, unknown or other
gatacctataacataattggtcacttaattttgtatcacactttataatagcatatacattatacatatgtgcccacaataagattttaatccaacattaaacttatgccttcttacttttttctactcctccctcaccactgaactaatatcgttgacttttattttctcttctctatatttatcgattagtatttatatttttcaaatttttttatgataatataaccctcctgtcttatattctcttatttgaaataaataaaaaaatacataaaatttgaaaaatataagaaaatctattatttgtaaacctttatgcaaaagactaaagtcagtaaacctttactttggtgatgatttaatcattctctgcaaaggagagagcaaatctgttcaaataattaaaaaaagctttcattatattcaatagttgatcaggttagctagctaaccacagtaagtctcaaatcttctttggaggcgttgagaagattgagaagaagagtatcattgagataagcaagttcgatgaaggtagacttcctctaaaaatagttaagggtcaccttgaggcctaccaaatagaaggaaagtgattgtagcccaataaattaaaatatcattatgtatctgcacaactagtctagtaggcaactctcttttgttgggcgtgctcatttgattcattatgttttgattagtataaggtgctattggatgagtatctttctgttacctcaaaagataattaaagagatcgatagattatgtagaaacattatatgggaagttaaaggtaacttgagcaagcttcaaattacttcttgggagatggtgtgtaaacccaagtgtttggtggaatgggctttcaggaaggagttaaatggaacaaagcatctctcgccaagtatgtttaggtcatcacaacaaagcaagaagatctctggataaagtgggttaatgcaatttatttgagaattcaagaattttgggagcatgagctaaagcttgatgttagttggtattggaggaagtttttaaccactaaaaaaagttctctcgagaggaaatcttagaagcaagcaagagtggaaaactcaaaattaacaaaatgtatggtaccttccaagctcattgtgtcatggttaatgattctcgagctatttggtgtctatgcctaagcatagatttattctttggcaagcggaaaatgctcatcttctgcctaaagattaggaagttaatgtagatttcttagacgttgcagtttatgatgatggcatagataatcatgaacacttcttctttcaatgttcttattctaagaaagttgttcaacatgttcaaaattggatgagaggagctatatggcctacatattattatgcttcgtggagctaaatcaactctaatggtcaatagaatattttgggagatattgccaatgttgccaggcatcaattgtttactttatttaacataacatgaatatttgtatttttaaaaagaaaatatttttcttgcctattaatgaatcattaggaaaaagcaggcaatgtttgaacaaattaatttactatagtaactgttttttggaaactataaataaataatgatatagagaaagaaaagaaagattagagatgatttaagacaaatatttttatgtgattggggcattaacaagccttattccacaagtcaactatattgagctcttgagcttcaccaataatggtggtttattatagattttggcaaagtttttcctcttcaattctaggtatttggattttatgctctaaataaatctaattttattgtaatattatttactttcaataaagattagaaatcatatcttgagcttgtcatatgctttgctcacatgtttattatgtgattataagtttaatatataagttctatttaatctcgaatatatagttattcacaattacagtgatgtcatcacagtagaaagttattgtaattatatgcttcaaattatttagtcccacgatttattagtgcactaaatttacactgacgtgataactaacgatgagattcgattacacttggataagtgaaatatcttttccacaacactagtaaagtaaaccaagattggatatattgggtatacatcagactggacagatattgacagtgaaaataatatcataaacttactgttatatcttttctannnnaatgtcacttagttgatcatagattatttgatctcaatcctaagatggttgagctctagcttaattaaattgcatgggttttttgacttgttcgttaccagcttacgcgtaggactagcccatacttacatctggagaacttggtagtgcaattgagtggacgcgttaatcattgatatggacatctataacttttatgtttattagaagtgaaacaatagtttcctttgaacttgactaaaggcgttaaatggttgaacgttcatttcgataattatattagtttctcaaaatatcatttacaagtaggtaaacattttaagaataaaatgcattgaagggtaaaatagtaattttgtccccattcaatgtaaacagtcaatagaggatcaatgattgtagtgattgaaacaatatataagttatagtgtatctatacttggtgtatagagtgctctatgtaatctggagtacaattctgaatctatagtggggttagaaaaaattaataaggtaggaaatttatcgagtaaatttcaagatttgcttcttaggagcttggttacataggcccatggtccccatattgtctgagatattattatcttgtagactcaattaattaatttaacaagtcaaatagaattaaaaaaagactatgtcttctttgaaaatttcactaagtttgggaaattttgggaagaaaagagatataggggtttatttgttaattagtactctttgcgggtctaataaataaatatatttaaattgtattttatttaaaaattatttataagggtgattattaaaataaaattagtatttgaataattagataagataaatgctaaaattagaaaagacactttagtttcattagttgaaataaagtagcaaaaatctaactctaaagctcatgaggaatccgatcctagagctaatttcagcacaagtctttattttaagctcatttcatctaaacctagccctaagttctctcaataaaaaaaaccgtagccctaagtgaagcttatataaagaaagtgatgagaagagagatctaacctaagtctcacaattctagtctgactaatttcaatgtcagacatctatcttctcttctttcttttgattttcgaattcattatagaattactctatctctaaattgttcaaaggtaaattgagtaccaacccacactattcaaggtgatactcagacatttgtggaagattatgatgaccacaatcaaaggagaaggagaatctaggttcaattttttatcatactctgcaacagaaaggatcaagggttaaagaactgaacagaagaagatattgtattttgctgcaaccaatgtgaggttttctaaactttatatgtgtttatttatcgttttagatttattcatatttaggtagttagattatagatttataattaacatacatgttagtaaatataaatcctagtaaaataagtatccaacactagaatccttttgaagagatgtaatgactttattcataggcagtcatgcatcttcaggcagactaatatgggcccaattgaggatttaattatgattttttctttaatggagtggattacctgaaataacactctttgttgttggaggaatttaaacaacaccaaataaaataatatatttaaaatataaatagaattacgcgaatggcgagtattcaaactatggatacatgaacattctggaaatataaagaacacaaaggaagtatagtggtttagtcagatcactgtttgcttagtccactgttgcaagggttttctgtcttgtccatttcatgttggatcactcctttatatacaaaacaagtgtcctttgattacacagagattgatttcattatcaacccatttgtacattcaatataacatttaaatcaataaaaaatgtaaatacaataaatgaagaacagtttcggcgcaattcactaaatacagcaacgtatgcgacttctatagtaagagttttctgttcatattctcgcataagctcccaggcttaagattcgcacaagactattcaactttgagatgtcttcgtcctgttcgagtcgcttatacggacatcctgcaataagtcgataacctaagacatgcgagtccttatcgggttgttgggtcatccggaccagctcgttgagtatagaagcgatctttaccacctcgtagggagatctttatagttcttgatatcttggtatatgtgagtcttcacccgatcttcagtcctgcttcgtgcgagctattcgaatgcgactagactctgtcaaggtcaaatcatcccgccgagtctagtttagacgaggtttacactcaagaggtctcctgctgacatctcagccctcctcgaggagantgagtccacgtgtcatttttatgggagcctggtctcgagtttctaggtaagaaattctcgctataacacacgcccctagtttcacaattgatagctatgtcatgagggaaactataagcgagaggcaggcgagaggttgtcatgagatggtgacttttggttgtttaatcgagggtttcaaaaagacgactgtaatcattatacttaacccatttggggtgccatgtcaccaaaactcttcggagtccgtgtaggcatggttatggataaccgttggattgtgagaccttaggcattctcttgccatgtgtctccatcccaattaatgagggataattgtatttaaaactcctgatacaaaatgatctttcatttcttttccctctcatttcattttccttctccttctttgatcttcaaatccttaaaagttttcctttacattctttttcacttttctttttccagaaaagaaattagaagtgtttgacttttacagaattgtttgaagaagatctacattttcaaggttagtggaaaagtttttgctactatttccttttattttgaaaatcaatctgtattttgtgtttcaagaggtagaaaatacatgagacaataggatatatatatatgagactttatttgctttttgacaaactatgcatttctttgggaaatatagacctgaaacttgaataatcacgagttttaggaagaacacctcgagtgtttgcacatttctcgttgagtattctgaatactcgtgaggttcgtgatgaacatcttgaatattcataaacacttctgaacaccagaaataacttagtaaatatgtactttggctattttaatccctattaaaatttagggtttattttttatccttcagattatatgtgcttttgtcgtgaaaactgtctaagtctttgaaatggtgggtgtgtcacagtaacttaatgttcatgcaggcatacgcatgttccttgggtcaaccatttgagacatgcggccaactttcactttttttttactttatagtcgcatgttaggactaaccaggtttctcgaaatggtgggggtgtctcattaactcaatggttatgcaagaagtgcatgccacttgggatactgggaaacccccagccatttcttgaggtacaccattagttgtacatgtgcaacttatatcttgcgaggattggctgagttctcgaaatggtgggtgtgtctcattatcttaattctcatgtagcgacatgatcattatgttattgagatacacccaaccatttcttgagatgtttggttaatccttttgaatcttttttatgcgagtgagggcactttgttattctcgcactttcaccacattgaaaaaatcttctatctttcagataagcgacttgtcggatagctaaatgctcgactctggaggtggggcctttgctgaagagctggagaagagcgacaacttcatacccacctcgatttctgaggaagaggcccctgctgcccgagctcgtcagagcttgctatctactaatgagatagataggatggtttaggaactcgctgaaacagtgacggttgaaattcacgatagcaaatctatggcgtcagctcaagagcatctcactcattcgagacatgcccctgtcatcgaagtcaaagaaatgggagaagacttcgaggttcctaatcgcgagtcggaggaggaagaaggtgttgagggtagtgagatggattcagttgacgacgctcaactgaatgaacccttttcatgcgaggatctagtctcgcgagtcaccaaatctgacctgcatacatttgcacggtagaatttggatccaatagggaccttacgtcctttagcatctcaaagacctcactttccttttaccaaccctgcgattatccccacacaagacatggtggtttcgatccctattcttcgatgtggggtaactttaccctttcatccatttgtcaaggctatcctcaaacattacgatgtctctcccttccaattaagcccgaatagctatcacataattctggagctttatgcgatgtatatggagtatgtctaaggggaaccaacgatggaggattttaactacttctatgacataaaaaatgttggccacgacaaggacttttactgttttagtaaatgggtcaattttgagattagcagggtagaaggtatggtttccaatatgggagattggaaatctaagtggttctacgcgtttaaagtactaggagttaagactgacttcaatcgtcgacctagtacgtcacatatctcaacatttagtatatattgttttaccttgcatagtcgctaatgtttgctttttattgatcgcagataggccgactcgacctgtactggattctgctcacaaggaaattgccgaagttctaggtagcttgcccgtttaagatcgcgattggcgattgttatgtactactataaaattgcgagaacacaagcttatacctgagaaagctagccttcagcgagaaccagtgtacaaggagccttctgaaaaacaaaaggaaaaaatagacaagcgtctatctaaacaaacctcaaaaccaacatcaggtagtacatcgaatatgtacaggttatttcatataataaaggtatacttatcttatggctttctcgtagaaatgacgttcctgaagcaggcccccattctcaactgaaagcctaaggttagaactgtgacaacttctcctgtcatcttgcaaaagagaaaagcgaggttattgtgactccaatggctgactcctctaagtaggtaaaaattgcccaagacaaggggaagaaagtcatgatcgaccctgctgttagggctcgcaacttcataaccctccaagacaagttcgtgagcgatgagtttgtgtccaaggtcgagggggttcttgctgttatagtgagatttctctnnnntagaaactcgagaccagactcctctttaaaggacacgtgtattcag

SEQ ID NO: 79177 - DNA, 4984 bp, Cannabis sativa
gactgttttgaaaagaaagagtctgaattcaattcatcaataacagaggagaggcaagccttttatagcttggacctcattacaacccaaccgacttaaactgacttgtgaagtttaggtaaaacaacaaaaaataacaagcagtagcagtaaaataaaaggcactgtaactatactaatgtaaagtttaataccctcccttcaagatggagagtgtatgtcaaaaacggacatcttggaaatatgtgtgttaagtattggagatgtcaaaggcttggtgaaggcgtccgcaagctgaagagtgctggaaataggaataagtctgacagtgccattgttgattttgtctcggatgaagtggcaatctagttcgatgtgtttggttcgttcatggaatgtggggttgttagcaatatggatggcagagttattatcgcagtaaataaaagcaggatgaggttgagggatgtggaaatcattcatgagatattgtaaccaagtaacttcacttgtcgtggcagccaaggcacggtattcagcttctgctgagctcttcgatatagtgggttgtttctttgtgcgccatgatatgaggcagtctcccaagaaaatgcagaaccctgttgtggaacgtctagtgattgggcaagaagcccaatctgaatcggagaatcctcgtagatgcaatgaggaagttctagaatacaagagtccttgtccggggtgtcctttgatatatcgaaggaggtgatgggcagcttgaaggtgcgttgtacggggggctgccataaactgactaagggtgttgacagcaaaagtgatatccggtcttgacaatgtgagatagagaagtttcccaacaagttgtctaaaacttgaaggattgtccaaggcttcaccatgctcattgtctagtctcaatttaggatccattggcgttttactgggtttgcagccaatgaaaccagagtcttcaagtaattgaagggtgtatttcctttggcaaaggaacagcccttctttggcacgagcaatctcaaatccgaggaagtatttgaggtctccaagggccttgagtttgaacttttgatgtagggattcttggagctggtgcagcagtgaaaggttcggaccagtgattataatgtcgtctacataaacgaggagagctatgaaattttcttcggttcctctagtgaatagggtgtagtcggcttttgattgcttgaatccttcttggagaagggcatcggatagtttcttgtaccattgtcttgatgattgctttagtccatatatagacttgtgaagtttgcacacaagattagttcctgcagcaagagaagaaaggaagaataagtccttgaggtatagacatataaacttcttcgttaagatctccattaagaaaggcgttatttatatcaagttgcaaaatgtgccagttcttaacggtagatatagcgagaagtaatttaagcgtaaccatcttagcaacgggggaaaaagtatcaaagaaatctagcccttcttgttgcgtgtatccttgtgcaacaagtcgagcctttagtctttctatgctgccgtcactattatatttaatcttgtaaatccatctacacccaatggctcttttgttggctggaagagggacaatagtccatgtcttgttgtctgagagagcttttagttcacattgcatggcatttaaccatgctatggtctgtatggcttcaaagtatgttcttggttctttgatagaagaaactgccaaaataaaagctttgtgagtttcagacagattagagtaagatataaaattattaattttgtgtggagtggaggaatgatcttgaatgagtgaataacattcaaaatctttaaggtattttggtggctttgactgcctatttgatcttcttggaggatcctgtgatgattgtggtgtgtgtatgacagtcgtttctggtggaaatgcagcaggttgttggatttctatgactggtgcgtctggagtgatggtagaagcagtgtcttcttcagattgttgagtattagcttcattctcatggttctggattgagggttgtacattattactagagcctgtaggatactcacagatagagatgtcaggtatagtagcatgaggaagaacaattctagtgaaggggtctatgtcactctgctcagtattaagttttcgaaatggaaatatgttttcatgaaacacaacatttcgagatacaaacacttgattattgttgatatcataaagtttgtaacctttaattccttggggatatcccataagaacacaagtacgagcccttggagaaaatttgcttctatgagcagacaaagtagatgcaaaaacaagacatccaaaggaacgtaaatgttgataatcaggctgtttgttaaagagcagttcatagggagttttgttggttaatagaggagtaggaactctatttattagatacgcagcagtcaatatacattcggaccaaaattttataggtactttagattgaaaaaaaagggatcgggccacgttgagcaagtgctgatgttttctttcaacaacagcattttgctcaggtgtttcaacacaagagaactcgtgaatgatgccgtgtttagcgaacaaatctttaaataccaattctggtgcattatccgagcgaaaaaccttaaaaacctgctgaaactgagtattaatgtaagttaaaaactgaggtacaataaaactaacgtcagatttttgttgcattaagaaaacccatgtaaatctagaatagtcatcaaccaaagtgagaaaaaatttgtgatttgtgtgagaaacaatgtgataaggtccccaaacatcacaatgaacaatatcaaagattttatttgaaacagaattattttttggaaaagaaagtttcctttgtttggcaataggacaaacatagcaaggtatacttttgtgtaaatcagaaattttacaattcaaagtgtctttaagcaaattcaaacgcttgtttgataggtgtccaagacgataatgccatgtctcagctgaaacagaaagaacatggttggaatttggtctagtgtcaagaatatagagatctctcacattactacctcttccaatcgtcttcttgttggcattgtcctgtattgtaaaaccattagtagtgaaaataacatcgatatgggaattgttaattagataactaaccgacacaatgttatatttgaaagatggagcatatagaacatcggttaggatcatgccatttcctaacttgacagtaccactttgattcacaatgagactttcattattaggaagaattagtttagttgaggggatcttacatatacattgaaagaatttgacattagaacaaatatgtctagttgctcccgtgtcaacaatccaagaaccaagtaaaggaggattagaattgtgtgatagtatgatacctgtgttacccatggatgcactaggatcattagtattcataccagcagattgagtggcaagtaaattcagcaactgttgatattgaaccgtggacagctgaggaagaaaggcatggttctcattcgaatttgagctgttttcttctcctgtttgaacctggtttgcagcaacgtccttgggtttattttgcttattgaatcccggcggatatccgtgaatcttgtagcacttctcgatggtatgtccatgaatattgcagtgtgtgcaaaaggggcgatttctctttgacggatgagattttgcagcttgattgtcatccttttggttccctcttttatcaccttgaagagcaaaagccatagcagaattgttgctgttgggattagaattagtacctctttgttgctcttcttgagttacaagatggaatacccgattcacttcaggtaatggatccataagaagaatgcttcctctaacttgagagtatgaatccgagagtcccattaagaaagacataatgtactccatgtgaaagtgatcttggatccttttaactcctccacaagtacatccattgcaagtacatgaaggcctataatttgctagttcttcccatatcgttttaagcctagtaaaatacatgcttatagtctgattttcctgtctaagattcatcaaatctttcctcaaattatatatatgaggaccgtttttctggtgaaaacgtatctttaaatcattccaaatagccgaagcactctcatcataaagaatacttgatgaaatttcttttgagacagaattcaagatccaagatatgactatattattgttacgataccaagcattatagagatttaaatcagaaatagggggtttagagattgaaccatcaagaaatccgattttgttcttcactgaaattgcaagctgcattgccctgctccatggaatgtagttgtcttgtcctgtaagaggttgagagaccaacgaatttccaggattgtctccatggtgtagaaagaacggactcgaagggtcttctaaaggattcttgatcgaagtgacttgaagaccttgattattttgagtagaaagattgtcaagatcgacaacagcaggagttcttgtttgatcttcctctgtagtcattgcgcggaatcaatgtacagaaagaaagaaaagatcggagaagaagatagagtaacacacagcaaaccggagaaggagaacacggcagctggaaggatcggacgggaaagcctatctttcccgctctgataccatgttgagaaaagagagaaagactgttttgaaaagaaagagtctaaattcaattgatcaataacagaggagaggcaagccttttatagcttggacctcattacaacccaaccgacttaaactaacttgtgaagtttaggtaaaacatcaaaaaataaacaagcagtagcagtaaaataaaaagcactgtaactatactaatgtaaagtttaatac

SEQ ID NO: 79178 - DNA, 6699 bp, Cannabis sativa
catatttcactatagttggccaaaaaaaaaagaaagacatatttcattttatccttaaaccaagtggagaaaaacttgggcatgttttgtgtaataatttgaggtggacttgacgcgtagtttgctaagaataaaaatgttcaaaatggagaatcaagtaagaaaagaacgaaatatgggtatgatttaggggtatatatgatgtgtatgtagttcattatgtaatgatttgtttcactaattctcttactaaaagtatgacacgttttgattcaccgtgttgaattgatacattttcttttttataatggtgcaactattgagggtatttgtttatcaataagaatatgcttaagggtatttagtataactttaatttgtatttagtaaagaaagaagaattacctcatatcccttctctccacatgtagggatcaattaagactaattggagcacgcaaggtacaatctatgtcttagggtcggagtacactatgtacctatgtaaattttctattaattcacatttcaaatttcaaattattttttactaattttgtgtagtgaccttcatatgagccctataattaatatatatatatatatatttataataaagtatttattagtctccatctccatctagatctatgtacctacatttcacctaatcactacaatttatttatgtaatttgtaaaaaaaaaaactacttattatcctaattgccatttagagtattcctattgttatatttaaatttaaacattgatgataaagaatacaaacgctcatacccaattaattatcattaaccaaatataggcatgtcaagttatcaatgaacttacttatatatttttttcttcttttttttcccttaaaaagaacagcttaattggatatttggtgatagtaatatacttagaagtattaaccgcattaatgttgtgtctataatagcaaaaatttcatgacagctcagctcattgctctttcattcaatcccaaattacgaacgatgaaaagattaggatggatgtggcggttattttatgttcccgatattacccttcttcgctatgagtatgagactctgatggtcattttagtcttttcactcattttcggtatagcactgtcctgcgcgggaagtaagtatgtataggtatatcagatctccatgcccatttgtttttacaattttacccttttcataaaccaattgacgccgtctctgacctgaccctttgcaaatccagaaatgaatacccaaacctatctattattattcctctctcctcttctcaagcctttcaacccaagcaaatccaatccaacaccatttaataattttttccttttcacattcaattattagaaaaatatttatatatttaaaaaaattaaatgaaaaattaaaaaagaagaggttaaattataatgataataataaataaagttccattaatggcctgggctccgacatgtagcagtagtcgtgcctcgtctatgtatgtatttgtgtgtatttgagtttacccttctttcttcttttgggtttctcgatgtgtgtgtcgtttattctcctccgtttgattccccggcggtcctccattctccgccgttgatttgatcttcttcctactcctctctcggtgtggttttctttaatgttatgaagctcattggttattgcttcttcctcttctcctctattctatcctggttccctcttctttcatggaactcctccctcctagaaggttctatatctttttctctctctgtacataattatgtatgtatgcatgtttaattttgtagttaataatggtgaattgggattgatgaagcagtgattgctggtaatctggccttaaagcgagactttgatggggaatggtgataacgggcgctgcatattccctctcacaagtttgcaaattgggtatctatgattccattttaggctttttccttttttaaaattgttctttcgattatcatttctaattgtggcgcatgtttctttgaagatttttctgggacaattcctttcgaattggaacaatgtttaaatttaagaaaattgaattggaatatttccatttaacgtgattgaattggatatttgccttctattgattgggttgaactttcttggaatcatgtcattctgttgattgatatctatatataatacatatatatttcccttaagttcatttctcgattataaatttatgaaaaggttacaaccttgttgaattgcacacacataaaaacgtatgataaaatctaatattgcaccatcaatattgtaaaataacttgactttttcttttcttttctttctggtaatgtggttaagttaaatttaattgccgttcattctacatttttagtttctgtttgtcgacgaaattgtaagcatttttttttccttgtctgaggcatattgttcttcacatgattgtattgcagagatttgcagtcttacctttctgatcttagcctcttcctggcccttaaaagtaacaaactttatatattggtagacaaccgaccatggctgagagacagaggttctcgtccggcacacttgtggcagttgatggttaccaaggtttctataagcattttgatagcactgtactttttttcagtcccattctgtttgatagaaaaatgtaatcacattgggttcatttcagtcaaggttatctccttttgccaacaccaaagcacggagggagaaaaaggaggacaaagaggcttgttccaattccagtgatataaagccaaagacacttgataaatggtttcgactaattgatgcgattacgttgtctcggaagagggttttgctacctgtgaagaaattgcatcaatcgtcacttttaagcagagagctgcataggaccttgtatggcttcatagtatttgaagttgcatggagcaatgttcgtggtatcaactatttgaatgagcttcaggtactacgacctcaacatgttttccttcttctgtttgttgtaatcatttatggatgtagtattttattattttcttttcttttgcagactgataccactctggccatagaggctaaattcatgcaaagatgggaatttgacagtattgctcaagcagcaaactgtatgtcatcatggttttcaggaacaacctctgaaaagctgttgttaaaagagtatcttgattctgtagtaggtatttttctcatgattcctggtttgtttgcaaagataattaaactctgttttcttttggagacatctaggagtttctgctttgaaattgcaatgttagagggaagatcgattctattcttgggaaatctgttattggcttttactttttattattctgtgactatgtatgctcgtgtggagttaacttagaacgctcattgcttgtcgttaaaaatgaattcatttcaaatcacatatcttgcatattgacaaccttgctataacaccaaaatacaaccaaaaattatgtatattcatatacataatctatttatagccaactttttaaacatcccttattataggtgtgcgcatttacaagttttctgacaagcttgtaatgcaagataattaaacacttctagctgaaaatagtgagctgcttctgacatcaagcgttcatatcatgtataagttagtctgttagttcattgaaaattatcgttttccagtaatctttcttaatctaagtcaacaagtgtttgattagacattttacaccacgtagtagcagttggaatttctgtttttgcttggagtgcaattggaatgagcagtcagtgacaattagtcaaaattttcaggagacgtcttctatgatacgaaggaagattttttggattctatatctgatgatgatgccgaaaatatctgcaatgatagtttgtctattgaggatgattctctcctgagcttgggtagcaagtttggtgtatcatctgtatctgatgttgatgaaaatgatgttcaccacactccacctcctctctgtggaccgtggaaaagaaggaaagtaacaaactccagcattacaagtgaagaagctggcatgtgtactgagggaatcaggaactcagagatttgggatgaaaatgatgtggaagctacccagtacatggatgttttaattttgttccggttcaatgaccatgaccttccatttactctaagaaaagtaataatgtctgacttgcggttacttactttattagaggccgggcttccatcttgggttcttttcctacagtcatatccagtgttttgccatctctatcgaccatggatgtgcccgttggcaagagctttatatgtacttatctctgttgtaaccgttcttataggattttatgatttgtacaagaatgtcccagttctgaaggctactgcgtctcgattgtttgggcctttttttgactggattgaaacttgggagatgataacacggattaaatacttgggaacaatgctatttctgcataacttccaaaaggctgttaattggtttcttacgattaggagcaccaccagatccttcctgtcagttctcactcaaccactagcagagccacttctagaaattttggagtttctcctaccagtgtcgaacgtgatgattgaagtcgtagaaaaatttttctcagttatttggattctgatcgggtcttcttgcagtcttgtggagaacgtggtagagatgttcctgtcccccatatggtttcttgtctcttttatctggagtgccagtaagtcagtggcttcttttcattttcatgtttctgtttgttgtagactattataatattgccaaaatagctgcatggtacatcaatttttttggggctcttacacagtttctgttgctttatgatttgcagcaatatcaatattattccccatattttgggttttttgggaattactctatgctccagttcgcattgttctggcgtttaccactctcatagtttttgtttgtacctctatatatgagatgcttggggatgtatgggagtttattagtagcataattcagcttgcatctgcttctgaggcaacagtgagtacgtatgaagtttctatgtggcgatcactttggaatgacctattttcccaggttaggaaatactgattacttctctctttgatgtaggatatgattattttatgtttttattcataaccatgatatttctcctctgttgcagatttttcgtgctgtcaggagtatattaaatggttttgttgcctttttcacagcctgcaacaggcatcgcctgaggtaagcttattgtattgttgaaaagctgtttttgattcaatgaagttgttgtatatgcccctattttgctttctagctaatgtggtgtatgttatacactgatctttttcttgtggatttggcttttaataaaattgattaagaatatatctttaattaagaagtatgaatctacaaagacaattctttaattatcctcacttatgcgtgctttaacttgaatatgtttgtggacactcctattgatattttcacttccttgcagcgtgctttaacttgaatttgtttgtggacactcatattgatattttcacttccttgcagcatagccactgtgatcttaaagtgttaacgatctgagattattttaataatattgattgaccaatctcactgatgatgtttgatgttatggcatacagcatttataatcacttactggagttcattggaagattatttggtcgaacccagacatcaaggcaggaaggctctagatcaagtagacctaaaaaggagaatcagaatatggttagtactttatatgtttgaacttgtgcattttgagttatatgcaccagatttcagaaagagtaacattaggcatgggacacacacacctctcccataaattaatctatatcttcaagtgaaaaacattatctgaaaggtagttcactggcaattaattgtaaggtctagctctctttgcttgattaggtttcctactgagtcatggcaatagtttcttttttatcgcggctaatagttcaaaaaatacagtttgggcacgccactaacataaggtagagaataaactttgtttcaagggaccaaaggaactacttgcacatttaatgatgcatccattggaggaaggaaagttaggatcacattgattcatttaacaataaatacattccaatattttgcacagagaaaataaaatattaaagcgagagggaaattaagtccttttatcatcacttaacattggactcaagggaatgcagtagattttaaaagagtgtattgtctgtcatgtgcgtctgtcatgtgcgcctcaatgctccccatgaataaatgtgttgctaatcccccttttattgttgttctcacactgggattgtactttcattaggctcttcaataatatcactcccaacatatgtgcttgttctgtagattttattggtttttgaataagtcaatacacatgttctcatgcaacattctttctctttttctttttggcctgcagcaagaagtgaggaggaaacttcatgtaaactagacttgtacaactatcctcccaaagctaacgaatcgactaggcacttctcttttggtagtgcctgcctgtgt

SEQ ID NO: 79179 - DNA, 3549 bp, Cannabis sativa
  modified_base (2885)..(2890): a, c, t, g, unknown or other
acaagagccccatccaaggatagattttccagaaaaacattgcgacccttaacaaccatagtggacctttgagatattgagcaactaccactaactttctttttgatatcattaaaggtgagaccccatttaggcttccatgtgatacgaggccacacttcaacctcctgtccattgaagacctctagtacaggatcagctacataaacaccagcctttctaagaatgtgactattagcacggtagatggccatttctccagaagtggcactatgatacggattaccctttggtaccttagcagcatcctcagggttatttttcaccggtgcatatgcaaaccatgcatccattacggtaaatcccactctagctgttggaggcagtgtttttgggtaatcctgcatcatacattccagccttgttgaagatttaaaggaagttttgcttgcatctttatactttggattaacaaactcctttatcccacctttggtttttgtgagctcctcaatataagggccgagttctaatataagttgattaatatttcccgggaaaggagaatagccggtttcagatgagttcacatctccatcaggatattgagaagaagctctaagcagaggatcaagctggttatactccacatttatcaccattgttctcccatcattaatgtgagtaagtttagtaatcccaccaattgcttcttttgcttttctaggaacagctaaagagttgacatggtattgtctagtggcacttacacctattgctgctggaattgcattgaaaagaagcccatttgtgtcttggaaaaatagtacccatctcaaaccagcatcatgccaaacattgagtaagccactagagaacagaagggaatgcacatcaccatggccatgaggtttagtctgaattctatacttgttttggggatccaatgcaagcctagcttcattatcgtctaaacaagcaactttttcctgtagttaaaaattcatcaagtatattacgagtgctctttcatcagtaagactagtaaggcatcaataattgaatgtttatacctgcttcaaaagctttacttgcttaggctccatcccaaaataagaattcgactccaaaagttgcagcgtacgagcatgagtgtcatcagaggtcattattacaaatggaataatctttttttcaccttgatctcctaaagatgattaaaaaactacatcattactcaatatgagcattaaacagaatttgataacaataattgagtttaatactccaaatttaaaccacaatatagtatgtatctgaccttgagagagattataggcatagctagcttcttgtaatgcaagaacagattcaatataatgttgtagaaagcaaactcctgtagtagtctctctaggaagagccaccttaattccattatagcctaaacgttccccaagtccaccagctacaaggacaaatgcagctctcccaacttctctaatacccatttcctcaaatttgatgaagttatcatcaccaaaagtcaagatatcaccttctggaactgaaggtgtgaatccatcaaatgggtttttcccagcttttgaatctgctaaaagttctctagcagtctcaatgtatgattccaaaccacctgggtaatttgcattgagcagagtaacctgatcaaataaagctctcttttcatcgtcatcgactcctggttcagcccaatgctcgaacaaatgactctgtcccaactccaacaatgtcttggcaatctcaacttggtgaggagaaagcaggtggagatttttctcaagattaggcacagatgccaaatctccattggtatataggttggaagccattgatgatgaagatctggttttcaaagaaggtttagaattagaatatgttatgttggattcagcatcatcatcatcatgaagcttagaattaaaatcaatatcataaacacaaaagacatgatccccaatttattataaagaatttcaacattgaaaacttgtgtctgatttactttcttctaacccaactttacaaattgaacactttttcgaagcccaaaagattatttggcatatccccatcaaatataaacttacatataaataaatttacaccacagaatcatacatatatatatataaaccggatttagagttaattacctgatttggtaggtggcagaggagagctagatctgaaattgtagtagaccagccagtggatgggttctggagaaaggagcagaaggaaggaatgaaagagaagagatttgattctgttttagaaacgtaaattggtccacaaatgttgagtctttgattaaatttccctatttttgctcaaccaacattattcgaagatttcttccaaaagaaaaaaaacattattcgaagatgaagatgaagaactggaaaaaagatgtcgcatcgtatcaaatcctttcgaatatatatagaagtacgagggtgacgtgtcattctaatattacttcaaataactttatcttttatctccttaatcttatcttttatctttaattctttctttttctttttttttttattttttattaagtttataaatatttatttattttcttatatttttttatcattttattattaataattatattaattaataattttaggttgattattgttgattatatatatactaatctaacaactaacatcttattatctttttggaaaattctacaatgcacattcttaaaatagatatattgatgcactcctatctgttttagcatccgaaataatttttagtcaaattttttctcatagtcattacgttatagttgtttaagacatcctgcaaaattttannnnnnttaaaaaaatttaacatgtcgaaaattatgttcaaataccgtattgcacgcgtgacaattttattttatatgcgtgtaaaatagactgtctgaacattgttgtacatgaatatgaaaaaagactagactaaaaaaattttctggatgccgaaacaagttaagggtgcaccattatatgtaaaatcaccctatctttttttatacgttcaaaatataattttttaaaaatatctaaccccactaaatattccaaccgtatgtataccataatatcttaaaaaaaaaattgtttatctaattcaatcaattattcaaattatagaagaatatcgattattaatattaatatatatttttatctttttttcttcattcaaatatttatactctcttagtcgttctttctattttctactatatttttgttctattgttgaatgttttatgcagatagttaggtttcgtttgaacaacttgctggaactgagattcaataattattaattgcttgatgtacgtgtgggcacttcaatgaatgcgatgagcggtatcgatagacgacagataattttttagggatatgattttgtctcgttattgtacttttacggattgtaatccgtgatgtacagcagccgtcagatgagggagttatttga

SEQ ID NO: 79180 - DNA, 2531 bp, Cannabis sativa
  modified_base (2356)..(2364): a, c, t, g, unknown or other
ttatatgtgtttaattatattcgtcttagaagttcatatttaggtttttaatcaacataaatgtgagtagatctaaggtcctggtaaaataattccaacaacatgggcatggaagaatttagtattttgatcgccactttgaagccaatctactcaagactgttactgttatttcatgagtgaagttgttctaacagttgcattattcatgcttgtaacttgttgttgtacattgaaaatattttttttgaagttaccaaattttgaaacatgccatttgtgtaaggaaaagtcacaagcatcaatcttatgcaaaaaaaatctccatggcagtactcgaagtaggagtcaaccattgtcgttgaataatggaggaagcgtcttcatgttgtagccaaatttattcaaacttgaaccttgtgctactgaagtttaacatttttcgagttgactatgactgcaatatctctatggtctgaggtgtagtagtccaaatgatgagtcacgataggatcaaatttggaggtccaaaaatcattcacaaaacaccagtccaacctctctttaattgtatccatcgaatgttttccttttatctaggtgagcgagtctccttcaaatagttgttcatttagatggcatttgtcaatagttcattgaaaatgatccatttgcgcttcattgcatagagcacctcccaatttattatcatttgataaaatatcattaaaatctcctattactagccacagagataaatgtgcaacatccttaagtctatccaagagagtccatgtttgagaacgaagttgagtggaaggagctccgtaaaatgcagtaaaatgccattgtgagtgatttgcaaaggcaatataacaatcaaagacatttttattaaagtttagaagtgatacatctacatcatctttccaaagcaacatcaaaccactctcaagcctactctagggacttgaagtccattattaaaatgtaaaacattacgaaagcgagaaataacattcagacctaacttagtttctattaaaaaaagtacatgtggggatttctctttgacaagcaaatggagatgaccaaatgcgcttagattccccaatccatgtgcattccaatttagaattttcatggttgtttatggggctaagtatcagtcgttgctgcattgtcaaaggagccagtagaatccacaggagcagcagaaactatctggttttgttcatcttcagctgacaaagtaggagtgaacatggggagttaattactcctgcacctcttgtgggtgtatcgaagtgatcctctctcaggctgtctcttaaagcttcaatttagagagcaattctcctttccatagttccctactcgagtggatacatcaactgatggagaggatgtagcattggaaaaaagatacattcaagttagttttgttttaggtcatgatattgtcaagcaagggtggataagtagcaacagtgttaggaccattgcaaagtcctgtcagtggcatataatgcctgataaatcagtgtatatatatatatatatttgattttgagtttgtaaaggtgtcatgggcagcaacatgtggatcggctgctggtggagcaattgaattctatttttttttgtttgataaagttcatggtttcttagttggtggtgcaaaagtgatggtggaattggataattcactagtgtcatgagtaacattatccagaggaaaaaatgtgacaaagccaggacgagcgatttcagccgtgttggagagagtttccattcgagatatgttatgttggtcttcatggtttgagatcaaaccagtagtttgtgtgtttaatgcctcattgttcttttgttgagaagactctccttgaaataattgccttgggtgtggttgagattggccattgagtaagggaactgccaagatcagaggacagatcagagaagtcctcgccaaatgagtgagtcaaggccaagcattccctattgcaagattccacagaaaaaaggaacaaatattgagggagaaaaagatcatcaattatattttgtatcaattatatagaaaaatatcataataaaatagactcgtggagtatgcagaattaacaacaaaaccacgtaaaatccctagagttatttaataatttattactatctatgtgatatatttattacgtaaaggcttattatttttagttaacgaaaatctgcattaacaactgatatgataatctacaatatagtttacttgcaccttggataaatgctatgtcctttttagagcattggttaaagtaagcttggattgaatgtatggagtatgcatcggaannnnnnnnnattgaacttggataagatataataaagttactgtaatatctatcttattcaatatcacctagttgatcttagatcaaatgatctcaatcgtgagatggttaggttctagttcagttgtattattcatgttcttcaatttgtttgttaaattcgaccaatggatcttc

SEQ ID NO: 79181 - DNA, 1915 bp, Cannabis sativa
tagggatgatacattattgttatgtttattaatttttttttaaagaaggaattgtgtatcatttaccatttatattttacgacattttttataatttgtcataaataaaaaaacaatggaagtggtccttacacgtttgtgttatacacgtggagttggtggattggttggaaattaccaagaaaactgaaagaaaagaaaaaaaactctccaaaacagcaaatacacgataatgcttagctggcaatccactaatcaacggccagaattcactgacagcaaattttgctgacgtggaatatactcgctccatcccttaaagcctcaatcattgggtactctctgtccagaaattctctctctaaccattgaatcatatagcaaattttttgtaaaacaaaaagaaaaggagatctcttattttcgatttgggtttctcagaacatcaaagccaacgattgttttttaagttataaaagtaattaaggagatcttgctctctctctcaaactcgataaagaacaaaaagggatttgttttgtaaaagaagcttttttgaaatggttttgatgtgtgagatatccattgttacagaagaaaaggttgaagaaggcgagtgggagaaggagagataacacaaacccatacgaagccaagttcgcagaaagcagaagacacacaaaaacgaaaaacaaaagaaaatcaattattggggttgttcattagttttcttcttcttattctctgcttctctgccggtactaactcttcttcttcttcttataaaaattaaatcttttgttgttcttcctctgtttatagattatatctgagacgggtcatttgaaaaaatggatttttgttttcagaaacagaataaagttcaaaacaatttggtgtttgattttcagggttattggcaatgtcaacaacaatagtaaccgatccaatggtgatatcatcagccccagaaagtcaagcatcaaaactggttgttcaagccgaaatcgagttcgccaaatgcgactgctgtggattaacagaggagtgtacaccagcttacatagagcgaatccgtgaacgattccatggccactggatttgtggactgtgttctgaggctattaaatatgagattgttaggtccaagaggctacttagcactgaagaagcgatgactaagcacatgaacttcttcaagaaatttaaggcctctggctctactcctccacctgatcccacaatccacttaatttcggctatgagacaacttctacgtcggagttttgattctcccaggggtttgagatcaactccaagcagtcccatgtccaaaatcgactcagagatttgtggtcctggccttactagatccgagagttgtttttctactttgacacgttgatgtgtaggaaaaacaagaatcaaagtgggaaaatgttcttttgtggatttggaaattccattggcaaaaagccaagaaaaacttttataagaaaaaatgaaaaaactagattttctgatcatgtgtagtttgtactagtagtgatcaataccataaaaacttttctattttgatcttgaaaatcttgttacgtttttgtttcattcatacattaatttctctgctttttgtttagcatagagaatctgatctgatctgatcatctgatctttgattagtattaacttattcgttcttgtaaagagcaactaactttggctaattaatttgttatgaatttttctaaattaggaataggagacatgtgatgaagcatatatttagccagagattttttgtattcttgttttttgtttttttgtatattcttgtttcactgatcattgttatgctgtcagtagtgtttttttttataaacttaatattaaatttcaccattaactataatac

SEQ ID NO: 79182 - DNA, 2908 bp, Cannabis sativa
gtaaaatatttccaacattttgctctagccttttactactgctgatgtagaaaatgctctccattctatgaaactagataagtctaatggggtggatggaatgtctgcaatattttttcaaaaccattgggatattgttgggcctttagtgacgcaaagtgttcttcaaattttgaatgagggaggtgatatcggttcaataaattctgctttgatcactttaattcctaagattgaacaaccaaaacttgtgagtgacttcatacctattagtttgtgcacagtgatttataaaatggtctctaaaaccattgctgccagattcaaagatgctctacctctagtaatttcacaaaaccagagtgcttttcttccaaaccgtcttatcactaacaatgttcttctagctttcgaactggttcattatttgaagaataaaaaatgtggttgcttgggttatactacacttaaattagatatgagcaaagcctttgatagagtggaatatttttttctatgtatggtaatgatcaagatgggctttgatataacatgggtgaatctggtcatgagatgtgtaacatcagtaaaactctctttcaatatcaatggggcgataaaaggttcaatggtgcctcaaatgggtcttcgccaaggtgatccattctcactgtatttatttcttatttgttctaagggactctcatctttgtggaagaatgaggaaaattcaagaaatttaaaaggcttatcaattgctcgaggtgccccttctgtgtctcaccttttatttgttgatgatagttttttattttgccatactattgaagcctcttgtcattgtgttcatagagttcttgatctttaccatcgagcatcaggtcaactcctcaacacagataaaacagacatctccttttcaccaaatacttctcaagcaacaaaagactgttttaatcatgtgttgggtatgcctatttgtgctttagatgaaaaatattttgggcttcccttgtatgaaggaaaagataaaaaaaataactttttagtggtatcaaagatcgaatttagaaacttacgaatacatggcatgctaaacttttttctattgggggtcgtgaggtactcttaaaagttgttgttcaatccataccgacatacgccatgagttgctttagcctccctaaaaaaatttgcaatcaagtggagtcgatgatggctaatttctggtggggctcgaatactaataattccaagattcattggaagaaatggaagtttctgtgctcttcaaaagctaatagtggtttgggatttctctattttatacatttcaatcagactctcctcgctaagaaatcttggagaatactggatgatccttcctctttgttggctagagttcttaaagcccgatactataagaatggtgactttctttcggccaaaaaaggaatcttaccttccctcacttggcaaagtatttgtgatggtaaatagcttttgttgaaaggtctaagatagaaaattggtaatggacaaaatgttagatgtcctacggatccatggctgtcgggtaacattaccttcaccccttactcctatcgtggtgatcctctctttacggtggctcactatatctccactgatagaaaatgggacactaggattttgaagaatcattttgggactattgatattgatcgtattttacctattcctcttgctcttattcctatagaggatatgcttatttagcaccacttggacacaggtttatacactgttaaattgggctaccatttagcaaagagtttggaatctatgaatgttcactcatcgtcaagttcacattgccaatggtggaatcatttctggtctttaaagttacctaaaaaagtgaaaatgtttgcttggcaatttaacaatgatgctcttccaacatcggtgaacctggcgcataggtagatatctacttcaactacttgttctctctgtgtgtgtgcttgggaattcgttggacatgcaatctttcgttgtgttcgtgctaaagcggtatggaaaaaatctcacctcaatgtgtttatgcccaacatcagtaatttgaaaggttatgatattttttcccacattgctgctacacataatgatgttgagttagagaagattgtttgccttatgtggtgtatttggtgtgaaagaaacaaggaattgcacggtaccaagcataaaccagcatatataatatgcagcttctctgttgcctacctcaatcaatatcaaaaggccacacaacctgctgcaattcgacataatcatgttgttaagacttgcagcacccaccatgttccacaatcatctctgatgccccactcacaatggcagcaacccaatgttggattgtataaaatgaatatagatgctgctcgtgatcctacttgtgcatttattggcataggtgctcttattcgtatccataaaggtgcgattatagcaggttattctaagcctattcaaggttgctattccccaaaggaaatggaggctactgccacgttttataatgtgcaatgggccttggagcatcaactacaaatacaattcatagagacaacattaattatctcttattcttttctcctagaataaaagtatctcatattaaaagagatgttaatcaattcgcttatggcttagctaaatttgcttttcgattggataaagatatttcttggttgggggaaattccctccccaatctattttgttgttgttaaggattcttatttttaataataacagttttctctcaaaaaaaaaagatgcttttgtaatattttacgctcttttttttgttccatagtaatgattttttttacattaacttaatatataataataataataat

SEQ ID NO: 79183 - DNA, 1336 bp, Cannabis sativa
  modified_base (54)..(63): a, c, t, g, unknown or other
ttattttgacaaaaaattaattcagggttctatttgtactattttagaaaatannnnnnnnnntttgtcatttaacaaaacacagagttcatttataacttttataaaacagagggtctaaaatagtatttagcgtgaatataaaaaagaaagaaaggtcacatataaaaaaaggtcgcatatggtaacgttccaaaaagcaacaaacaaaaacaaaaacaaaataatagcgttggatggagaagtaatgtgttaatatgggagtgagcccatgggataagtgtcaccaactcctagtagtaaatagcaaaattattggaaagtgaaaaagaagcagagtttttgattggctaaattggcagaaattgttggcgttgcatcgctggcaataccaagcaccgttaagtcgttcaaattctgggcccacatttcttatcataacattatctggcccattggcccattggcccactctccccacctctctctctctctctcactctctatatcgaagagaaattgaaagaagaataatccaatcgctaacttagaaagagagaaagaagagaaaaagaaaaaagtcgaccgaggaaaataatcccaaaccgaagctttagctatggcggtaggttaccaaatctcattattatactttattccttttctcttcatctccatctatatgtttattgtgtttgtacctatacctctgattctgtgtttgatctgtgattaatgagaatttcatgaatggtttggattttgggggatgatttttgtatttaaatgtttttttattattatttctgtattttctattcagatcctgtaaattcttccttattggggaagtagccttctgctgctttgtataatacggacatggttgtagttttgtatgcgctgtttgtttttattttttggttattatagtcacttcttatagcttttgaattttatcttgtctttttgtggaagagggaagaaaatggtcaaggttttctttttacccttttccttttggctttaggattttcttcttttctggggagagattttattgtgttcagtgaattgctttctagtttggtggtttttgtgattttatttgttttaacttatgaataaatagaatttgattcaatagctctggggtcgcccgagtgtggtgcttactggcagagaggctctgaagaaaatttaaatgcatcgcatttcttttgttatgttattgttgcatgtcagctcaaaataggggaatttttcgggattttctataccatttttgtcgatgattagtagaagctttctaaaaaattcaaaccctattgagaag

SEQ ID NO: 79184 - DNA, 1492 bp, Cannabis sativa
catggctaatggagtctctaaagtttcctggcttcaatcccttctcggtgagcttggcttcactctatctgctcccccaactatacatcgtgacaacaagagcacaattcaattagcttcgaatccaatttttcatgctcgtactaaacttgttgagatcgattatcattttattcgtgaacaggccagtcttggttctctctctttatatttcactccttcagcgaactaggttgcggactgcctcaccaagtctctagttgcatctcgatttcaagaattacgcaacaaactcatggtgcttcccagccccatgagtttgagggggaatgttaaactgtaattaaattaagagttgttttttaatctgattttactttttttaattataggtttttcctatttctctctttattggacaagtgtcctttcttcattctgtggattatataaattgtgtacacagtaccaacttttctaaggaaatgaatacacatttttatcttccttctaacaatgttttatcttaatgaagttacaaattcttaaaagaaaagaaggtaatgtgtgatcctttctaattgatctgagtccaagaaaaaaaactacaaccacatgagcctttcacacacttcaagcggggtgttcaacaatttttaaaattaataaaatgtggcaatacttgaaaggtaggcacgtgaaaaagaaagaaaacaaaatgagaaaaagaggcaccgcttttaaatttcattcatattgagagaggagaggagaggagagtgagaggaagagaaggaagtccaaatagccatgattgtaaatggggggcatcaccaataatccataaagtaataatcaaaggagtaaaagcccattgtcactcccctatacgacacaattttcattgtaatttcatccgaaaagaaaaagaaaaaaagtcctagcttttatatataaaaaaactgtgttttaaatttagagattggtacacatatacatacacagttaattaaatgaagagtagtactaatttctaaaagaatggtggtgaaagattttgaggtcgagggtcttagttgtggatgttagcctgcgctcttacactctttacaaacgtcctttttaaggccctttttttcgaaagccacatccatttgaccccagaccaccatttaccaatcacataattaataaatatatataaattctaatagtattcaaaagaataataataatataatactacaaccttgttaatttctccaatcttagtaggtaggtggctggctattctcggagatacagtgccgagaccaaaccccacattctaaaataataataattaatgatgatattttaattttttctttttatcacatagaaataatgtgtcccctttcaagcttattattattccaatctattttggctctatgctaagccccctcaccttacattactctcattttgatataaatatacaaacacacac

SEQ ID NO: 79185 - DNA, 745 bp, Cannabis sativa
ttttttttttttttgtataattaggtcaatgaaaaaagtgctgtatgacattcatagcaggaggggcacaattatataatgtttttatattcatcttaaataaacatgcattagctacgctatagtacttataaagagtactattatttagaaccccacaaaagggtatttcggtaaaatgacacactatctaaactgtctataactaccttaaaccctccacaagcctaaatcatagaactatctatcatcttaaactacaacatatcaaaatctctctctttcttgataataaaagcataaaattcataaattctagagatgaagaaaagcaagagctcatcacttcttattcttcttctcatcttggtccttatctttgttattaccttttccacaatctcagtcgaagcaagaaaacaccaaactaagaagaacaaaccacacaataagcacaaaaaagataacaaaggtggtaacaatagtaacaataataataatagtaattctccatgtccatctccagtgccacctcatcaacctccttcttctgtgtctaatattttcaatgtcttgtcttttggagccaaaggtgatggagtttcagatgattccaaggtaaattaaaataaatatttataaatatacaaaaatatatatatatatcacttgttgtttgtgttctttaatctttattatagtttaatttattaaatcaaacgttgattaatattattaggcactt

SEQ ID NO: 79186 - DNA, 3344 bp, Cannabis sativa
  modified_base (41)..(46): a, c, t, g, unknown or other
aggtccgaccatcggctgggggttttttttttttttttttnnnnnnttttttttttttttttctatttctgtatatattctcggattttgttccttccaactgtttctgcataagctatgttcatatataaaatcacactactatttccttaggactttttttctttttcctcttgcatatatacaggcatcaggtcagtcattttgtgtctagcctgcagcagtatgtagagtcacaactatcacatgtatcatggtgcagatttatgcactctcttcagcataaggtatgtgaaagttgggtttacatgattttatgagatgtaaaattttaggcgaagattgaaggttccatttccttttacattttatttatattacacttcttacatggttgatttatgtttactctagcatttggtattttgaagtgtcatgtttaaatctatcagggtgtacctgttagtacctagtgatattcacgtgaatatattgaaataaagttaccaaggaaaggaaagtgaagggctggcttcaagttaggaattttctgtttcttttcattatattgaataaaataaaaaattatgatttccagttaagagttgtttttccatttcctagttttgggtttgatgggtgccaatgcgtgtttctgtgattgtttattatgtctactactcttttagctttcaacctccttaggttagctgttttctcttcttgatttgacatggaaatcttttggttaaaccattgtccgtccagttgtcattatttaatgtgcatggttgccagtagctatcatgtgttagtgcacattaactgtgtaatgtcttttcttgccatgctaattattgtggttattgaatttataattcccattgtagtagtaactttttcactgtttttttatctttttctctcggactatgtgttgctcttaaatatgattttgattcttacaggtcaaagatatgatggatcttgagtcagtgcacatggcatatctaattgactcgttgcatgtgtaagttcaggttccactgctgtcagtttgagagctgaaaatgttattttgaaatataccaattcccgtatatattgtaaattttgtttttgagaaaagtacaaaattaatcagcctatattctatgttgcactgcctatcagaaaacattttaagtgtttcactggtttctataggaacataggattcgatatttatatttagagtgtgtttggaagtaactgtgtaattactaggtagggtaattattagagtggtaattacatagtttaataattacactagattttaaaaggtaaggtgtgtttggatatgaattcttaatatcttgtttgacaaactagttagaaattacatggaaaaataatattttttaatagctaatgtttactatggaaagtttttagtaattaaagtgtaaattcaattctcatggggagtcatgagagtataattggaacccctcaattactttcaattacacagttacagtgtaattacatggtcagacaaacatgtcaaatcgtgtaattgcttctaattacacacaaatccaattatattgtggtttttcaatcgcatccttagttacatgggattcctcgtacaagtatgtgggggagatattggcacttttgctctttcttttttttctttaattcttacttgatcacatctctgcagatgttttctatctgatgaaacacgacatatagccaggatcatcgacagcattttgcaatgtgcattagattttcggtcttgtcttagaggaggcatgtgggatgttggattaaatcaaggagagctggtgggaaaactttccagagtaaatatatcacaggtgattcttacacctttacaattgtatcaaacaagtactagtacttcttatgtagttgtgttagaggtcatcttcaaatccctaattgatacaagtctcttcttttgtccataacagagaaatgaaaagaaaaatcaccttataataatcatgtaggctaatgtttagttaacaagtggtataaattctaaagattattacgctagtcaaattgccacaatgatttctcgctgacaatcacatagcagaacaaaatgatgcaatgtctttatgaattctggaacttccttgttgaaactgaatataaaatggtagccatgaccaaaaatacgtagcaagctttgttgtttcttaattatttactttgccttttctagaacaagtgaagatctcagaactaggttcctatataatatcgaagtctggatttaactttcatttaatcattgtttgttccaaggacggtatcacatttagcacactgcttccaaaaattattatttgccctaccactaccctgtggttgcaagttgcaagttcccacctccttgttttaaaaccccaattttcaacaaatgaaaaacaagtgatgtctttgaaattatatctaagaagatagtgtcatctattgcccaacctttaaatttaaaatacggtgagagagagataccaaaacaagctgttattaactaacaaatgtttgagcttttgcaggtacttgccatgaaaaaagtatttgataaaaatatccaagaattgcatctgtattatctaaagtcaccaaaacatggagaatatgggctttcccggttctggggacaccttaactttaatgaatattactcagataacggtaatgagatgcgattctacgctgcagcaatttgaatctctgtacgaaactgaatgtgtgtagagatggatcacacaaagggataactcctcaaaatgcagtagagcatccaaattggactgcggatacatgtgagatatcttcaactttttcttctctgatgatttatggtttgtaggttgtgttggtgttgcagtcatctgaattttagtttagagaagtgttgactcggttagttctagattgaggggtaggggaaagttgttacgtagaaggaaactatataagatttgagtgtttataaagtgtgtagataactgaatatatatctatacataatatatatattttttgtttgtaaagggaagctttctgctgcaatgttattgatgcctgttctatattttgtactatatatgtgtatgatgttgtgttagtttccaatacaatcaagagtacaatcaagatctcctgttaaaaagtagtgtcccatattgtgtcaaactaattaaaatttaacacgtcaattaatttttaacatattacgtgaaatattatgaagaagaatatgattgtttgtaaacttataatcatgtttagttatgcatgagaatatt

SEQ ID NO: 79187 - DNA, 3249 bp, Cannabis sativa
  modified_base (31)..(46): a, c, t, g, unknown or other
  modified_base (76)..(91): a, c, t, g, unknown or other
aaaaagtaaaaaatactgcctggcagtattnnnnnnnnnnnnnnnnaaatactgcctggcagtatttttgtaaaannnnnnnnnnnnnnnntataccatgtaaatttccttttttattttgggtcccatttagggcccgtccaagtagtttgggggctttgggcaaaaaattaaaattaggtattttatttaaaaaaaaaacaattatcaattaatattttataaatttagttttccaaagaaaaaaaaaattcattaattctataatagataagaatcttagaatcacatatattgagattacatttattatattttttgtaaatgtgtttgatattatgaatatttatcatgaatacattataaaaaaaatattatattatatatttatatatatataatatatagatgataaaaaaaagagatcttatgcaatgacctaaactgtctatatcatgatgttagaatttttatttggaacacatataattaagattttagaaatgaaaattttcattattagttaaaatgatatcaaatttgatcctctaaactcatattttaacggtaaaatctatattgaattggtatcaaatttaaggtatttaaggtgttatccattatattgtcactataggttacatatgtgtatattcttgtacacatgacatgtttatattggtacacctaatattattatttaaaaattattttaaaattaaataaaattataaaaaaaaaattgaaaaaataacttttttttataaattttaaaataatttttatattttgtaaataataatagtagatgtatcaatataaatttgacacatgtacaaaagtgtacaaataagcagtctatattgacagttaactgtaaaaaatagatgatacctcaaatttgttagcagttcaatagttctaaggattttaccgtcaaaatttaagtttagaaagttaagtgtaagtagagtaatagttgagaggatttagtcgaaaaaaaaaaactcaaaataaaaaaaagtagatcttccattgtagcacatgcaaatgtgcttaagactattttttttttatataatatttattttttgttttgtatgtatttataataaatctaaatttcataaaattatactatatctaaattttcattttcctaaaagtagaatcgttagatagaagagtaagagatattaatctcaacagaaacaaatgaacaaccttttataaattagggaataaggaatatgatatatataccaaaaatgtttacccctgagcatcaaaccattctttaaattgtgctctttggcatattttttttaaattaagaattttttattctcagggatattttttgaagaagaattaaaaagaaaaatgtgtgcctaaatgtgggaagcacagcagagcgggtatagtgtagcatgggctaataaatgttatctgaaaataatccaaatgcagataatatatgaaatggatcgatcaacacatgacccaaaaacatatccacattatacgtacgtgcatccagcatagcccaaggccccatcaaaaaactatattgaatagataatattccctgctgatctcctacgtctctcaaaatattaattcatataattataacattacaaaatgaatatataataatatctggttgtaaccatataaatatatatctggttcattattaattcatttgtatggtgtatagtatagacataaaatatcatcttcttcaaatccatatgtatatgtatatgtaattaggcccggaaatcaatgccatgaacgcgcaaactctacctcttcttctgtagtctctacaatatatatattgcaaaacagctaatcatcatgaatttcgctgctacctctattatatcacattttttacatcataaatatactttactcctatcaatttattgatcaacattgtcccacatgaattaaatgtaaaagtattaagccatatatatatatacaagaacatgagttactccactcattgccaattggtttcaagatagaacctcatgattcttaacatagtatcaaagtcatattcctagcgggctttcgatccacacctagccatatataaaaacataagttactccactcattgtgaattggttttgagatggaaccccataattctcaaccaacaccaatttttttttttttttatagaaaaaaaaacatataaagcaaactcatattagcatatagaattttaaaaatttaaaataatttacaagataaagtagtgtttaaaattacgtgtgtaactaattaactatttaaattttattttcggtatgttaatttttttcaaatatttcttaaacgtacacaaacacgaccatacgaagaaattagacataaaaattcttcgggataatgcataattaaattaacaaatagaaaatgcattgatttgtatccgtttaatagggtgcaccagttttcctaaatgtatattattacgatcgatatactccaaagtccaaagggttttttttcttttttcttttttggggttatatgttagctaatagcctaatacttatacttaatctctgggttctctcctatttaatttggaaattcaggcatatattattatgagtagactcgtaatttgttcacatgtacaaaagaataagatgattcataaagaaagaaaaatataaaatcttaattattccttatttcgtgcaattaattatcttgcacttaatttaattttgaatgagaatagcatacatattaattgtcccctatattctataaatatagctagttacattacatgtatatagcaaattaattaactctcatacataattatacatacaaatatttatatatgaatggcattttctgtcggtacaacaattttaatttctatatattagaaaaatacattgtaattaattaaacgagtacatacttttaaatcttaaaaacctttctcctttcttagctaggcctaaaaatttcattttcttgcatattaatatattaattatgtacaaataaggcactaaattaatttgttaagatcacttggaagatgctggattcagtactcttctaaggaatgtgacaatacgtaaatatatatcactatcataatcagtagtactattatgtaggtcctctctatatgctcacaatttttttcattttacaattattaatttcgtcggcagcctatatatacatgtgtgt

SEQ ID NO: 79188 - DNA, 3412 bp, Cannabis sativa
agttattgatactacgtttctatcctaacttagtaatttacaatctaagctcaagtgaccataggagggtgcgtgtgtgttggaggttttaggttcgagtcccaaattatgtattgtgtaatatataaacgcttgaatcaaaaaatatttttacatagttttacatacattgattaattatgctgctaaaaaatcattatgtttaaacgagttacaaactcaaaactttaaatatttcagcaaatatctcatataaattagataatctccaatgtgtccccagcttgaagataagatgggcaaagataagttttggctattggccagaaaactaagcacatttctttatttgttatcataccaagaatcaacctcatcaacaacaaatcatcattttggctacttgagaaaacaatataagaaatggatttaataggctgctaccaccaacgccaccaccaccattggtttttactttatgacttgataactttgatgtgtctcccatcacatctatgggagaagagaatagtttattaacagcagatgttcttacttttcaggactctgttttggattttgtgagttgataatttgatgagaggtcatctgcccatctttttttagttggaaacttaataatagagcatgtgatgtactattcttaaccctatatatatctcaagttcaaatgtacaaataagctgtcatttctcagagaggtgaaatctgtgtctaccagcactgtgtttgacaaagtcaacttatataacacatgaatttggaacagtcaaaaaaagatgatagaacaaaattgaaccttaactttacaacaacaacagcaacaaaataataagtccttaccctcctgctgcacaagcaagactattagcatatagagaaaaattgttgcaaggcaagttattgatattgatctagaaaaataaattctcacatgctcactgttagtgagagtaaaaaaaataaacaagaaaagcaaaattagttgcctaatgcagttcaatgagtaaataatatcaagcggtagattttttcttctcttcctcgagtcgctgcaactctgccagtttttgagcccactctctttcccttgccaccgcagccatttttcgctctattttcttaatgttctttttccttttagcctcttgcacctcagccttccttttccttttctctgactgcacaagttcaaaaccaagtcccaattaggggaagggaagataacaacagaggcagctccaagccaaggtataacaccaaatttgagtatgtgcccaaactaatgatgtctaaagctaatgataaaactcacaactcatgaatctcataaagttatcaatgaaaagggttcattctatcacagacggttttgaatcagactcttcccctacttttcacgcatcatgagaatacagaaacagaataagaactacaagagtagattttatgacaatacaagaacttaagctaaaaaactattgactgtgcatccacagcatgatatataccagaaattcaaagacccttatttaacaacattttgttacgaatgtacagatacagtaagttaaaattcaagaaactaatgaaaaaagacaatttaacaccatttagagctttcaggattatatctaacatttacataataaagaaatacgatacagctcctagtttagagaaagtaataacaagactaccattaagaaacaaatctcaatcatatattcaataatgaaattagattgtcaccaaaaaaaaaataactggagggaacgattgatcttgtaagtgctaagattagtcctatcgcagactcaaattgctcgcaaaattcaagtgaagaaatgcatattgatgaaaactcggatctctaggcttctcccaaggatccagccgtctaaatttagtttccaaatttctatgattctatccttatcataaattacacctacaagccagtcagtattgcgagggcaatcaatctaagggtaatgaactcacatagtattagtgctacaaatttgaaaatattggcctaactaaacactttaaaatgttatgccatgtttggtgaaatgtaacattctcggagttaacaaattatatgagaagctataactcaacgctttttcaatcacattcttcccagcaagtctatccaaaacaattaacagtttcaatacaatagcaacgacaacccctacaaccagaaagtaagaaacaaaattgaccacattccaaattatagtatagagagacaagttaacacaaatgataaagatcaatgaaacacgcaccgaaatgaaagcaagacgcagcctaatacgcttcttctcattccttcttttcacacttccttcattgggtctgttgggaagtattggttcaccaggaacgtactgaacaaaagcatatggtcctgcactcaaaaaaaatcccataagaactataatttaaaattcattcggattccattccaaatttgaaacgtgtaccgcaaaacccactaaaacccctaataataaaatctcaatgcaccaccaaaatcaaaggcactaagttcccactaaacaaacaaaacacaagaaactcatttacatgattgcacataatctatatgttagcataatacattgttcaattttggggggactcagccaaaagatatcaactttaatattagaaattaaacattttacaaatagccaaaaggatctattttcacaaaatcacataaagatttaataaaaaaaaaaaagaaaaaaaaaacctgggggtttcatggtagccctctttcgacgagacttatcgacgggtcgtcgctttgggaagcgagtatctgttaggctgtgtaaatggttcacaatcggaaaccatggagcttggccgcgaaatggactaccgataactgatcggaactcggaagtagcagaaaacggcgacgttgcggaagcggaggtgcgggatgctactagggtccttgacagtggtcgaataattgatcttaaggctccaaatcccatttttctttgttgatttcggcttcgagtcgaacaacaactcaaagctcaagcttttcactgtgaaattgaagaacctcggtgacagaaggaattgggggaagagaacggcaggccgggccgaatatgggcttttgatactataggtctaataaaatgggcctagaatagcccaatatacttatttcaccgggcaatactaatcttaaagtagccattattttttttttattattttttttttttggattatttcacaaaatacaccaaaactacaaaaaataaataaataaattaaaaaaatacggtttaacggaattataaatattttgacaattttttttaattttatttacagaaaatacaat

SEQ ID NO: 79189 - DNA, 3031 bp, Cannabis sativa
ctccaactttggtcccaaacccgacctcaacttgcaaccctagattttggtcctaactctgactccaatcttagaaggattccacttccaaactccaaacccaagacctcatactatttcaaaatattataagacaaactaatgtaaattatttttcatatattaaataataatattttgtattaaaatttatcatcataataataattacaatataaaattttatctagatataatatattttttttcttatttaatacacctactaaatgagcaatgaaattgtgatattaataaatagtttcattagaaagaaaatgaaaaggggttttgtcggaaaccatgagtttaagcccactgataatgttgacaaacaaacaaacaaacaataataaacaactatatgttaaatgaagttttttactttttgacttactcttttgtatggtaatggtaatagattatcttctcatcactcaaaacttcatatgttattaattcagtaggagattatattctttttttggtcataagacagaaaattagagacaatcactcttttacccgtatagttagtagtagtagcatagtcatttgttttgttagataaaaatgagctgacgtgtcacctaaagatttctctcctaggacactcttgtctgcagtctcaacctctcattcctacttttttggtgccattattgatcaagaaaggagaagaatattcatcatgaaaaactctatagaacttttattattcaaagtaggaaggaacaagaaagagggaagaaaaaaaaacgaagggggcagaggggggcaatttatgtttgccttttatgctatatatattagtatctagaagaacaagaaaaaaagactatactcctaatatgaatatgtaactaaaattgactcagcatattaaagcagaaactttgaaatagacgaactatgttttggtttacaactgtggtttttgtattgacatctagttgtaaggaactactactactactacctgtgcaaaaggtgaacactctaccatgaaagtagtaatggttttcaagggccacttaacttgaactaccatagctagcaaaggtggtttacatattccacttgtttgtgagccacgcaaagtgagttcctattaaccagttttaaaacatatgtcatttccaagatagttgaaaacctcagaagcagcagcattactgtttttcatagcatttccaggattgttgaaaacttcagcagcagcagcagcaacagtattactgttttttatagcatttccattttggttcacagtgaaatccacagtgaaggaattcagactctctgagtctgaaggtgtcacactacaggtgcgagctctttttggggttctcagcaacctcaagttctccccaccaaatgcattattctttgtttttctcttctgttttgtgtctaaatatccacaagcaaaagcttccaggactttagtggtcaacggacgatttcttgtactgtgtcttcgggagctcacctttgtttcctgctcagaattagttccacattcaggggatttcactgcctgaggtttatcaacttcgttagtcttgtaatccgtcatgaaaatatcggtttcagcatcttgagagaaaggtatgtttaagtcaaagagtgcgcgaaatggaggtttctcaagaggatgtccagcagctaaaagattactattagggatgcctggtaacttggtatgagtgagaatgctttcactaaaatcacaactgtttatacagctcttggcttcttgttggaatgtcaaatcaaccctgctgttggctgtgctgaggcttgttgcctcctttcgtcttgggggtgatcttcggcgcctttttgcaactgggacaaaagggtgtatatctgcagaaaccatttccttaacaaatttggattttgtagccttgtcttgttgtatgtgtctgagtgtatcagcctcctcatcttcaaaattatttgcaggcaaagtagtaaaactggcgccattaaccaaataactctgtttgtaaccataataaggtaatgttttacatgaattggtgattgtggctctgagatcattagtctcatccttgttcaaaccaaaggtatcagaagaactatatttatcatcaaattcatcatcatgaatctctccatcatcttcttcttcagagtcacttagagaagaggtatgagagttcatactttcacctggcaagcatctaacttccctcactgaacatgattttccatttgacaaacttgtatccacaacagtaaacttagtgacattggcaccctgaatgggagtgcgcggcttgagataacaatggctttctttatttagaatgtcttcttgttccacttttgtttcgtcagtccatccattttcttccttgcttctgtcacactcaatctctataagttcaggatttgaggcaacttttctcaggacatcactaacagaatcaaaatagtgatctcccttcactagtttccttctcgagaacttcttgatgccgggtattagaaagaccaaagaattcctggaaccagtggggaagccatgattataaggctcctcagagtgccaccctctatcaagcaagcgaggccaaactgcttcccaaaatagatcacttgaccgagctttactaagccggaaatcaccagttaaaaatttgatgatctctggggtggtaagtgctgaacatgccttgcccatcggtatttctggacgcacaggagcatgttgattggctttaggagtatccatgacgattcctgtgagatcttgcttcccttttccaactcccactgcttccacaagagcaggcaacccaaatgtagccttcaaagtgagcacatattgttctagtgaaatttttccctccccatatgtcttagagatctgccaaattgttttaagtaaattagtacaaaatcatatcgaaaaatgttaatgatcatatctgcaaaatccctccccaaaaaaaccatc

SEQ ID NO: 79190 - DNA, 763 bp, Cannabis sativa
ttttaggttaaataaattatatgttacacaatttatttaccaaacacctaatacatattattcacataataatatatattactacattttaatctacacttattatattataaaataatataacagaatatcagcaattgtggcttcgacgatggggaattgtgagtcatttgctccgttgatgaagcttgagagcagtaagatcaacgatagaaatgagagtaaaggcttagtaaggctgaccttcattttgttctctagagctatcggctaggctgaccttcattgtaatattatcgtataacaataataacaaataaacaaattacttaattaataataatgatgatgatgatgataatgataacaaatataaaaattaattaacctttaataattaattttgtcttctagatttaagattagtagctcaatcaagaaaatatattataattagctaagagtttaaccaaaacataattatctgtccgacacattgaaaagcacacgcactcgctttgctagagggaattaattgggctcgagatataagacttccactcaatgctttcttctctaatatctttgaggtaatgatactatagttaggattgtttttaattagaaatttgtggacaaattcctttatatttgatttgttatacatgttgttaaaggataagaatatacaggggtaatctagttattaaggctctccaagtttgttggagattgaggcaatcctaagagcttcttcaaggaa

SEQ ID NO: 79191 - DNA, 6267 bp, Cannabis sativa
agcaacagaatcaaataaagatctgagtctccaattcgggcaagagttcttcagaagagagttcacaacgatttgagagtcagtgaagatgctcactccttcccaattcttctccttagtccagcgtaaagctaatttaatagcttcaagttcagcagcaatagaacagtcctgttttcctgaggttgttttaataaaccattgattagtgataccgtcaatggccaccatagcacccccaaaaaaactatctttgaatgaaccatccgtcacaatcatcttcgaggttactccaggagattcctggcgagagatggagacaggtcccctctcagggtgattcttcttgatatccctcatctcaagaaaacagttgcaggcatcagaaatcatggtgtcgatcgaaatcagcacctgggaaccatgatacaatctattccgccacagccacacagtttcgagtattgaggcaaaccaaaccagaaaataatgtctagaggaagtgtccatattaatcattgctgaataacagaaatcaaataaagagttacccaaaattatctcagttttgataggtaatgggccaccaaaccagatagctcttgccagcgcacatcgcacaaaaatatggagagggctttcagaatcagacccacagaacgggcaaacataattattgctgcccccatatttatccgctgtaggaagtgcccctgctatcgcacgccaaagcatcatactttgcctggggtgtatcttactatcccataaccacttccataactcttttttctcagcaaaccgagtcctttggctgcataaatatgcccccttgaccgagaacataccagtatccgaattcttccaaatgagcatgtctttctcagcaatagagttgatttggatggtactaatcaggctccccaattcatgaccaaacagaaattcaagaaacccacggttccaagttttattgtttctgaacatcaaatccgccacacaccgaagagaaggagctttggggcgaatcatctccatagtttcacgaaactcctcatattccatccaaggaatccaaggttgccaccacaggttagtgtcttcaccagtagcaataatagtgcgggaaccatcacaaattgttttccgagcatccagtattcccctccaaaccgggctatcagaagggcgttcctggacactccaaaaagtgtccaaagggtaatatttagctctgagagaatcagcccaaggcctgttactgttgcttgccaaaaaccaggctaatttagcaagaagagaatggttcacatcaaagaatttcctaaagcccaagcctccacaacatttaggttgacaaagagaatcccatgttttcgtagccagaaatctcgtgcagtctaaacggcctttccacccgaattttcgaactaatgaatcaagctccttacaagaagtagttggattttgcacgtactcatagtgtaagaaggcattgccatagccaatgaattaattgttaccatcctcccaatggtggacagagttttcatccgccatccttcaagtcgattacagagattggacttaagaaaattaaagtccttcttcctacttcgggagaaaataaaaggattaccaaggtgcttttcctcccctctgatcaaaccgatgcctagtttgtccatgatagaagtttgaagcgcctttgaacagtttctggaaaagaggacacccgatttgagtttactacattgctggccagaccagttttcatagatcgtcatacagttgacaagcgaatcaatgtctttcatattagctctgcaaaacagaatggtatcatctgcaaacatcaaatgggagatagcaggggcatctcgagcaatacggatacccttcaccctcccaaaatcttgctccttggcgatcaatctggaaaaaacttcgttgcacagaataaataagaacggtgacatggggtctccttgacgaatccccctctggggtgagaacttctttaaaggtcggccatttagcaaaatagagtacgagacagagcttatacaattcattatcagagtaataaagtgagggtggaatccaaataactcaagaactttcttaataaacttccactcaagtctattataagtcttattcacatcaatcttcactgccattaatccccccttcccccttttcgacttgattgtatggactaattcttgagtaagtaaagaggattcggctatccacctaccaggaacaaaagctgactgaaatggggagatgatacgatccattatagagcgcagccggtgcgaaataatcctagtcaccaccttataaataaagttgcagagagctattggtcgaaacttgtcaaccgagtcaggattctcgcacttcaggatgagacaaaggaaggtgtgattaatcgaagccggtagctcaccagttctgaatatcgactggatgcacttcgaagtctcgattccaattgtattccagcacttccggaagaagcatccagaaaaaccatcagggccgggggactttaaaggatgcatctgaaaaacatgttgagagatttcttcaaaagtaggcatggacataagagcctcattttcttgagtagaaatagcctccgaaattagtccctgaaggtcctcagggaaacaaggattagtggaagtgaacaatttcttgaaataattattgaggacctcccctttctccttctctttgaaaacaacagagccaacttcgtttttgagagaccaaatgtgattacgctttcttcgaatgatcgttgaagcttgaaagaattttgaattacgatctccatcgttcaaccaaatctccctggatctttgacgccaaataagctcttgcttctcccaaagatcagctatctccttttccactgcttcttcttccatcacactacttgagttcacatcacacgattgcagagaaaggagcttaaattctaaggcattgagttttttattgcaatctccaaagactctcttgttccacttctgaagagccatccgaataacgtcaaatcttttagggatatttgtgacagaatcagaggagatccaggcttgaaaaatagtctccaggcagctttcgtctttgaaccaagcttcataaaatttaaatggcgtcgacccacaagatctctccatcacagaatcaaaaacaatagggccatgatcagaggaaagaactggaagatttctcacacccccacgaggaaacaggttcatccagtcagtgtctacaataactctatccagccattctctgatcaggtcccccgactgtctcttgtttttccaagtgtatttgcagccaaagaagcccagatccacacccccagtttcatacaagaaattgttcaggatagaaccatctctaggaacaaagttcctgccccccgacttatcttcacttgataacaacacgttcaaatcaccaacaattgcccagggcccagagcacaagttaattacaccagaatgtttatcccaaaaccattgtttctcatcatcatcataaggcgtaccataaattgcaaataaagtccagaaggaggcttcatcagggtcccaaattttacattgaaaaccagtatccagtttggagactgaattaatgcccgcttgagtattccacagaaggccaaatcccccagatctcccaatcgaaggaataaattcactttcatcaaaattcagcacccgacaaatagactccatctgatcacaacccaatttcgtttccattaaaaacacacaatccaccttgaatctcctaacccaagccgcaagggcttgtattgccggcggtctcggaagaccccgacaattccaagaaagtgttctcattgggaaggagggggcatgataagggccgcctcctcgcccacttgaaaattttcctccacttgaatatcaataaccatagttccttgagtagaagacaaatcctcgattccatcttccactgggattttacttgccggcggctcggatatagataaaggactcgcccttgttagtcgtcttgaatgagaacgggtgttcgattgacagttctttctccctctcttctttttttcagaactcgcactacctttatgttgatcatcttttcctttggaaaaagtcagattatcaacttccagattaaatgtcgaacacaccctattgtcctaggggtgaaaagaaccggtgtcacacttccaggggctttccttttcttacaggctgttgggccaggagaaatgggagagcccaagagatcagaggatggaattgaatcgggcccaataaagtcagagggtggaaccaacccagttgagatagaggagcccaagagaagttcagctaatttctccactttatcagaattggacttgggcaaaatgatgggctcaggatgtcgatgaggggtcctggacttagaaatggactcatggggcaggtccaccatttgttcagcagttgggcccacattgggcattagagaaagaataacataatcatcactaggatgtttttccaaattagcaatagggtggttagagactacctccaaagggttaaaacgtgcggatttacgtttattgatgccagcccctttctggagattgccacgcgtccccttgttatttgccatcgtacattcaccatgcatagtgggaatgttgctgtctggcacagtaccatgagagggaattacgcccacgtctactggtatagtcgtacctttcctgccaatcgtaccaggccgaaccgttacaccatctggacgatcaatggccgccggtaaaatctcagcacttctgataagcgttggccggcgggagtcaaagcagcttctaataggaaccatcgcctttaaccacggcccatataggggaactgcctctcctatgggtgggtaagcataagctttcggttgacggcaaacactcctttcatggccaagaaagccgcagttaaagcagaaagtaggaagctttctgtatttgaattgtatccactccctacggcccctgttgatgctcaaaaagaagcgagctggtaattgttggtctatcagtatatcgattttcagcttgaggaaacctcgacgagcaatgacaccgttagctgcaccatcatgttctaaaaaagttcccactttccttccaatcaccgcagaattctgggcagccaaataaggagtaggcagcctgtgaatctcaacccaaaacgtcgccttagccatatttaccgcctgccagtgacaatcagttggccagtctctaacatttaacagctgattcgaaataatccaaggagtgcgtttcaaaacttccagtttatcctcctgcttttcaaagaaaataccccaaagtccattctccatagttttcagccgccatttacctgacagagaccaaataccccccaaaatctgcttaactcttcctctggaaagaactttattaccaaagagttttgcaagaacacctgtttttgcaacttcctcactgatttcgaagtcaggttccaactcaagagtgacttcctccaaaaacttttgcctaagcagctcaacatcctgttccgaagcaggaacactctccccattcctcatgtcctgagaactttcaatatcctccatctcagaaataaagaaaggagaaagaaaccagtagtaaacacagatcacagcaactggcacgagaagaaactctcacaacctggaaaaaaccagtagctcactcatgggagcaaaaaaaaccagttggccagtctctatttatttttactattatttacttaatatatctactctactctcattacagtcacttatttctctcttcattcttcgcccttggaaaatatatgtcaaaagaaattatggctaaaatatcttctctattacatgtttatctagttgttaaatgctaagtatgtagtttacatagtaatttgtcattggtttagataatttttttattttattttataatttaaaaaatcatttcacttatttaaaaatttaaaaataattaaatttataaaatcattacaaattatataaaatagatattaagaaagaattattacataaattaatattttatttacaaaaatacttctacaaagtgtagataataattataccttttatgtaattttaattatcaaaatacctcttatactatcacttacacaatcagacgatgattacagg

SEQ ID NO: 79192 - DNA, 825 bp, Cannabis sativa
gatatgaaaaaaaaaataataaattaaaaaggaagatattgtctttaaaataaataaatatatctcctattaaaaaatatttttaaaaaagattaattattaattttataaatatagacaataatgtaataattaagaaattatacatctaagtcaaatatcgactccaacccaatcgaggtgagcacccattagtactcgtcttcacattccatcactaatgctgagtattaattaatatgtgaccaaataagagtatttttatagcaagaccaagtagcatttttgagtaataataacgtaggggaaggtccatcataatttgtaccagtaaggtattataaaaatacactaactacctaccatatttttgtctatatctaatctacattcaaattttgtcataactcgtaaggtccttttccaaattctttcagaaattaatataaataaattttagagctgtattggccctttctttcctttttctagatgagagttacgtagcgagccacgtaaatattagttttatataagttctagtggtttttgtttaagaattcattaactaagtaactacaacaataatggtagatagatctatttaaatttttcatatttgtaaagattataaatctaaacttttaattttttcttgacttgagattttgaattgttctgatttatttgtttataaatttattgaaatacttgaatatttatttgttctgatttttagagtttaaattttatatggatgattgttaatgaaattcgtgtgtagctttatgtttttagaaaaaaaaaatgtattattttatatag

SEQ ID NO: 79193 - DNA, 7106 bp, Cannabis sativa
taatttttccatatctatgaaatttaaggaaaaaatgccatattctacgtaatttcctctaataaatataaaaacataataacagggccaaaattggataattagggtaccaaaacaacaccaacatgtacgacaacgagaattcaccgctaaaatttatagtgactggactttttttggtggtgcgtgttaatgaaggttgattattcattaaatttggtataaaatgctatactttgcagcagttaattttgtttttcaaagagtttcatttttttttttacaaagatcatcttgtttaatcaaactataaaaatatttatatcaaatcacatttattttaaaatctataaaaatattttataaactaacaaaaaaatatataaactaaaaaatgccattactttctagtaagacacgcattcatagtagtatagagatgtttttattcattgacttatattttattattttgactagagagtggccaaccatgaattttgaactaaaatacagtaaaggcagagcatctgcttatatacatggtaagagccacataagccttagactaaacaaaaatttacataagaggtgcacaaacaatgttcttctgacgggcgagcctgtaaaagaaagaaaactagcagcaatgcctgcatatatgtacaaaccgctgatctgcctgctcaaccatgacattttcatctaccaattgatcagaaaaactcagcttagtgtgacccttaatgaaaccaccaagaccttttaagttattaaaacaagatcagccaattattgactgaaattccttgcactgaacttcaaacaaactataacatatcacttctgactctgattcccaatcaaaaacagacgtacagaaatccaaattcaaataatatacagccaaaaaataacattaacaggttccatattgattgaaaagcaacattaagttttaacaacagaaaaatttcccgacaaagggaagacagttattaccagaaaatctagcagcaatgcctgcataaagttgcacccacgagattaagctcgggaaatcctcattatccatttcagctgccagcagtaaacagactgcattaaacagtaacaaaatattgataactctcaatcaagcagataatattcctaaatgttcttaaagttggtgctttatagtatcagaaaaacgaaatagaagcttaatattccacaacagcatatttaaattcattgactgatgcccttctttgctttaagtgattcaagagccttcttccgcaactcaatctcaagctttttctgctcagactccatctcttcattctcactagtttgagaatctctcctaccaccatattcatcatctgaagcagaagcatcactttgattctttcctcttagtttcccagcccggcgttcttcccttctgcgacgccgatcctcacgtttttgtcgcctcttctctttacgcaatttcttttcctctttctttctccttttagcctcttttctgtcctccttttcagaatcagagctataatcatcagaagctgattctcgcctttctgatcttttatgttttctcttttccttacctccagctccatggttattattttcatcagaagctgaatcaaaggacccactataattattaactctctcatgactgctctctttgatattttttgaatgagagcggcccttgtcatcagattttctaccttcaccagaatacaacgcatgtggtccatcatctggcagaggttccttatacactttcgaaggcctatctcgatcaggagtcccaagggttccttttttctccctgtcaggatgtttttgtcctcagaataaataacaggactaactaaatactctgtgccaaaaacagtataaaaataattcgaaaacactttgcttcttacttggcttcacttatctctgtactgtcgttgtgaagtttctgatctcttggtttccttggaggactagagctaatatcccgagacattcggccccttggttgcctcatagagctctcatatggactagatgataaataaaacataagtataataaagctgcagaagaattttaattacagtcgaagtgtttatgatacgcatacacgtgagaagccaaataaatacctcctttcttcgctagtactccttccagctgacggtgatgcaggcaatggggacaaggctgaaattctgttatgggaatcactttgattccttgattctctttgcagtgatctcatagaactagcagatctatgtgccataagagaataattattgtaagtccaataaaattgtagcttatcaaatagttctgactttataatgttaataaaatgagaaaaaatgacaagcagttagatcatacaacctcatactcccaacaaaaacaataataataagagaaacaagtaaaatccctacacaacaaattttatcaaatgaaaaaccagttcaaattatgtaaaaggcttaacattagattatcaaaagtaattttatcagatgaaagacagttcaacagatgtaaaaggcttaacattaaattatcaaaagtagtgtgtcactgacctcatccttccactaggtgattgcataggagattttctctgatgcttaagagaatttctcctaattggtgaagtggaacgaagctgacttggagatgaagaacttcgttcaaaaggtgatggtgatctactatcaagggttggcctcctcccaccaccaactggtgacctcctactcccaccaccaattggtgacctcctcctgccagcaacgggtgacctcccacgtgcaagagatggagactcatcttctggagtagatgatctttgcaacctacggtgcaccggaggagacctacgtcgtataggagtaggtgaccttcgtcgcactggtgagggtgatatacgacgatgtactggggaaggagatctatgagggtcaggggatggtgatatatgtcgtcgtccaggtgagggtgacctacgatgacgcattggtgatggggatcgacgacgatgcatgggagatggagatctacggcgacgcacaagggatggagatctgcggcgatgatcaggagacggagatctacgacgacgggcaggagatggagacctacgacgtcttgctggagatggagatctacgatgacgtgcaggagagggtgatctacgccgacgaaaaggtgacggtgatctacgtcgacgaaaaggtgatggtgatctacgtcgacgaaaaggtgatggtgacctgcgccgacgcataggtgatggtgatcgacgccgccgcaaaggcgatggtgatctacgacggcgcaaaggtggtggtgatctacgatgttcaaatgagggtgatcgatgtcgatatggagaacctactcgacgcctagatggagagggggatcgagatctcttggaatttagtcctctttttcttattggagaaattgattgtcgaggtgaacgccttcgatgaggtgtaatagaccgtcttctcggagaggaagaggtcacgggccgaccttgtgcttctggtgatcgggacatgctctttgacctatgtctttcactaacaaatcatagctttggtaagatcttataatcttaaaaatgttgaaacaaaattatactaaaacacctatatgactaaaagcaaaacattgttatgctattctaagttaaaaaccagcaataaactcaaaaatacaaaggaaaaaaagtttaaatcggcttcttctattgaaaaataagaaaaacctactctgaataacttttggtattataatactacttgttgatagaccttggaggataatctatgctaattttctataaacctgattggtgtgaatatgtttttgtgcaaaactataataaagacaataagagcaagccggagcaattaccgtgaagacgatgaacggcctgctgaatgaggagatcttgaaatcctgtatgaaaggtaactcaattattagttctaatgtttcttttaagtatctgcaaatttacagccattcatcagtaccatctaaaccaagtaatctcaaactaactggacatcattgacaaatgcagaaaattgccaatctttgcttggtggaaccattttaatcaaccgagcaatcaaagttcaaactgtgaatccctatcttgcaaaaatgtatacacagtgtatacaccaaataagtccactgcttggtggaacccattttaatcaacccagcaatcaaagttcaaactgtaaatctctataatgcatacacagtaatcgaccaatcataaatctctattatcaaagcataggttttgaggtgtaaacttcatatagtgtataattcgtgccttaacaataaaagcatcatcacaaccctaattctaatatatataaatatatatccctcaaagccctcatcatcaagccactggtcattcaattgaaatattaaaaaggacaacaaggtttttttttagaatgactttctgctatattcaacaataataaatgaaaatctatgttcctaaaatccgatgtattgtcgtctaaggaacaagaagacatacacaaacaggaaatgtcatagaaacaccattaaaaggtaatataaatatctacctattcctcgctcttgtgccattcctcttttcggttacttcatcctcaggacgatcacttgaatccctaggcaagttgtgccttgagtttggctccaaagcagcattgcttggttttgtttcaacccttccttcctacagtagtttgaggtaaaggaatgaacccaaataattgcagaagctagctgaatgcatgaaaacacaaacgaaagttaaaaacgaaaactcatttccacagacttcaggtctagcatgaacataataacattaccatcttcttcaatctctcttcttcaagatccctactctccttatctctctttctctggatttcgcttgcaatccgatcagcctcctcctgaaagaatcaaaatataaatataaaccaaaaatataattcctgcacatgaaatttaagagcaacattactacacacaagttttaaccttctttttcctagtctcctcttgcttagcatcaaggaactgctgaggaacgccgctagcattattttgggcactcagtagtagcgaccaaagctctttcataaatttaccagtatttttttccataaatccagtaagtgaaatttgaacctgcttcccattcactgcctgttgaataaaaacagaggctttatttaatttgacattttgactgattcataaattcactacacacagaaatcaatatacaaaaaaccattattctcaaacaaagggaatttggaaaaaaatcaaaataatagaacaagtcttgctcagttagatatccacggaaatttaaccgtgcaaatttagagaaagttggaacatggtacatacaaactaaatccagtttgcgataataacggagcaaataactagtctctcttgagaaaaagaagaaaaaaaaaaacactacgccctaaaaccaaactaccttcccatccaaaagaccataaatgaagttgataagcacttcatcttcaaacccgagcagttcagtcactctggtagcaatccacggacggataacatctgcactgacctttgtcatgtccacctacataggatacaacgcccaattaataaacctaaaaggcgaaacccatcatttcaataaattttctgagattacccacaatataatgccgcaatacaaattattacacaaaccactaaaaaaaaattaaattatcatcatgaaatcaggaagaaaacaaacacgaaccaagtgctctaattcaggatgaaatttctgtgatttcaacaactttgcctgcttattggagaaccgcgtgtcctggtcagccgacgtaccctaaaagaacaaaactcatgcagatttctcattttaacaccaattcaaagtaaaaatgtagatagtaaaactcagaaatttttaataagcaatccgaacaaatatacgtatataaagatatttgaacagtagcgagtaattgagattaaaacggagaattcaaatacaaccagcaaacaaaacttacccggaaaaaccctcctgacattttctagggtttcgataaaaacgaaaattgtagaaatgctaaaggaaactagatcaagtgagtgaccagataagataaagagaaaggaagcacagaggacgaggttggatttacgccatggatttgatttgtgaaggttcagagtgggaaggaagaaaggggtgtgaatctgaagagcgatgtttgtagtttgagctaagtgttagtatgggaaagatgtgagaaaagcggggactgacctacctgcaaaattttatttaaaaagaaacaaattttaataattttcatttgggtgtctatacatttgctaccttatattttttctaaatacgtcaaatattttgtatttttaataatatttatttagtactttatatatatatttttttttaatattttgtattttaataatatttatttaccctatattttaaaatcatacatatgtgtcactttaaatttaaattttttttgataaaattttatttacacaattaaattatctaaaattttaattaattacataaactaaaatttatttagttaaaatgataaagttgtattgattaaattttatcttaggtaccaaatatataccaattaagtattattgaacacagagtaccaaatatgttttttataaaaacacaagatactaaatcagattttctctaattaactccaaaaaagtcttgccagctggcatgtgtgaaagtttctctcaaggtttcgtttgtttctgcgtttgtcgatcgactggtttgctgcaatttctctggttcctgcgtttgtcgactggtttcgatcgtgactacattgtgataggattgttgcgattggatttttctatttttttctgtttgtttgtgatttcactagtggatttcttcaaagcctttggtcgttttttgttttctgcgtttgtgactgactgtt

SEQ ID NO: 79194 - DNA, 2442 bp, Cannabis sativa
taattaagtattttgcccttgaatttattggttgaaaaaaattatacccctcaaattattattgactttaaatattctcttaaactattaccattattgaatacgagacttccgttaaataattaacaattttatatgaaaactaccatattttttcctccgattaatgaatgttactgccaagtcatgcctcttttataaaataaataaatttgacaatgaaaaaattatttcagagagtaaaatataataattgtcatattttggagaggtaaagttgataattatttaacaaaagtttaataattacaaataataattctttttagtaatatatatccataattttaatattagataattgcacaaaaattccatatcaaactatttaaattattatcgtccaattaatctattaaccatgatttgatgggtataatatagaacaataaaaaaatgagcatgatatacattaattatatatatatatataaatattctcatactaataatattgattattcagatctctgtactgtacgtaactaaatacataattacaattacgattccctttcctacaataattatgattgtaatatacatacaaataatgtatacaccggctcgtaatatcaatgcatttatgtcttattatcataagatgatgactgacattacataaaataatatattctttcattgatgtatatatgttaatagaagaatttgacacaaaattatggtggtggggaatgggagcacataggtataaagactagaaattctttaatattttcatacatagaaaaaaactgacaaaaagataaaaggtattctaaatagtgacccatacgaagatgatgacgacttaaaattggccttgtaagtactgcacatttcaattccacatgcatgtgtgttgcgtatggggtttggatttgaatcatttgattttacaaataaacccaattattttcattttcatagttatcaagctagctagttgggccgcaaaaacctcactacacaacaaaaacacttatataatattgttgtttattacttcttaagattgtagagtctccacatttcaaaaaaaaaaaagatggtaaagtctcccacgcaataatgactagccatgactattgtgctttttcatgagaaagtggtttgcgtaacttaggttaattcgtaaccctatacatatatatctgcatttaatgtacatatatatatatgtgtattgtaaaatccaaaagcctaacttaatgaaaggaggttcatatacatagtggtccaaaaaagagctataaaaattgtatcactgtatagaaactcgagaacgccgtaatggaatgcaatttgttttgctaaatatgtgtgtatacatattgacaaaacaaggggaggtgtatgtgtatatttgactatatatgcaaacataattacaaattaataaggattgctttcaatatggttcatgttaaaattatcctgcaaatagagctcaataactaagaataacatcgatctatagataattcatgattattactttaaaataattttaggacaaattctatgaacacacatttttacactattaatattaaatggaactactttttgcgtttgctgtaaaatagggaagttttgaaatgattactgaataaaaaaatcaactcaaatgggagaccctttaatgttttttttttttttttggtattgtgttacgcgcttggaaaacgggatatacattataaatttttttacttttagttacaataaaatttgtaattaaaagtaaaaaagttgcgactaattataaattatgatttttataatatgactataaggtccgtggcgtaatattaatcacaaaagttacagtttattgtgattaaatgtgtttttcgtcacaatatatttgttgtgattaaaatattagtgataacttctaactaaatactatgttttaatcacaagtaatattttgttgtgactaaaagttatatttagttacaaaaatattatgatgtcactaaaaagttgccactaaaaataataattttttaatagtaagatatagtctccagcaattaacgagctaccaacaatttagtaattatcaaacaatggttcaaataactaaattactgattaaattacgtggtactagctagctagctagctactacatttgaaataggttgtaatagtatttattaattaatgtcatgacatatggtgcatcatgtgtaaattaatgtttagataacgataacaaaactactcatgatcccagagagagagagagagagtaataaaacttggaaaaataggcaataggtgctagtgctgtatcttatttcctaagcttttactcaaaattctatgtcgattaattatttaaatatatatgtgttatagagtgaagat

SEQ ID NO: 79195 - DNA, 3478 bp, Cannabis sativa
tttttttttaattgggggtcattaaataataaataatcactaattttcttctttaatatttcctcatccaagtaaagtctaaacaaaaatcccaacattttcattagtttcttcctttaaaactttcaactttattttattaattttattatagctcatatcctaatccatagctatttattatggatcacattaagtagttaaaaaaaaatcttctttttcccttaattaattaatctttcttgttttgtatgatttgagtttgactcaacacacaaaaataaaaataacaattcctttttattttattttttaaaaaaattattttcctattgctgatccttttgtatttatttattaataattttaccttaaatatattaatttttatatgtagggtatctttgctcaaccttgtaatcaatccacttttgttcagtcttccacgttaactccatttctgttcttatctttctcttcacccatttgggtcatcattgatcttgttctaggtaaagaaattaatcttcttcttctttttttttccctcaatttcgattttttttttttactgttgggaattaattgtttctattttttatttaaaaaaaaaataaaaaaatctgggtcgagtggtggacagtgaggtctttagggatcaatggaggatttggtagggcctagattatacagttgttttaattgcagaaaccatgtttctcttcatgatgatataatctctaaagcttttcaggtaagaaatttactttttattaagtttttttttacatttttttttgggtgatgatcattgttttgaaagggtttaattgtagggaaagagttattgaaatgaaacccatgtttagtttagatctttgttagagttttttattagtttacttactaattttgtttagacgtttctaattcatgttcgtattcataaattagtagtgcatgcactcagagtggatagtaaattagtttagatggattcaatgtactactctcttttcaatgaaatgtttgttcatttttttttaaaaaaaaaataggataataactttgtgatctttgtgcactcaaggaaacaagtttaagatatcccaaatttagataaagaagagaacttttgtcatttatattacataaatttggattaagattttcttagggtgcatttggttattcaaaaaacaatccttttaacttaaaaaagttacccaaatttagatttgaacattgttatataaccactaactatgtttggtgttatttgatttggttgcttataacacaaacaccttgtttaacccttttattttcaacacaatttttgtacacttgttagggaagaaatggcagagcttttctgttttcgcacgcgatgaacatctctgttgggccaaaagaagaccggcatttgatcaccggtcttcataccgttgctgatatttactgcggcgattgccgtgaggtgttggggtggaaatatgtaagagcttatgaggcatcacagaagtacaaagagggaaagttcatatttgaaaaggcgaaaattgtgaaagagaattggtaacttaaaaaactaatggcttttcttctttaatttctatcatgttgatgaaatttttatcaaggcttttggtttgattcttcttgtacagaaacttgtctcactcacccatttgagatttctcattgttttctttttttgttcatattctcttcttaaagttggaagttgtaaatggatgatcaatttaagtgtgaatggtattttgtaaactcccaaggccattttcatagtcaatttggattagtgaagtgtaataggtcaattgattatttctttgcagcaatttaggatggaatattatgatgttgcttaagagattttaagcttaaaatttgttgtgaataattataatcataaccaaactatgatgctcagatcatcaagttgaataatttatctggaaacatattctcaaatctcaatataatgcttggtttgagttatagaaaatgcgtattataagaggaacgacatgtcgtttgttgtcgtttttggtacggtgactcaattatatatcattaattcatgttagatgtcgtttttacttaagcagtcagtttaaacttgttagataataaggtatggtttattttctctctttcattttctttttaattgctggtctcccagctttttgttgtgattggtcaacacttaagatctaagttttctaagctcggtcaactcactaacactaaggatataacataattaactaacaattttgtccaagcaatccgaagtaggcacctagtgtcaaaataaactttattaaataatcagctaatcgagttgctcatgttgttgctaggcatgtttattttttctctggttgtagcattttcgatcataatctttgggctgacttaaaggccctcttgtatttagaatgcttttaattcaacgaagttgatatttcatttaaaaaaaaaacaaaaaaaaaaaaactactcattgcctatataaacaattagtctataataactcggtaccatatttagtagctccaagaatttagattttagagtattttatgaagcaagatttcattagtgtgtgtttgtaacttagttatgtaatttctctcaagataaccagccttgggagctgctctagccgcagagtagacaagtgacacaaaatcatctcgatcgaaccacgtaatgtcctcttgcaacatttttttcatgctttatgttttgttatcttagttacaatttcatgattttgattctaatcttaaatttgttgtccttgttgttttctgtttgtgttgtgtgtgagacagtgttacaacacttctacaccatccttttatctcttggcgcgagcttcaccaccatgacatcccattgccttgctatggctcgagttcgacaatgtttcttatttttggagagagaataattctattgattaacaaacaaaatctggtggaactttacttagatcaaaaacttttgatctttagttaagacaccaagaattcaatctaaaacttcattaactttcgaaaggttagtctctccaattacaaccattcgagagagttgttctctcctagttgagtcaaactcatctattttcaagatcatcaccatcctatatatagggttcaggcaagtacaaaaaaacaaacctgtccctttattaaaataaccacactaaaggtttgttaagtacaacgtgttgtattgtattatattaatattatttaatacaatattatgtttggtattaatttgtatcattgggttgtgtaaaattataatatctttacaataaactcgatcccaaccctgaccctggcttggactcgagtctgcaccccattcctggagagtgttttgtaaaaatagactttataaaaaaaattattagcaaaataactttata

SEQ ID NO: 79196 - DNA, 3838 bp, Cannabis sativa
  modified_base (30)..(55): a, c, t, g, unknown or other
atgatagattttaaaaaagaaggtaaaaannnnnnnnnnnnnnnnnnnnnnnnnntagagtgtaatttcctcaattttaattgtatttttacacttgtagcagatgggcctaaactatatcatttgatttgttgggctattgggtaattgggccttgaccttgattgagctgggtatcaatgtattttttttgggcaaatttcttctcatatacattgcactatgtttggtttaaaattcttgtaatattttattttatatttatttaggaaacctctaatagtcatgatttatttatcttaggccataattctctaatttttgaaccactaaattaaatttattcattaggcactttcatcataaaaagacaaaattaaattaattttcaaaggaacatggattgcgtttttgaattctttataatttgttttggtcaactttacaactgtatttgatcttatgtagtatttgcatttgttgagaacatacacaaaataagggcttgagagagaaagagagcattattggttaatcggagtagagtcgatgatagttgactaagaacagggccgacctaagcatgaggtagcttgggacattatattaaaagacctctttttttttatcatctcattatatatataatataataaatattattttgataacgtatacataataaatattcataacatcgaacattcatttacaaaaaaaaaaaaaatttgataaaaatttgttgtcataatacacatgattttaaaggtcaaattttaataagaaaaataatatgagaaggggaaacacgctctgctagggcacatatttgcgattttggcaattgaggccttcttctccgcagcgtaagctagtgccatggccgggaggggggggacctcgtaagggttcaaaaccatctacaaagaaatcgaaaggacctcgtttgtctctcaaagaagcgaaggtttgtacagaagctctaaactatgattccatggagttctctgaagctgacatagacgatgaattgacgatgctggatgacgtgttggacacaaagaaacaagaggaagatttggagatgggacttaaaaagcaatcaattcgtaaggatttcgctgactgtatgactatcttgaaacatgggaaagaacctagatcaggtaatctttattctcctctacttgctctgagatttgatgggcctgttatgggtgaatgtgggaatgctagtggagtaaaaatcaaaattgagataggatattgaggaggaggtgaactattgggctgtttccttagttgctatattcttggagcaaatctccctttatctgtaatggagggtttttccaggagagtgaaaaaataggagtattgataagattggattactacaacatggtgtcttcctgattaggttcaattcagaggaacaaagagatggagtgcttgatgggagttacctattttttgatagaaaaccagtgatcatgaaaccatggttagaacagtacaattatcagagagaagaattagccaaaattccaatataaatttaggtccataaactccatttgaaatattggggtaataacacaatggctaagatactaagctcccttgggaaaatagtgcaggaagacacaactactaggaatagagataaattactttatgctcgagttttgattgaagtgaatgttgatcaggaattcccaaattacatagaattcttcaatgagaataacgaacttaacgaaattgagatactctatgaacggaaacaaactttttgcttgaagtctaaagtttatgggcacctccaagaatattgtaagaaagtggatccaccaaaatatgtctgaatgcctaaggccagatttgttccaaaagctaaagtgatcttagagaataaaggagaagagtttcaacttgtggtgaaatctcagaaagttaggaatcttaatcaagttactagtacctcagtggaaaattcattccaagctttgaaggagttaaatgaaggggaagttcaagtgggacaagtttggtgtgttttaggggccattaatgatggagggggagttcctccagcccctaatggatagaatttcaacatggaatttcagggggatcaataacatcacaaagcaataagaagtttgaagatttttttcaaagtaaaagtgcgaggttagttggtctccttgagacaaaggttaagtctagtagtttgagaaacttataccttaatgtgttctcaggttggtgtataacgacaaatttattctatcacctaatggtaggataattctagcttggaaagaaaattgttttacagaggacattataaaagttacaagctaaataatccattgtcgggttactccaacacggggggaaagcttttgggaaacctttgtttatacttacaatgaggctttagggtgagaagatttgtggcaagatttgaggatcttggaaggaaatataagagattcgtggatcatttcaagggattttaatgcagttggtgaatcaaaagaaagaatcagctttaaaggagctaccaaggattacaaagtcctaagtcggctctttaaatattgtaaattagaggatttgaatataatggtaagtttcatacttggaataacaaacaagatggtgttgctagagtttatgtaaagccttataaggttttggcaaaccaaagttgattggataagtacattaatgctgaagttactttttatccagaggtggactgtgatcataacccaagtgtgcttacagtttatccgattatgcaaggagggaaaagcctttcaggttttttaatttgtggtgtaagcatactgatttcttaagaagagttgaagtgatttgaaatgaacaaattagtaggactccaatgttcattatggtgcaaaaattaaagaaagtaaaaaagatgttgaagggctttaataagatagagtattgagatctctcaactactcatagtgaaactttacaggaagtcttgagataccaagaagagttaaataaagatccatttaacctagagcttatagagagggaaaaagaggctcagaacaaacagcagcttactgtaaagaacctcatgcctatgctttcccaaaaagcaaaaataaattgggccaaagatggtgatgataacatagaatagtgcttggttagctactttgaacatgttaaaaataggagacacactttttaaacaaggagttcaaactccattcttatgttacatatacggcgatgatcaagaaactcatgaacatctattttttagatgttcatcattcagccaaagatgcttggaccgtatgttgaattgggtaggaatcgacactaatcaataccactttaggattgcgaactggattagaagatgcaaacaaagtaagttgaagaaagatatttacatgcttattattaatgcttatgtgtatatgatttgaagggctcagaacaaggctctttgggatcatgaggttccaagttaagagttttattagcttagtaaagaaaattgtaaggactagattttactctttagagataaagataggtgagaaagataggtattggtttaactaatctttttgagttgttgtaaagtagggttcttgagctatttgagataataggttatgatgtacaattgttgattgttgaaggtgaaatacaattacttattttctaaaaaaggctcaattttaattaaaagagttgttgtaaagtagggttcttgagctacttgagataataggttatgatgtataattgttgattgttgaaggtgaaa

SEQ ID NO: 79197 - DNA, 2728 bp, Cannabis sativa
aaaatggatgaagtcatcgtgtattgagtctcataagtgccactgcgccagtcaaaaaaatgactacagaaaatgatatatacacgtgaccggggcgtaactcttcttgctcatcttcttttagcatggagaaggcctcaaatgaaattaagctcctcctttttggtccgaggttgatacgtgtggttttttggccagcattgaaatcttcttttgtaagtcaagatttgacattcgctccacctccaatgctctctcaagctttaaaaatataaacgagcaaataaatcaaataaataatacacgagtaaccgtgataagtataggtaattgtattgaatagtgttggaagcagtttaaatgagcacctttgctgctcgtgtactccattctcctaagatggctcttaatctctcgttctcttctacgtactgtataaatggcatagttaataaacaatgaaatcgtgccattaaattgttcatacggcaatatacataaatgtatgtgtttggtaatacctgattgttagtagtccgcacacgttgaatctcggtgtccctttcagctagcaaagatctagcgagccttagctctgactgtagttgattcatctgcagcataaaacatgtacaccactttagtttgaccgtgtcaaatttaatgtggcgttatttactatctatctaatgcccgtgatgtaattttaatcatttaacaacaacccaattgattgtccaacgtagacataaacaaacccttcatttgacagagatgtcatcaccttcatctttaaccagaaacgcctaaaaaatcaaagttttagatccaaactgaaaggacgcggcatcttatattcccatagtggaatttgaaatccacaaattataaccacgaaaacttactagaactgtaatgggaagaatatctgaagagaccccctgaaaggacaaaccttgcaaacatatttgtttgactatggacatttcaggttagataaaatcagtattttatagccttttatctgttagtaaggttgtacaatgatccatcgaaccaaatttagaataggcttacaatgttattgttaaatttattgtcttatgacacctcgcttatcagcagtagtctgaaattggaatcatccaattcccaaaaagacaattctctaacattttttttttctttactttttacgttaaaattgctcacaaaatcagcaagggtaccactattacctcagcagaaagcgttctcagttcttgatcacgagctgccaataaatgggcaagatcaacctggagaagcatataatatttcaacatcaacaaaagaaatcatcacctaaggtgaaaatcatcaagaataacaaatacagaaggaccaccataaccacctgaggtgtggaaccatcatcagatcgttcatatttacttaagcactcttgcaatcgaagaatctgcaatgaaataattcacttagatagcttattggcaggattaagttaaaaatcgtaaaccatgaaataaatttttaagacatcagtccattgaacaagccaacgagcattattatctaagaaaggactactatgaacagctatagtatgtattacatcaagacaactagaattataaaatctgctgcataacatacttcttcactcaaaaagtgaaggttttcacgttgatattgcaataaagccatttgttgatcagaaagccgaccagcgtcataatacctggaaacaacaaaactttatgatcagagattatatcatatcgttgaacatatcaagccattcaagaaagtacactaatgcttcttgaaagtactaaagatccctttctgcatgcatgaattcaaacaaggttggaagcaaaaatactggctatacagagtgaggaaactagtcaaataactagaaaattacctcaaaccttctaatgaacttgatggttgaagtggagagtacaaggacttcaagacatcaggttgggagtttaaagagttgtactggtgcacatagcctagaagcaccaacatgggacaacatagatcaaaggatttgatagcagtgaacatgatactgacacattactcagaaattccatgccctaattacactactaacaatgcaaaatgagcagataactcaccaatatagagactcataaatgatccagcacatattgcttcaactagcataataactctgcaaatattacgagtagacaatataatcatgagaaatagtcctcaaagtaactaaacattatcacctaaatcttacttatacattaaaaacggtaatctgcattgcagctggtagtgtacatacctcaatatagcagagatggagagaataccggtgtgaggtctccaaaccattacaagtagcattgcagcagttcctagcagaagaaatacacccataaactttaactagacataataatttttgtgtttcctaaaatcatcacaaccttagatgttgagcatagtttaaaaccccttagagtatcctcacacaaaacaaaatcacatatgtagatttatgaaagaataattggaaacaacaaaaagtaaagatagacataccatatgcaatagtcgcaaatggaagccgaacgatatgcttcaacttctggctaaaactataataaccctgcatacaaatacacattccatggttcacaaacaagggtaaaacttccaaaaagtactg

SEQ ID NO: 79198 - DNA, 2304 bp, Cannabis sativa
ttgctttgtagatgtagatacatatatttagtttattttttaaaatacaatgataagattttttttgttttttaattgacacgatgtgcaataatatatattgacatattaattatatatttcattttgaaatcaataagacttcattatttctattatttatgtaactatttatttaacttttaaaaaataaattatcatttcaactattactatctcaaaaagaaaaattgaaataaaaaattgaaagaataaagttgtaataacaaatgtcaaattctatgagaaaaaaatgtaatagaataaaaagataaatcaaactgtcaaaactaaataaaaaaaaaatcgtaatataaaaatatattgaagagttgatattgttttgcttattacaattaggttaatattttattattttttatgttaatttgtagttgtctttttgttattttttttatagttatttcatatttttattaatttgttctaagataatttttaagttgtttttttattttactgaaatataatatttttataattttgaaatattaatataatatttttataaacttaatacagtacaaatataaaaaaatttataatcgaatatttttataaatttctaattttttaatattttttaagttcttccaataaatattatatgtaataaatttgaattttcatctcatatatattaaaacaagtatatggttttctttcaaaattaaaaaataaaataaaataaaataaaaattatcaccgaccaatacggatatgataagattcaaattggcaatccatcgaaaagaaaaataaaaatcatcaaataaaaacatgcaaattctagaaaagactataaaataataaaaaaaaaaataatgagaaaaatacagtacttacatttattttttcgaaaatactacagtacttacataatatattgtttctgaaataaaatgtgtttctgaaaaataaatatataaaatatgaaaatatagaaacaataaatcttcgcatgcagtccacgtcgacgtaaaaagttacaggtgtcacgaccaccttccacctgtccaaaccatcctctactttaatatcttcgcattccttcatctccaccgccacaacaaacaacccctcatcccatttcatctctctctctctctcttctttttctctcactaccttcatcaatggcggactaccagagaacccaatacggccaacagcagcaacaacaacaccaaaccccaagcgatgccatgaaaagcttcctccccgaaagtggtccctcagctcagcaaattctcaccgtcgtcaccctcgtccctctcggcggaatcctcctcctcctagccggactcacattagccggaactctcctcggcctcgccctctccacgccggtcttcgtcatcttcagccctgttttagtccccgccgccttcgtcattgccgccgctgtaactggattcttgacttccggcgctttcggtatcacgggcctctcgtcactgtcttggctggccaattatcttcgccggatcaggatgacgccttctacggcgcttccggaggcggcggactatgctaggcggcgcgtgcaggactcggcggcgtatgtgggccagaaaactaaggagactgggcaagcgatacaaagcaaggccgagggaacgaaaacataaacgagcccattagatacttggatttgattctctcaacctcgtcaccttatttctctcttgtttttctttcttttttttttatttattttgtaatgtttttttttttgggtttagtttaaattatgtaatggttgagttgtaagttgtaaactttttatgtatgtaataaaagcatgtttaaaaaataaatgtgagggaatgtggaagttgtttattatcttctaaaagagctagcctagtccggccgatagcaatgcatttttatttatataaaataataatatgcacaaaatggttgtgcataattaaatgtgtgcgtcaagattagagatgtgtctacattagtttgtatatttaagtagtacttaatcacaacaaagtatacccaagaagcctcaagtaactatgttcacgcgaaactatagaaacatatattaaattcaagattagttagtgagttaggactgttaaggatgttagttactctttgttatttattttactgctatatatagactcatttcagaatcaagattctgtccaaatattgtatcccatattatgtctaaccaatataatgataacacatcatttaatttatttttgtaaagtt

SEQ ID NO: 79199 - DNA, 6629 bp, Cannabis sativa
  modified_base (441)..(460): a, c, t, g, unknown or other
ataaccattgaattatcattaaattaaaagacacaattaatttcatattttccgccgcaaagcgcgagttgtttactagtatcttttttaaatatgtgcagagaatttcaaaaaattacaataaaaagatatatttttaaaaaatttaaatttgaattacaatatttaaaaaaaaaaaaacaattttatggccacacttaatataaaaaatatatatatattaaatatatatttatggatatggtcaaactattactcatatacaaatttaaaagcataataacataaaataataccaagctcttatttatttatttatttatttgaactttgtttctagattgatcaaataaactaggggcaagttaaaatctactatctagacaaaagaagaagaaaacctagctagaagctaaacagaaaataataataataataatnnnnnnnnnnnnnnnnnnnntaataataataataaaatatttatgattaaattaataacatgtatgacagactctacacttgaaaaaacaaattactattaataaaacatagacaaatttcatctttacaatttttgcatggaagaacaatgacttcaccaatgctgacttgacattattaatctaaaaatcaaaacatatttactaaaatatattgaagttcaaaaaagagcttttatacacttgtctaattcataatgtgatatattcctggacaaaatggttggtcaagaaaagatttaaatgaaaagcaatgagaataaaattgataatattaatttcaaaaaaaaaattaagaatactaaaaagtcactatcaaatcataacaagcaatggcataactatttttttttttctttttctcttttttcaaataatccttgagattaacgtttatatgaaattaacaaatatagattgttagccattaaacagagaacacattgagttttaagacaaaacaaatgatcatgaaatgataattacagacctggagcaaaggtgagctttaagccttgacattttgtttagtgataaattaaccgtaataaaaaattaatcattgcatgcacatataaagtcaatttacgcattttctacccctaaaaattgaaaatagcagattcaaaaggatgagaggcttccgatgcaacctcttctttacacgagcacaatttctaatgttaggcttgctataactgtattatctttaatctcattattgtatataaccggaattaaaactgtcattgcaacttaagtatctttccattaggtggggggaattgaactctccgaaatggccgtcttcagtggagaaaggtgggacactgatactgaagactttctaactggtcttcactcttcagaagaacataattataaaaagcttttttgagtgtggcagtgaaaagcttcttcgaagcgtacgaaaaagaagatattgtcgcacaaaatagccctaatatgaggcgcatcatatcacacaagctttggaagctcttggaatccagtgatttcagatatatagatacttggtgtgagaaaaatatatgaataccaaacatctttatttacctaataacaatttagtaattaagttacctataaactcctggaatttatattttccagtgatgttttctgtaatatataaatttatattaatgtatacacaacagatgaaaggctcatgtattgctaatctctttaattagacattcataagaaaaccatttgttttatttgtacaagttttaatcacagataacggccatggttatgacttgcaaaattagaaatacaatactaatgttgctcttttgagtccattgtcagcattttgtcagaacaaattgatcaattatgttcaaaaatggccaatgtagagcatcgccgatagtgtagcaagtttaacttcttctaatatgaaagcattgccatgtacatgatataaaaattctgcttaccctcaaaaattctgttttcaacagttacccaaccaagctcatctagccatgcttcccattttgttatgcagataggtctgtctgaactctatactcctctccgcaagagcatttagcaacaagagaaattccctagggaacaaaaagatttcagaatatgagtcgagctctttcagattttaaatacttgtacaatagtaaacacagtaaaacaaagatagtggactgatggtaattattttatatttctgtattttacccttattatttcataagctggatatttattggttaaatagacaaccatattggtaaatgggaggtctctctaacaaacttcctaacatggtctttgagcgaaatttacaaaccacatgaaatttttatattgatatcaaaaccatttaattttatgcaatcatgctatattgagttttgtaaagaaagaaaggaaaaaaagaacaccttattagccatttaccttaagtttttcaacttgttcccgcagggatttcaagtactcagtctctcctgctttatcagataaaagagcattgtgttcctcttctagagtctttatatccattgccctcagttcaggcttaagtagcaatgaaaaggggagacaaagtagatcaaaattttttcatgataggaaaagactgctcagatgaattaatgagaaacagaccaactcaatattaagaattgcattattacattcatgtttttcttgtcatcagaaactcgaaaatccaaccgaatttttggataccattccaaccatctaatctatgtgaacgaattacaattaacaaagtgcatatacaatcccagtattaagtctaattagaagggctggaggaataggtcgaaacaagtaaaaatgcatacacgtcaataccagagaaaacatctaacctgacaatcaattgctctacaattgactaggtcaatggcctgttccatctgaaaggcacaaagtgagattcagactgaaaaatatacatgccataatcacttcaaatattaatagtgtgacaaaagaagccacatcaaattacgttacctttgtgttctccataacaagtttcaattttatctctgttatttctgcaagcttggccttaactgattccaacttggcatttgaactttttgtagaactattttcctgttattctaagaaatttattaataaaaacatcaacaattttagatatacaagcaaataaatgaaagtctttcaccagatggtcggccttgagcaggttgatagagctatactcccctgcaaagagaaaacaaagaactagatgtaaaagcaagcatcatatgtttaggtaccacattgttgtgcatcgaaaaattggagttacgatacaatatttctaaattttaacaaatattctgctaacaaaattgtataattctaaaattcagacagtgtgttcgttctgaccctatgaacttatgaagggtttatccacgtgaagatgcagctttttctttctttttctgacttttcttcttctatttttttttttttggaataaattgcctatacaggtcttatgatttacttatctctaaatcagcaagattttacctatgatatttttttttctccaatgaatgctccaatagaagagacagaaacaaaagttaaaattcaatagttggaaataaatcaagcaaactatcttatacactaaataaaattgaggggaattttcatgttttatttataattttacgacttaaagtttctatttacaaatatacgtttgtaaatttttaaaattacaaaaatagaattttttcagcaaaaagtgagaaaactaaaaaataatgagaatgagaaatcaagaaatcaaccaaatcaacctatcaaccttacgaaccttacgacaactataaatcaactataaaacaataaagaaataactagaaaagcaaccccacaacaactataatacaactataaataaactataaaacaacaaaaaaacagtttactgtttttactgaagaagtatttttgtaaataaaaaaatccaaagcgtaaaaatgaagcttttttcgtgaagtttttttcatattgacgtatttttgtaattttttttaaatttttggtctattatgtaagaatttctaaaactaaacataaagctataatatatatttatatatatatctaactaactgaatggtagttcactagcactgcatgtgcatttgacagggtggcagttgtggcaactacatatttgattgccaacttgagctggggtccaattacccaactggtgtttgaaagcataatggtacaaataatctcaagccaacatataagaaacagtttttctacagtgcagtatttgacaaacaacttacaaagaacataaagtaacaaattcaaaaatcatattaactgaaatatgacaagaaagtctaaaagcaataccttcagatttatgcatttgtttatccaaattatccataacctacataaattcatttttagtagggtagcatagtaactccaatctgcaggactttattgactctcaaaatgcttttcataatcaatcgtaacaaagaacgaatatgaaataccacataaaaatttatcttcaaaatggttttcctagtcaagcagtccagttaaaacgcaaaatgaagttgcagttacatggctaaggtagaatgtaggtgatggataagtgatccagaggaactgctaatggcaattaaagttttgagtagtgaactaccaaaatgagctatatgggaaccacacacatgaacacatactaagcttgtcactccctggaaagtgaactaccaaaatgagctatttgggaaccacacacatgaacacatactaaacttatcactcctgaaaagtgacagagaatggtttctttttgtatttcttaatggaagtacaacaaatatgaaagctgtgatagtgtataatgatgctgaataattcaagcaaaaaagaaaatccaaagaaactgtctggattcttggtagttagacagcaatgaaagatatgatatatcatgtgaaaaaagaaaaccaaaacaggaagtgacaacaaagtaccattcccagatttcttgtttctatcccagtcatgagagttttgaaggagtcctaaccacatttgaaaaggacacatccttaggacaaaatactgtaacataaacattcatacacaaggaaattcagttcaggcagtaaccatttgatcctgtaatctagcatttatgtcttctgcaactttgaggtagtaagtcctgtcaatggaaatcttacactataatatttggtatgaagcacttgaataattcttattttcaagctacattaccttttctccgtcagcttggcagatacgctaattctttcttgttgaataagctccaaagtctatttgttgaacaaatttggagagagaaacatatacaagtttcttataaattttattctattaaaagaaaattattattttcaaattagaactaaaccaacttgaacaaagaaaattagttaagctaagtcatccacaaattagatagtgtattgctttcatttgtctacctgagaaagagtggatgaatcggactctaaagaagatattttcctatgattttccaatattttagagcatatctcgccctttgtcttcaacattgcttcattatccttattgaattgatctacttgtgattttgctgcaaaatcatccaggacagtcgattgaagacgacgacgatgataattacatgaattgatatcatcaaagtgaccatgcatatttcacttatttcattctagaaagaaaattagatcgctacaaagatattgatactgtcaacatcataggtattaaatttgataatattcaaggcaaatctaaagtatactcaaaccgattcgattgcaattaccttttcactaagatagtaagatatctaaatgtttaattgtgaatgcatttatgtttaaatgttggagtcagattcatagacgatgtgatcaatcaatcaagtatagcatgatgcaaggaagaaaaaaaaaagaaagatcaccataactaagatcgttctcaaaagtgtgaagtgtcgtcaattgcgtttgttcttccactgagaccttcgccgcctgatcttccacatctgttgtttggcacatttgaataccaaacaaaagaggaaaaaacaaaatcaaaatcgaagttctccacctcgattagtgaaaattcaattgagagagagaccgttcatttggaagcgcaaggtcttcatatagtgcaagtagtcctccatttccaattcaaatctctaccggtctgttaaagatgaaacctccggagctgtagtaagaaacgttgccgacggtagaggcgaatttcacgccgatgagaggaagggcagaacgcgcgcgcgcctcctgctctgcgttttcttttttctgtgttgcctttgtttcaaatgagtagaaaatggagatggaaattggcggttaatgtacaggcgtccccatctccctacctatttataccccattcccgtctaataattaacaattcggagttggagaataactatctggggaacccatcaggtatccattaaagtaaaatgaa

SEQ ID NO: 79200 - DNA, 3221 bp, Cannabis sativa
tgttgtgaaggagcagccaacagggaaagtggttctgcaaggagcacttaaagatgggatctacaaattgcaaccagccagtactcgtcactcgccaaaattccatagctcaccttctgtttttgtggcaacaacatctactattgctagtcatgttatttccaattccttaaaagacatttggcatagaaaactaggtcacccttcaagtagtgtcctaaatcaagtcttgaaaatgtctaatgtaaaggtttcacctaatgataatcaaaacttttgtgatgcttgtcaatatggaaaatctcatgcacttccattttctagttctatgtccaaagccaccactgttcttgagcttattcacacagatttatggggaccagcacccataacatctcacacaaacttcaaatattacattcattttcttgatgactatagtagatatacctggctatacccacttaaaaacaaatcagatgcactagaggctttcattcactttaagaacatggcagaaaaacaattcgataagaaaataaaaaaattaagaactggttggggaggtgaatttcaagctttttctcaattggttctaaacagtggcattctctttgaccactcttgccctcacacctctgaacaaaatggtcgagttgagcgtaagcatcgacatattgttgaaatggggctcacattgttggcacaagctgctatgcccttgaaatactggtttgatgcgtttagtacagcagtataccttataaataggcttcttactgctgtattgcaaaaccagtccccatatgccacattgtactctaaaaatccagattataggtttctcaaaacctttggggttgcatgctttccttgtcttaggccctatcaatcacacaaattccaatttcactccataaaatgtgtgaacttgggatatagtgagaatcataaaggttacaagtgctttagtccccatggtcgcatctatatctctaggcatgtagtttttaatgagcaagaatttcctttcaaaataagatttctcaataattatgcctcagaacaacaagtaagtgtccctatgcctcactcctggcttcatctgccttttgcttctcgaaagtgcacaatctccagcagaaccattatctcgggcatcctcatcaactgatcaggtaatttcttcttcgcattctgatattggttccccaattagtgttgttccttttcactcacctattgtagaatctttttctcccttgaaccaacataaccttcacactaccacaccaacaccagcttgtacaaaacccgaatctgctgtctctttagatgctgaatccatttctcaggttcctacaccagcacctactgttgcatctcaccctatgataacaagggggaaagctggtatatttaaacctcgggtgtttttgggcaaagcttctttttccttggatcatcatgagccatattcagttcaagaggcacacaaccatgaggggtggaacatggctatgggtaataatattatagccttgaaatgcaacaagacatggtatctcgtgcctccctctccttactacaatgtgattggcaataaatgggtctataaaattaaataaaatgccgatagatcctttcaacgttacaaggcacgcttggtggctaaaggttttcatcaaagacctggagttgactttgggaaaacctttagtccggtgatcaaagcttccatcgttcatgttgtgttaaccatagctgtgtcaaagaattgggatattcgtcaacttgacatcaacaatgcatttctcaattgaaccttggatgaagatgtttacatggctcaaccagaagggtttgaagaccctactaaaccacactatgtttggcaagttgaggaagtcaatatacggccttaaacaagctccaagagcctggtacgatcagctcaaaaacactctgttagaatggaaatttgaaaactccaaagctcattcctcgctgttcattttgaaacatcctagttatgtcattttggtactgatttacgtggatgatataatagttacaggcagcagcaccatacatttgaatcagttcataactcagctaaatagatctttctctctcaaggatcttggacccttgaattattttcttggtatagaggtgtttaagagatgatacagggctctatttgtcacaaggaaagtatattgttgagcttcttcaaaggtttgacatgtccaatgtaaaaccaagtccaacaccaatggtggctaacaaacctttgtcactacaagatggggaaccaatgactgatccatcctactacagaagcatggtgggagctttacaatatctcagtcacactcgacccgatatctctttcgctgtgaacaaacttagtcaattcctgaagtctcccacaagagtacattggaatgctactaaacaaatcttgagatatttgaaaggcactctacatcatggcattcatatagcaccaagtgattgtctatctcttactagatactccgacgcgattgggcctgctgcccagatgatagacggtccatagcgggatattgtgtattcttgggtgactccctcatctcttggtcatccaagaaacaatcggtagttgctcgatcgagtaccgagtcggaatatagagtgttagctcacctagctgctgaactgtcttagcttcaagagctgctgaaggagatgaaatttaagctgcctgcaactccagtaatttggtgtgatagtatgagtgcaaatgctcttgctgcaaacccggtgtaccatgctcgaacaaagcacatagagttagatgtacatttcattcgagacaaagttctggggaaacaacttgaaattcgttatgttccctcaagtgatcagatagcagattgtttgactaagggtttgtcaaatttgcatttccagtatctcgttgacaagcccagagtgacaacctcaccctttcgcttgaggggtggtgtcacgagataaatgcaggggcagttttgtcaacactctgcactcccaagtttgttggaattacagcaattcaaatgatgattatccccaactatccctttcattttgttagaatagattttatcaatattccctttgcaaaatatctttgtacacgtggttgattgtaattgatttattccttggctgtaaaccctcatactgtg

SEQ ID NO: 79201 - DNA, 2844 bp, Cannabis sativa
tttttatcaacttatatgggaattattagtaaaactatggcttaaatctaactttgtacatttttgttaattccccttttaagctaaagttcacaagttagcgaatggccagaaagtattcgatgaaatgccacaaagagatgataataatattaacataatttttggctatatccatgaatcaataacaaccctcttatacatcatttgatccattgcctataagaatcatagatagagtttgggatgaacattattataaagagctgcatttcgtataacaattgaatacaagtaaatttttacaattcaagaataattggtacacaacagttagttggagcttacaattttatgtgaatttgtatattttgtacagttcattattcatccctaaaccagtactgaaacacgtagaaaacaaatcccaagcatgatccagcagctacaagtaggacaattatttgaacccataaagaggattcaaaggcctgcagcaagaaagcattccatgaccaataccaaaaaacagagaatattgaacctataattgcaccaacaaccacttggctgagagtatgaagtcgttgcgagactcgtaaccatgtctgtaaacatagatcatcattagccacagatcaaaatggcttctgtttcggaagcaatctgtttatggaaatgaaatcgaaagagctatctgtttttcaacgaaatagtatcaaaaggatcatcatacttacaagatatgaaccaaaaatcaagataaatccactgattgcaagtgtaatatcattaatacctagccattccacaactgccaaacatggaagaaaataataacatcaccatatgattaagataaagctaaaggtagctgtaaacaagctaatgtaagggaattacttgagaaattggcaaacatgaagttaaagaaaatggattgagcatgtgaggagggcattccagggtctgatttcactgcagaagcaggtctttcttggtttagtattcgttttaatgcaacagatagcaaagcatttataatagatcccatggcaaaccaaacggcttctgcatcatgcctcccaagaagcacagcagcaaaaatcccagatacaatccacttactctgtccaaaaaagctaattagctaaaagtttctatgttcatatacacattattatttcacaaagagatattgctattctgatgagagcccaagtccaatctcaactttcattactaattaatctacacactaagacaaccagacaaaataaaattgttaaatttgcaaaataaccaggttgaatttacactgtccaatattaatgctctcacaatgtaaatttatggtcacaaaacgatctcacagtgtaattttgggcttctccaccaaataaatttgtagaatttaaggcacaataaaagcaagagaaacaacaccacaaatctgtttagccatatttttcatttaagataatgaaaatcaaaatataagtatgcttaatctatcagataaataaaaaataagtggaacccagaactctaataaccaataaataaataaagctatgattgagaaactaatcaatgaacaaaatcactaaccagtcgattaagggttgactcaagcccattactcaacaacccagaagacccaccaactaaagcttctttcttcaatcgttttaacaccttcttccccattatctttcctaaaagcagaaggtttaatcaattcaaacatggtgttgggacccaagtgagtgagtttcctccgactctgagacaggcctttggagagaagaaaagaagttgaaagattcgattttgatgtggggaaaagggcaagtgagggagaaactgtaatgggtttggaagaaatgccgggaaagaagtttagactttagacacaaacccaaacccaaacccagtaagatcgatcgaaccctgaaaatgaaatccaaaaaccaaaaagaaaaacagatctgaattaataaatatggaaaaatagagcttaattactgcaaaacaagtaaagaagattttcaagctatattcacttacttgctgtacgtagtagaagcttaaaagacccgtcccaagatgaaaccctgaatcaaatcttcaaaatgaaatttttgaagctctcggaactaccatttggaaccctagctaactgatctatctgggtttttttgctactgagattggttatatatatagagaaatgttaaaagggcacccatgtgcctaggatcctcatgagatctcacccacaccagaacaacctattaattgtggctttattgataaagtttgcatgcggtacgtacgtacgtccctgcaagaaacaaacaaactattcacgtatatggcatgcagtgaaatgggcttggttattgatccaactaaacattcctatttgggtccgcaccacacttaaggtgagtttagttggaatggaatctttaatcacattaaatcagtaaaaactaataattctatcattaattttataattaaaaaaatataaatactaatgtattgttaattattctaataaaataatataaatgacaaaaatgtaaataaaaaaaatagtatatttattgtgatgtaaattttacatcatagtattgtgccaaatttgacacaagattttatatgtgcatgctaaatttacgttacttttttgcacagtgcacactattacttggagatgctcttataaagtattgaaatgccatttcaatgtaatgacttttttacaattttggtagaatgactattccattttaaagtggaatgaattatcattctaatacgatgagaaaaatt

SEQ ID NO: 79202 - DNA, 1077 bp, Cannabis sativa
aaaatattttgtcaactaacttgccaaaaaaggactttacacaattaaacatataatgatatgaaacgattaacataattatacatacaaacacaaatatgactcataaaattcatagatttaatttattattattttttgataaaaatattaggaaaaatgtatttttatgagattctttaataaagtatttattttgttttacatgattaaaagaataaaaatacttatttatttttaattgcttatacttgttataatcgcgtcattttcaagttaagtatgttaacctgaaaatgaacatttaataaacaagtccacctagatttgacatgaaaattaaatgtgtcacccaaatctctttatttcatattatttttaaattatgaaatcgtgttttgtcaccaattgcaaattttaatatttggaaagtaaataggcttagagcatctctaactacgctctttaaacacatcctttagctaaaatagaaagtgagatctaaaaaaaataagctctaattatacaaaaaaaaaaaaaaaatggctctctataaaagaaaatgaatatggagctattgttaggctatttttagcctacgttttgagtcactttttctagttgtttttcttctttattattatttttaattatttttaggaatagaatatagaattatgcttaattatgcttgttttcgcttgttttcttttgttttctttgattttaggtttctacgcttggaatgtatagattggaaaaatttcaaaaaacaataatctataaaatagagaaaattttgaaagagaataaaaataaaacttcaagcctaaattcgactatgttctgatctaattttggacaaagtcaaattataaaagttttagatctcttttttatctttctaacgcatcttgaatcagctcatctagagtttgtatgagtaagttatgcccattttactgaaagaggtcgaagtagaaaaagatgggtctagtagaaagcccgttttttcacttttatacagccgtcgcggcgccgactttgtacaggtcaaggataacttcgtcttttctc

SEQ ID NO: 79203 - DNA, 3699 bp, Cannabis sativa
gtataataaaaataaactataattcacaattatcttgttagggttaataatcaagctagcgtatagcttttctttattaatgtacttaaccctatctttatagtgatgcaagttcacatagtttaaatgctcataaatttggtaataaagtggattgtgtcatttaatgtagataacttgcattctaatttaaattattcaaataataattctttacaagtgggtcttcctcctttggtgacaatactttacttgattgtctttctcaattgggtatataacttccgattgcttaaagtgtttaacgacaatgttattggtcttaaattagccttatccttaccaaaacttcaaaggacaagaaaacgacaatatatgcattaaaccaaaaaaaaactaaaacgacaatatattcattcaaaaactaaaaaaacgacaagggaaattgaacaaacatacagactttcttcctcgagatgagagagtccagtaactgagttagtatttatggagcttagaagatacagcattgtatgcaagatctatttcctctggtgtcatctctatagtttcatcactgtcatacccagtccctctttcacctctcttttgttcattagtcttgggctttttcttcttctccgtcgaatcatcatcttctaaactaccaaattccttctcatatgcccttttgcactccatagcttgcttgtaaagatcttcatttgatatcaaggagtcattgtctcccattccctcaagtttcgctagctccttcaccacacgagggacgaatttccattcttcaattattttccctacctcctgttaataacataatgatttagaaaataaattaaatcaatgtttttgatagcactctagcactctaactatagaggatataataaagaagagaatggattttgtacactgttggggtccaaattaaagttctacatgcatatactagtaactgttaactactcagaacgaaacttcatttttttgacaattatacatgacactgaatcaattacttgttatttttcctctctttaaaattttctcctccgctttacattaacacaagcaatgtgggttatttgcaatggtacctgcttttgttcaagagcatcaatggcatcttgcagacacgttagaaccccttcgacagctattttctttatctcactcggctctggctgtaaaagaagagggcaaagataaactttctgagtcacaaactgcattacgtagataactcagtgacttactttttcttcttgactctccagccaggaaattgtattgtccaaatcatcaattgcccaattcttcactttggaaggagataagtgtgttttggcacgattagaatctctgttctgttatgtacggggatagggaaaacactcagaacagaccagagagaagttaattgcaccaataccaaactatgttctaaaaatgtaccttcgaaatagctgacgtagttgctttagagtgtgatcctccatctttcttctgaaatcttctaggcggggactcttttaattctgcatgcacagttgaaattcacagcgtgatttagtcattcgtcgagcgtacgataggattaaaacacaaggtccgcaataccttgaagaatacagtaaatttaataggccttcacactttcgataagcaacaacacaaatatcccaacaaagatacaatcttgtgaaagtttaaacacttatgtaaataagctacaagctcacctcagctcaacatgtcaaaacttttaatcagtccttagcaattccaaattataataaattaccaaaatcaccatgatcaccaatcaatttaagctaattatgtacaaatgattatattaccggcactggtttcaggtgcaacactgcttctacgccatggtttcccagcatgcatgaggtaactttcaatgtccacaagtttcttctgcgaatgacattctgatatccattcctaacatgaacaaatggagaaattttagaaacaaataatctaatgatgctcccaataagtaagatctatctaatattttaaggaatttttttagattatgaatggagcacaaagaaaagactatgttgccagatcttcctataattttcatctggaggttagagtagccaaaacatactgaaaagtctttctacaaaatcaatggattttaaaccgttgacagtatataacacaatgcatgaacaaaataaaaaacaaacaaatgtggactttggaagtaagatgaataaaataaacctttgaaacaatagtcccacaatcagcctgaacttgtcgaaacttcggggtattagaaaatgcacaaactaagagtgtgcagcctgagttccagtcaggccggaactcagctcccatctccaaagcctgcgatcgcaaaatgccacgctcaggattcacaaacccagatagcacaaacactaccccttcctgtcaaaaacacaattgtaataccaaattagtttttgtcaatttcaaataagcaaaaaaaaaaaaaaaaggcaagctaataaaccagattcacaatagagtaccaaaagtttggagaattttccagttccagaactcgaggcagaagatttcttgttggtctccatgtcattggcacccgaacctctcttactattatgccctttgacttgctttgatctttccctttcactactttcctcacttccaccaaccccagctggtttctttacagaagtatcatccttattcatccatgaagggaggcttctcttcccaacatcatcttggtttggatttgacccagacatgtcaaaagactaccccaaaagtcaaccattcaaaaaatgcttctaaattctaatcaattcttaaaagaattgcagaaataatccccattttgacacaatgataagaactcatactccaaaaacccttcaaccaacgctaaaacagaaagctacccaagtgaaatgtacaacctgatcataaattttggtggaaaaaaattataaaacggcactcagattgtcaaaccaagcaatcaaatgcaaaaaatctgaacggaatataattaaatatgcatgtaactcatgctataaatttcgtcaacaagcgtaaccagtacattcaaaataacagttataatccaaataaagagaaataaataggaaaaagtcgaatcaaacaaagaaaaatgaaatagggaagcgaatgaaccttattattatagttgttgaagaatgaaaaactgagaaaagcttaggtttgtatattgtgaagccgtaaaggaaaccagtagaaagtgaagaatctgggttttactttgtttggggtttttgctgagctttcatttacatctctggttgccaacgccgaagcggttaatgtttataatgtttattaatttagttgattaatattatatgttgcgttaaggtaacaattaagtggacgtgccggagtggttatcgggcatgactagaaatcatgtgggctttgcccgcgcaggttcgaatcctgccgtccacgttttttatttatgcaagattgaaaataggatgtaattcttttattggttaacaaatgtaaagagtgaaaaatatatgaatttttttttcataagaagaaattactttattattctcatgttattttgtttttttaattaatatattt

SEQ ID NO: 79204 - DNA, 5046 bp, Cannabis sativa
ataaaaactaaatgagggcataattgtaaatatttttaaacataacttaaaaggttacacatgtcactcaattaggaagagagtgtaaaagagagtgcaaaagagagtttttctagcactcctctggtaagaggtaatgcacaataaaattggaacaattaaaatatagttatgtatcattacatcattcgtagacattctattcacacagttaattaacaatataatatgctacttacaataaaaaattgattagagttaaagattagttctttgggtcagggtcattctcattcatgctaagtttctcaaaaaaaaaaaaaatcttaaaacaaaatgggggcaataaaaaattgggttaaccaaaatgggcgcaataaaaaaatgttcaagaactcttagctatattcttctttatatatataaatataaatatattgtcaattaacaatatataattaaatggacaccactttgtccctatcggtagagatttacgtttttgttgttttaaaaaattataatttttttattcatatgatgatctatttgtttttttaaaaaaaattgaataatttatatacaagtcattctaaatttgtttatttcctcaaaaaaaaaaaaaagtcattctaaatttgtaaaatttaacatgtagaatatctactataatatataatcatatgaaaattttagttataagttttctaaactctaaaatagagatacacatggtagaatttttctatataaatatatattatacaattttgtcttgtaataaaaaatttgtcaaataattttagcccaatctggtacaaatttgtattgagaaacccaacttgctatattcttcaattcggtagtccaagtcaatcaagccgacgtcccttaatcttcacaacacttctaccattgcatctctcattcacgattttttttctttttttcttttttctttttaatagttaacggatttggttagttccaaattattgaaatttcgttagaggtaattgtaattcatctaaatttccaatattcaatgtatcaaaatttgcttggtcaattcatccacgacattaatagtgaattttaccctcttggccagtagtataacatcatgttatttgatatgaagtcatttttgcatgaggaatgttgtctttaattttatcatatttgctatgagtttgtttttgtttttttttttttatgtctaaaaatgctaattaagtataaaattagtttactccgtgagaaagtaatttaaaatcctaccaagaccttgtcagagatattttacacaataatcttgtttgataaatttttgaaaactattctccaaaatgagtttattaaaaagtctattttcacccatgaattaatcaataaatataatgaggtcttgcttttgtttccttgtggagattaactagcttttagtctttatttctaaatgagtctctgtaactggttctaggtaaattggtaatcttgatagtatcaacaaaacattattcagttaaaatttagatgaatcagtaatcaccaatatccactacaagagcaaaccccattcttgaaatggtgaaatcgagtagtatctctaacaatgatttcccgtttttctaaggctgagatgaacatggtggcccggtgacaatccccacagactctcaagttcttaaatactcgaattggaatcccttcgggcaatctgaggaggccgaaagcaattgctagcttttcgctgtgccacaacagaagctgctctttttgcttctttcccacatcatgtagtgcaaattcaagatcaggaacatagcctgccaacctcattttcttatccaattcgactagttttttgtgtatacagacaagttcaggatgaaccctatctcctgatctgaactcgtgaatctcacctttcacctcaatccaactatacccgggtgtcttaactacattattttctttcatcgatcgccaaacttttgaaacacaatcccatctttttgtcacagcataaacattagcgagttgaacgtagccagctgcgcttgatggatcaagagaaaggaggtttttcgcagcatactctgccagttctaagttcttgtggatcctacaagcacccaaaagggtcccgaaaatggctaggtggggtttgaatggcattttctttatcaaatccacagcttcaatgagcctaccagctctcccaaggagatcaaccatgcaagtatagtgctctggcttaagttcaactccatagtccctaatcattgtgtcaaaatattgcataccgatatcaactaatcccgaatggttgcaagctgataagacagctacaaaagtgatccaatctggctttgctccttctcttttcatttcattgaacagattaagagcttcatgacctgctccatgttgagcataaccagtaatcattgcattccatgaaacaacatcttttctaggaatttcatgaaacaatttcaaagcatccttcaaatctccacatttacaatacatgctgattaatgaagtccctgcagttgtgtcatcatacaagagagatttataaatcaactggtgtacttgctttcccatctgcagggtcgataggttactgcaagccaatagaacactgctcaaagtcgatgaattcgacttaataccggattgaatcattgcccgaaaaagcttcaaactttcctctgctcgaccattttcaacataacccgagatcatagtattccagctcactacattcttcactggcatatgatgaaacattttctctgctaattcaatcttcccaaacttcatataaccagtaaccatggcagtccaagccacaacgctcttaacaggcgctaactcaaaaaactcaattgcagagtccaaatccccaaactccacgtaccctgaaatcatagcactccaagaaacactgttctgctctggcatttcaagaaacaattcacgagccctctccatcttcccatttcggataaaacccgatatcatcgtattccaagacgcagaatccctgaaaggcatcttgttaaagaaccccatggcggattcaacgccagaattgtgcagataacaagccaacatagtgttatacgaaacagtatccggttcaggaattctatcaaacagttcatgggcttctttcattttcccaggcttcttcgcaaatccagataagattgaattccaagtaactgtagtcctcacgggcattctctcaaacacattaagagcagaacccaaatccccgaatcgaatataattcgtgattaacttatttgacgagactacatcaccagaacccaaatgagccaacgatggagattgattcaactgaacagttgtgattttcttgttcacgtaattggggtaaaccagtttggttggaaaaatggcacctccaccattctttactttgaaataagtggagagaaaatggatttgatgtttgggttgagagaaaatattgaacgatgctaagaaaggtaattgggttttgttatttgttctaagatagttcatttatcatgatttctgggaggaagaagaagaagaagcttcaacaaacagttttaatggtagcaaagacacccgactaaagaagcgttacagatgacatcaaaatggtacgttttatcttatctccacagtgtataatccagtcgccatatctgtttgtggatattaatgaagtatttgaacataggaacggaaaagaaactgaaggaatcgttggaaggagtagatgaattcgccatttgtaaccagttggttgagaagaaggtgggaataaaataaaataaaaaaacgtgaaaggggtaaaaatgaccttacaatgaaaaatcaaaattaattcaaagcaatgccaatcaaccgacaaaatccaacggcccatattaatcctactcctaatagaatctaaatttgaattatattaaatagccgtttgagtgtttaatatcgtttttcttctcaccctttttctctttcttaagctgattgaacacatttgataaccccgaaacttctaaaggtcagattattcttaaactttgttaattacccaaaattaatcatttctttgagtgattaattatgacttctccacaagtaattggtgatcctcattaccatatatcaccttatagacatagttatactacccaatctaacacaatagaagaagagccacataatgtttgtttccttactattaacttaaatgttaagttcattcttgctccacacacatctactatggaagtcgaagatgaagaatctttattcgatgatgaaacgggaaatctaactgcttttttagaaaatattggacgaatttcgtatgagactttgatgaagagcgacgttactgaagccctagttaacattcaagatatgcttgctgaggtctatcttccttctctctcttttattgccaatggcattattgattgcagtagaaaaatgatgaacaacaatgattatgacaataatttgaatgaagaagtcggtgttaatgtttccgttgaaatttttgttgatgaactacctcaacttgattgggatgatgatgacgatgacgacaatgatgatgactatgatatgaatgatgttcctattcattttgtggcggcgagtgaagagtcaatcgagaaattagaaaaagtttgggttaaagatgatccaatattttgttcgatttgtttggaggatgtttctgttggtttggaagctactaagttaccatgcactcacgcgtatcatgaaaaatgtgttattgagtggctataagttagtaaattttgtccaaattgtagaattgagatagtttaataatcatgtagtatacttaacaaatttttactcatatatataagctatgtaatttggaccatttttcttatatataaagttgtgtattatataaacatcttgaaggaattcattaataaagctttatgatccgttttgtttagtgagtatattattattttttatttt

SEQ ID NO: 79205 - DNA, 4887 bp, Cannabis sativa
taaaaattatatcatggtagcccacaaaacagccagcactccacaattccgtaaaaagttaagcattattgtattatgacataaaagtttgagccacaaaatcaaaggaatttcttgtcatcaaccaaccaagccaacctgaactctgtcaagaatttccacaaagtagacagcatagaatcatcataataaacatgtgcaatctttcttacacaagatttcgacttggtagaatattttcttgtgtgttaatcttgtaaaagccacaatctaaccaaaaccttaaccatcgaaggagcaaccttctaaatgaaattcaattaatggttcccaaactgatggacaggccacggaaagacctcctatccattttacctactctagaaagaagaatgttgcacagggtgatagtctattattacttgaacatgaagttgtcatgaccaataggaatccagggtagtagaggaatattttatgtattttgggtagggctggccacacgaccgtggagtggagaaatgttattaaaaatgatgagttattgagaaaatggtcagaaagaattagttaataggccctgtgataaatatggtgagctagaatatagtaaataaaaagggtagagtcattgtttgggagggttgtgtgagcgaggaattactatacataggagagtaagagaatagagcgggcatgcaatgtattgagtaaaactctttgcatcaaaggggcctaagggctcccatcagttttctcatatattcaatatagtactctactgtttctctgtagttttgctactgttctattgtttaaatgctgctgtgttgttgaattggctactggtctgagtaatctaaagcaggttcttatcattatttctcttaaagtgggagaggccaggctctcaaacagtcctgtgcaatttcaatgcaatagtagcacccagctactttcctttcttcttctctgctcgtattttgctactatttgtgtgtgagctagtgttctacctactctccaggcttattgatcaccagtctactcataaccaatttgcaagagaacccaactgataattataacaaagtataaaattttaatatgatcaaatgcttttgtttattgaacttgttaaggcttcatattcattttaagcaccaattgtccaaaatactaatcaatgaggcaagcttattgtatgacaagcaaaaacagaagaaaaagaaaataaaaaaaggaatcagaaaacatgaaactgaagataaaatttaaggtaaagatcataataccataggagcaaggctaacaagataatacgcagataagacatcctttttttaaagtcattgcatctactaacaactaagacattcatatttcaaattgttagaatatattagcagaatattactcataaatgagctaattacttactttcctattctatttcctagtttcctagtttagactctaatcttgtataaatacatatcatttgcttgaataaaatatacaattgattcaccatttttaacaattaagacactccataaaatattagtgtcctagtttagactccccaatcttgtataaagtcattgcctctactaacaactaagacattcatatttcaaataaatacaacacaactgaaaaaaaaaatgttaacatggtgacatgttaaattaaggaacgggaatctagtttctagtccaattccggtacctgttttccagcaaagtagcgaccattgacaaaatgatgtgccagaaccgctgaatccaaggacttgaagtgcacatatacatttcctcgcagatgagatgacccatttctacatacctggcgaaggggttacttttgttacaagattgcttgaagagaaacaatacaatagagcatcagacaacatccaggcagtctgcattgttactctcttgcatgttccctttatttggtattaaagattgaaaagaaaactttcacttgttcaggataattaaaaaccaatggatatgtaaactcttttaaccccacaaaggtaacaaaaaaccatttcaaacctttcatttgcatgtgcattttgtacttcataaaaacaagattgtcttcctttttcttttccattttatcttactttattgccaaactcaaacatcttgtcagaaaaggagagttctcattaaagagaaagaaaaacttcacgtaagatgtaggtgagatgggtcaaaactatcttagtttcacgaatgtagatacattttgtcttttcatcttttagaggattgcaagtcccttttgtaatttctctctttttttcatttatgacaaaaagctagcaaaaactttaataaatcaaaaggaaaagaaaacagtttgaaaccttgaaattcacaatttccccaaatttcaagaactctgtatggacatcctcataaaattcttcataacagcgttcaacctcctcatcagtatactgaaaagacaaaaaaaaaacagaaaaattactgatatacagatcaccatacaaagcaaacgcataataagcaaggagcagtacaagcattcgtcaaaatgcaaagcaaatgaatgagatgtacatcctccatcaaatcatctgatcatcagctttggtacagctcaaaggttaaagaacacatctttttaagaaatgaatacatacccaaaaaatcaaatgaaaatagtaacatgcgtaaagtactcgagtgatttacatgcattcataaatttgtgcacagaaaatacaaagaatagaaaaacacaaatgcacagtttcttcgtacataagtttaacagaacagaccattaaatattgcataagcataaaacttcaaacattgacatactgaaagccaaacggatatgtatatcattgtagtacaagtatgcaaagagtatgtaaaggctataataagtcaatcaacaatgatacttgcactcttaatacttgaaaactgcatgtggtcctctttttagtttaactaaaggctacataaaagagagtatcgttcatttctcactataacccatttagcctttatgtttaactgttgctaatctgcaccactttgagtggtttttatctacgagtaatatgagtatctttgtaaggaaaacatctattaaaactataatctattttaatgtgcttaaattaaatttcaagccaggttcattttctaataaaattctgtagagattcacaaacctctggaagttatcatcaccatcaaaacagctccactcaggagagttaaacacccaacaaactaccaaaggttaaggagaaataatttgttgctccaaaaactcataatgttatgtaataaatgtcaaatttaagcacattgaacaattatgaaccatagttggaatatttcttgtaaccatttataaaataacaaatgaggtacgaaatgcgtacatgttcttttcataattacaatactataaagttagcagtaaggtaataggacttagatcaattaaagcctacaacatgatacatacacaaacccttggtatttaaaaacaaaaatgagatagaacatttcacggttacgtaataaaataattaaagcattagataataaccactctttactcttctatgggaagaaggagacacaactgcataaatcttttagcccaactgaaccaaggccaaaaccaacaaacgcgatcaaactgaatcttgcacatgaacctattgcttaaattaaggcaaagaacaagaacttaacaaaagtaaatttctaaggttagatatagaatggcatgcacaatagaaagaatagcttctcgttcagagtaaggagaaaaaaaaagagggttttacttaaaaagataacactcactctaaccattactatcaggaacttataaatgttttctctcatcaaataacaatacgaagtgagctaaaagaaaagtttaatcattatgtaatgaaatatagaagaatttcatagccattagcaggatacgagaatcacaaaagtagcgctaacagacctcaagcccctcatcttgctcccaagcaaggccaggtccactatacatattcttgataagcagagtgcaagatttatcagggtagaaatggactctactacaacgctgaccaaaccgacaagctccggtctttaggtggaaaggacaatgagctttatcctgtcatacatacaaagacaaaagaaaacagttagaaaccaggttcctcctaatcataccacactcaaaaaatataagacaaacaaataaaagatcccactctttgatttaatgtaattggagaagactaaaccttccttcatggatgctaatgaacaagaactttgataacaaatagtgtaggagaaacacatgatacacaatacaggagattaccagttcagttccaaaatttggtacttgttcggcaacactctcaatcaactgctgtcctgacatcaatgagtttctatactcagaaaaagtttcaaactctggtgcaagaggattagatgtgggcctatcaacatcctgcaaagatgaaaacaataagatgggaatagaaatcttggccgaacaacaagagaaatctgatattcatatccagacctctttaatacttgaatcatctaggtgactgtttttcttcgagaccctgacccttttcttcttgaaaatgatctcatttccttgccagataatttcagcaggaccttcttcgtattcccattcatcgctctcatctacctcatttgcagtctcaacctgccataattttaatttaacaaagcaaatccaatttgcttgctaggattacatattctctctggccaatgagcaaaaactcaaaaacattctatattaaga

SEQ ID NO: 79206 - DNA, 4648 bp, Cannabis sativa
ggcagctatgagaattttagaggtaagttcaatgtttatacaatttataaaaatatcaataattggacaggccatcaagaaaattgattggaaaatgtaatgggaattcaatattccaggttcgctctgcctattgcaagaatgattttgagtgggacaacttaaaaagactatctttcaaggtaaggaattcttctcatttatctaattacatacaacttaaatgccgactatttttggttttcccattttcctaactagcgtttgcttgaattgaatgtgtatatagatggtggatgatgccaacactaacatcatgagagactatgtcttggaaacaagtcaggcagacaatgagaagggaaaatgataatgtattttgttactactgcaatatatgtaatgaactcaaaccacttttcaagatataaccaggaaaataccatgacagtcaaattgaaattggggatactttatataccattatatacgagccttctcattccaagtgcaatttcatcaattaagtattacttctgcaaagagcttttcatttgttttagactgatacagcatataaatgaagaattatattgacttggttacctttgcaacatacttatttgtttacagcattttacatgacatcatgcatcttcataggaaacacaaaaaatatttaccatttacgcaaatttacatatataatgatatataaagactttacattaacacacattgcaagaaatgcatgtacagtcacaaatcaccctgctatctttgcagctcatcatcactcacactcaggttctgccttcgtctgcaaattaaaaataggttaactgagacatgagtcttgttctcattctcttctaattatttaaattgaaatatatacctcaccattaaaagttaaaacggcatgttactaatcaaatattattagaatcataatcacatatgcgtacctcaacgtagtgccggaggttggtagaagcatgtatgtgccctgtgctgaaatatgaatgagcatattcttcgatgttctctaccctgcaaaaccattgtgcggtgtatgttaagtgaactcctgctgatgtagatattttaagtgaaattcatacttaaagagaacaaatcggcccgattaaaatgattagtctagccccaatccgatttgagtgcctatgcagcgtatagttagcaagagacaacggagcagacatactcaattagagaagtcactgtagaatgttgaaagtacccagtttgaaaaagtgttggttctgataagaaaaattacaaaaattacctgtaaacatagttcaccatgattcccccactttgacgtaggcctttttctgatcgatcagccatccaattaatcctttcaatcatctgcgcatacagagctcaattagaattgaccaaacttcactcttttttaagcgccaaaattgaacaacaactactttcttgcttttaactaagaatacttccatttgagcaaggcaaaaatttaaagccaaattctttttaaaatccaagcaatttgaatgaaatgacatactgctccattctgcaagtgaaagtttgctacagaatcaagagcttttcctctctttttctcttgcaaaaggtacctgtggtcatatcatttgtatctgttagcagagtatataaacacagtaacataaatgtaacgttcagccttgtaaaaacaacttcttaagattagttccaattaatagatagccactcttagcagctttgcaccggaaaagacccatttagtagggtatacattgaaacgattataggaaaatccaatttagtcacgaaagcatttctaataaattcacttcaaaaaagaatgccaggtggggaacctgcaaactagtattataagtttataaacaccttgcacaaagccgcattagagggttttccaatgccgaaagcaatttagctgatttagtccactcatagtttgttgaagtcagcaatttatacatcacttccattccattgtttcccccaaggaactcactgacagtaaaagtgtaattaggcatgtcaacattcagtgctgatgaaaacgtttcaattccaggacatctagaagcatcctcaccagagaaattttccaagataatgaaacaataattaaatatttaagcataccttgaagcttctatgacctgactttcttcttctggttcaagtatattctcccaaaatgttgaactggaatctgctgatgaatatgatgtttcctctccttcaacaagctttagttgagatgccaacttagataagagccacggcatgtatcccgggatcgggctgagggttgcaaatgtctgttcaaaaacatcaatatttcagctagtacagcagcaaatgtctagttagctggcattgaaatgtagttttggtaaaggggaaacttgtcttgaggcttttcactaattagcaagaacaaaatatctgtctcttcaatttttgtggattaaaatggtgaaataatacttacagaaatatgtggcatgtctcgttttacaagtgtaataacacgcttgatgagaaacttccctaggttaatgcctgataagcctggctgcaaaaatagcataagtaggtagattaaggccctttccaacagaaaattaaaattagaaacaaaataatgaataatttaaagataacaaatgtagttacataaaatttggttcgattttaatatttgacaaaacatgcacacatgcgggtggacacatgatatggcaatcagaaaatgaagatcttttgtatcctatgcacttaacaatcttaaaagaataatctttacagaaaaaaaggcaaatatatatgtgatccttatagtaatgatatggcaattaataaatgaaaatcttctgtatattatgtgcttaataatctgaagcaaataacctttaaaaacaaaccaaatatataagtgatccctatagtattggtctgttaagactaaatggaataaatgggcgaacctgagttgatgatatggagtaaaataatgcgcaagtagcctcacattcgagtatgggaggattatcccacagaacttcctgttagacacataacaattataatattatgagagagagagagagaaattacaataatacaggaataaaaaaacttacctgtattgtttcagcaatatttttcataagtgcaacttcaatgaaaataaggggttcacctaaagagaaacaaatgaaaaaaaaaaggaattttaagatacataaattaataaattatatgaatttttgtatgaccaacaatcaacgaacatcaccccgaaaagtatgtactgtccaactcaaataatcagaaaattcatgacaatctgatatagcatttactacacaatgctaataaatccaaaccctcaatttaacatccacatatgaagttgcatactagtaatagatttcttaagcattcagcttatcaggcagataaaacaatatcaacttatctggttgataattgaagcaactttttacaaataaacttagacttattaaacattcaatactacaatcctccacttttcattagcaagacatattctctgatcaatttacagcacaaattaatgaaactaccgccaagtcaatgggaaaaatagcaggagatacatataatatttggatctaatacaacagttagactagtactatctgagatcagtgaatagaaaaagaactgctgaccaggtattgctggatgtaaatatccaaaacaacggcgaccaactcccagccttctcttaagatctataaggttgctgattgggtgcacagcctattcaaaatgagtaattaaaatgatatacatcccacgtagcaacacttatatctagacagtggtaaaagaagaaaaatatatttcacctcaaaagccacaatcttttcaagcaatgaggcagaatcatcccatgtgatctgatggagctctaaagctgcagggctcaaccatgtactaagcttctcttttaaataggaatccagtgctcgcaaagatgcaaagttttcctctctattatgcaaaacattgatttaagatctaatagttcaagaaggggggaaacgaaaaccaaactcctagataaaatgtccaacttgaaaaaactgttaagctcttgacactttattactgtattcaatatttgtttatcacttactaatgttatccccaccgttaggcattaacatactgatcataggagactaaatgggtaaccttacgcgataatggatagaatatctgatcgaagaatggacaagaacttcaaaccccccggatgagtgttgagacgctcaaatagaacttcatacattggcttgagagcatgtctcaaattcctttcaatacgataaaaagacgtaagcataccatcctcttctatgccacctgattgtgcattttcacctgcaaatagaaatttcttaaccaattgaaatatcgaaaatcctacatttttccttttagttttattcaaatattttcttagttagtttatggttacttagtatgacctataagctatatatgataaaaacagaacatacttgttggaagctgaagtccaagatat

SEQ ID NO: 79207 - DNA, 3263 bp, Cannabis sativa
agagagagagagagagagactattcaactactgtgaaaaaacacaaaacataaaatgatcacaaattcaaagaacaggtaaatagatacaaaagaaaatatatacactattcgggaactcaaaaggtgatttggaaacagccagaatgaagagataagatgctaaacattacacattaacgtgcttatccaaatatttccaagtttttccatttcaattacttgtgtttattgtaatgcattacatgaacgtaagagaattaccaattccaaatcactagagcaatgatcgagtgcatagctgttcaacgagactgaaaaaagaaatcacaaactcgatgtgacaacttgtaacacataataagaaaaaaacagtataaacagtcatccagttaatgaaaaaataccatcatcctctcccattccagattcagtatttgagtgagaactcatacccatgctttcctcagcatctgaagtcacatcatcaagttcaccctgcacaaatgtatacaatgtaagaattttcaaatataaattgatcattcaaagttagtgaacataaggctagtacagtggaaggagaatttgaatgaacagagttcagctcatttttctcattggaagaagatttaaggtctgagaatcatttctcagaaaatatttctggattcgtggttgtttaagttgactttagaacatacttcatgacccgtaaacttcatttgttcagcattatcagtcgttggaagggcattctcttcaattttattcgagttggcatccaaaatagcattaccagaagcaaaatcacagtggtctgcatcaacactctcagttgttctttgcacgctggtcccctggtcaactaaaatcacatataaattatttacaaacgtttagacaaagcattgataatatccatcgatcatacatgttaagtcagggccagcttaactaggttaaaagaaaatcaaaaaatcctgtttaactaagttaatagaagatcaagacctcaagaaaatctcgctacctattcgtctaagcaaatcaataaacaaattcacgaaaaaaaaagtacattttttaaaattctgttgatcgaaaatacgaaacagctcattttggctatttgggatgggttttctggagaaaaattgcactacaaagcgactaaactcaacattcagtaaatatataaatatatgttaaaaaaattataagggaaaacataccacattcgagaaaattgtacttcacaatcacggattcatcggaactagggtttttgagcttgtcaagaacttttgcagcgatcgattccgaaggctcttcgtcaaccttgaaatcgaaaacttccatagctagacgaggagaggtgtttgttcccgactccagaaatgaactggctggagtcaaaagtcaactgggaatcgtcaactagtttgcatatggatcggggtgaggagtactttagagagaagaactcgggagtgtgcagcggaaggaggaatttggtggtgtagaatcgtgccctaatttgtactgtactaatccagttatagaagagatcagctgactttacttgtacttgtactttgagaagtaaagtgatgataatgaaacagagcaaatatgatcattatttttttgtgtgtgtatgattagcgtgtttggtaaatcagattttcgtgtttgcatgataaaagtgtttattttatttttatttaaggttaaatccaatttattttttttttaaaaaaaagaactatataaaaaattcttatacatatattatacgtcaaaaagaaaatgttacatacataaatgtattgtaaatattggttaaaaataattgtattctactttttttttttaaaaaaaaaagaaaactaattgtattctaaatatgtatctgtaaaaaaaatatatttaaaatcaatattattgtagtgggctatctaacgttattaacgttattaatgcaattcaatattaatattttaatttaaacaaaatatttaaatttcaatagttaattgcattaatcaacatgatgttaatacgacgagtatcatatagcaatattcattttaaattacatttataaatttttcatttaacaaaaaataacaatttaactcatatgtttagcataacgtgaattctatattttgttaaataataatttagattatatattttgcataataaatcaaactgatgctggtgacttagttttgataaaataagttatttgatataactaaatatgaagttgtcgtttacttttagatctaaagtaactgttgaaagtttgtctaatgtatcaatttcttaattatttgaccaaaaattgaactggaacatcaatttgatttatattttgtaaaatataaaatctgaattatcatttaataaaatataaaaattgatcgcgtttttgcgctaaaaatagggacaaaattgatatattctcttaatttaaatgtttaattttacaccattctatctcattaagaaaaatgtaaaaattaaattattcttaattaaatgaaaaaaattaattaaaactaatgaatgaatttttatatctttccaaaaaaaatgaataattggataaaatcaatgaaacggatataatttttttaatacaaaatattggaatgttattaaataatttttagtaaattaaaagatttttatatgtatataaatatatatatttttttttgtataaaagaaaaaaaaaagaaaagtatacaacccaattataatttttttgtagaaaagttataatttactttataaacggcgaatgttgcaattgataagacaaacaaccggacaaggccattggtcttgggaaaatatgtggagttgatgcacttttactggagaactgaaggtgaccaacttttaataagccattttgtatttggaatttaagggcttgtcagttgtaccctttggtgtgtctcaaccctctagctgctatgttcgcttttttttttttttttttttgacatctatgctattttgagttaagcttctttctgaaagagctcctttggtaaaggactatgtgtggacagaatttcgattagggtattttttttcttatagtccaaaaaaaataacaatattaaaattggataattacataagataccgttttttattaaaaaaaattacatttttacgtttacagattttctttttatatttgtacggtttttcataaaaacaacacgataacaacaa

SEQ ID NO: 79208 - DNA, 11585 bp, Cannabis sativa
  modified_base (6378)..(6387): a, c, t, g, unknown or other
  modified_base (11350)..(11389): a, c, t, g, unknown or other
taaacattgggtttatgccgcttataaacttaaaacttcaggttcttatgccactatttaccctaaaaaatataataaaaggtaaagaaaaaaatttgagagatgtgggagccgcgtgcagtcccaatgtttgatataatatatagttatataattttattgttttaataataataaagatagaaaagtaaagatagagatttgagaaaagacttgagaaatgtgtttttatacatgtgtatagaatattaagaaattgggcacgacccattgtgatgccaagttgtatcgtgctagtaagttattattcttatagtgatttgggaggagttacatgatttgagatgaatttttaagttttacgacttagagcttctcgcagtgcacggtaataataatttagagaaggaagagtcttttaatgttgcattagaaggattgactcattggttatcattgatgaatagccaacactaaatattttttatttcctggaatatcgggtaaacataatagttaagagataatttaaaattattttctttattataacttgaaattatttacactatcttatatatacatgtatatatatttttttagtgtccaattggatgctagaggtcgttgcgctagagaaaattatccatttagaccttatagagggccacaaaattccccaacaaatgcatgtcaaattgaaaaggtaataatttaattactctttatgtaacaaatcttttaattaattaactaagttatatatatgttaattaattgaaatgttaatataatttttaaaatagagcatacgagatttaaggggatcaaatgcgtttattgggacgtggttaagaatttcactagcaaattgtccaaaacaagctaaaaactaaaaatgcggtttttatgtattgaaaaatacacaagtgatatcgtcgcacgtgtaaaccctaatcattaattatttaaacgataaaaaaactgtaagttttaattatgaattatcttatttgttatatatactaatgtaaatattttttttttacattttgagaaaaaaaaagatgtatgatgcgaaaattgtattgttactattacagcgacagtggagagaacaattgctggtattggttcatgaagagttggacgattgatgttgaaatgtataagaatttttcttcgctaatttattttttttatgttaatttgtaatttttatatgtttaattagatatattaacttgttaacacttggactaattttaaaatatttgtgtaatataattgtaatttttttaattgcttccatgaaattaatttaagtatattgactagtcatgaaattaatttaaaataataaatatttaatttgatttaaataataattatttaatttaaataaatttaatttgtgaatttataataggttttaaaactaaaaaataaattgatttttacacactatggtgtcgattttttaactatgctgtcggttcttattacatatgacgtcgcttattattaaataaccgacattatagtgtatactatggcgtcggtcatttaataataattgatgccatagggttcttttatggcgtcgtttgtgtttgatcctacaacgttatttggatcagcgtcggtaataaattttatcaaaactgacgctaaaaaggattaaaaaaactatctctaaagcctataattatagtagtgaaatgtgtaatattcacttaaagtatatataggaatgaaactagacatacgatatagagaaataaatataaatgcatatatatgtgattgtgacaaaaaaaaaaacacattgtatataaattatatatataacacctagctaggtagtgtttgtaattataattacattgaaaggtacacataaaaataaataacttaagacgatggcaatccctctaatataattataaatttgacaaaagagtagtgggtctagatgatatgagctaattaattaaattaaaaaacattgtaatataatagaatattacaatgaattctttaatttttcttcttcttcttgtaattttaattaataattagaaagaggtaaagcattcatgttctgatgaatttgaatcatcagaaggagtgtggttgtgtctaccttcatacgtcgttatcaccatacgacaatcctctgagagtcgttcaaccctcttcttcactcgacagttgttatgagtacaacggtaataacttctgccattattattatcaaaacaaacaactcttctgttaattaattaattaactaattatatatactttagctttaccaatatatatattacaaaaatatatgtaatatagttgtgtgaaacctaaggatctttagatactaacaaacagattctcatgagtagtatatatatatatataaaatcatcaaaagataaaatttcatattaaattttgggattggatcgattttgtcccatttgtaggaaaaaaaattgtggtatgtgctgccagttgtttggttttatacatttagattatgagatttgatcaactagcactactaagaaaaatagctctatatcgacataaccgacctgaaattgacctaatttttttaaggaaattgacctaattattaagtgtattgatttattaaaatgtatcttcaatcctaaaaatatttactaagatcaagagtaaaaaccagacataaacaattaatatagaaattcatgcaacaatgtttgtatatatatatataatacaacgagtgtttagagtggggtgggttcgccaaaattcaactggtgaggcatgtgtactcactactatataatatggacctttagaagctgttttttcaacttattttataaaaaagaaagttaagggatgtgaaaaaaccgtctagcttgaaattgacatttagaggccggcggttttttgataaatttttacgttttgtgcctgttttgttttcgagcacctttctaaaaggatttatattaatagggtacatgaaatatttatattctaggtaattcttgtttatctttggtgtgtgacttagattaatgataccccaacaaaaacaaactatttgaaaccctaatttaagtattataagttattcaaaagaatttaaaaatttacatcctaataacaccattataagagaaaattagagaaaattacaatatttaagtgtcttttcttgtataatttttgctagcccataatagaactcatatcattatatatataggattgaaagaatgtctaactctaaggaagaaagctaatctatatactctaatatatactatagtagtgtagaaaaggaaaaatataaaatgtgtgatatacaaattaattgggcaaaaggaaatggatcagttagtagtgaaggtaactgtgcttttcttttttttctttttaattagttaatgaaagtaggtatggtacctctatcaataccgataaaagatctaatcgagaactataatattcgtaacactatgtatggaaatgaggaaattaataataggattttaacataatgaaaagattgccgaccaataaaaaataatattaccatgaatcatgatcatattattcattgttttttttaacaagttaaagaaaatgaacagtgagttcatgtatctaagtcatgacgtaacaaatcactcaataatgtatttgaaaagccaacatattaataatataaatagttataaaaccaaaagaaaaaaaaagacggaaatatatcaacattttgtttcccaaatttagttttggagttgaacttataaatatgtgcaatatttatataataataacaataggagttgtaaatattcttgttaaaactatctccaatagttacatcattttagtatatttttttacattaatttagcgtaaaactttttatttttggtgctacaaactacgtacggtactaaaatttaaatgtcacaccaaataaatatattttacttaaaaaatttcacattttacattatttacaataataatacataataggtaatttatgatctaacatgaatactgtttacaaattaaataattaatatatgtgaatttaaaatattaaaataatttaagttatattatttaatattagttattgttattttatatttaaatatattatagtgtgttaagttaattattacttttgtaataaattttgtttagggttaaatgtaagattatttttttaataaattaaaatatgggtttgtgaaaaaaaaaatatttggtggaatgtgtaccatttggagatggtctaagagttagaaagatagtcaaaataattaattcattgataatatatatataaatatatatatatatatatatttatatagaggacttcaaaactcaaaatttaaacagatgtacaggacgtgtaataaatatttaaatatattcaaaattcaaaaaatatttcatgttatccattaaggttatatatatagatcctctacgtctaaatatttaaaatatttcttactaagttagaaagatgtaggtagaaaaaagggtcgactctatagatgtcatattatttatttatttaaaaaaatttgcttaattataaatgaaaaaggtaatggatatcttcttatcaagtaatcaatcttatatgaatataattttgcgctttatttcactaactaaatgaaaaaacaatgaaaatgttatatagccaaatacttaagaaaaattcatatagttattaaaaaaattaagaaatcacaccttaaattttgttaatatatgaaggatacaaaagaatttaaagaagtacatatttaaattcaaataaaaagagaagccatatatcccaaacacccgttatatataacttagttatggccctaaaagttagttttaattaggatgtatatatatattaataatttatgtatatgaggaagattgaatgattaataaatttcttcttaggataatttcattatgctctattttttctaataacttcaataaatgtagatatatcattatgtatgttttcttttatacatacttgttaagctaatttctcattagcagatttatagttatatatagaaatggaagaactaatctagcttttctaaaacacacttgaatatatatagctgaaactatataatgagtaccttttattaattgattaaacataacattattgtgatatataatgaagctcctcatatacgaagttcgttcttttatatttatatatataattatgagacgtacttttcatccataattaatatttagttatataattagagaaaataattagttaagaaatgcgaaagttaaatgtatgtatgtaataaaaattggaaagcatggcccgtgcgcagaatgataagcacaaataaaaaaaaaatgtatgtatataaaatagaaattttttaccatgtatctgttttcgtatgtatcatacttttttagtcatattttttctcatatagttatttaagacctacagtaaaattttaaaatttttttagttaacacgctgaaaatgacgttcaaatattatgttgcacgcgcgcgtgactattttattttatacgtgtataaaatagactgttgaacactgctttctatattgtaattatttcaaatttctcaaaattttattagatatctcaaataattataatgtacatgaatataaatgaaaaattagactaaaaaatttattataaatgtcgaaacaaataaaaagtaaattagtgtatctcctttctaagggatgcattgtagaatagaatgatacattatattcgaatgaagatgtttaatcaaatctcaaactgttattaattcggtggaattatatatcatatcactctaggaaatgacacttaagtgtaaaaaatgtgtgtttttagtagttactgattagaataattaataattaggagaattattttaaatatcattttttttattttttttatttatggtttgagttgtttcggtagtttttatgtaggttgctatgtagattttagttgcgatttaagttactctattgcttgctatgtaggttttcgtacaaatgtaaaaaaaactgtttaaaatgtaaaaataaaaaaaaccttaataattattaggtattacatgaacattctggtagtttttaacatataggagacgtttggtaatattttttgttttgaattttttaatcacaaaattaaaagtaaaatttgtgtttttaaaaaacaaaaattaatgtgttgtataaccacttttattttttaattttaaaaacaaaaagcaaaattatgctctataacttttatttttattttnnnnnnnnnnttttatttaagtcgggtctaagtttgtatttggggctggagctgtggtccgagtccgggactatagggccaaggtcggagtcttggtcctaaggtacagattagggtcgaagtctaaaatattgattaattaagaaaaaaaaaactatttagaaaacttgtgaaagtattttttttttttaaattttgattctcaattaaaatattaaaaagtgaaaatatttattttatttttttaattaaaaaacttatatatatgcataatttctggaaatttttcctgagtgccaaattaagttcatttctcccataatttgtagtcaagaaaatgcatgcacaaatttctacattattatataaaatatgtgtaattatacgtacgtatttaaacattttaaaacagtaagcctttttttcttttattgaaatggaacagtaagcttattttaaaaatactttttttttttatctaaaataactaattaaagtgatgtttaataacacttttatttttaaattttttaatcataaaaagtaaaatttttatttttgaaaaattaaaatgtgttttataattatttttatttttcaattttaaaaataaaaaataaaactgtgttatgtatattttatttttattttcatttgttgattttatttaagtcgagcataaagttgggtccgagaccgggaccgaaggcgggtccaagtctggggcagggtctgggttcagttgctaagatctaaatttgggttagagtccaaaatattaattaaaaaaattgtttaaaaaaaaaattgaaatatatatatatatattttttttttaatttagattcttaattaaaaaattaaaaaataaaattagttttatagaatattattttaaaaatatttttatatttctaattttaaaaataaaaatctaattaaaaaagtgttactttacgcaacctaatatttatataaagatacaaaaatcaaagaaaaaaaatatatatgcatatcaaataatgcatatatatatatatataaaatgtttcaaataaataaaaatgcatgcacattattttttcataatatatttttagttcatattagctagtactataccttcctaatttcctaactatatataagttaacttgcattaattaaataccagttaattaagctcataaattaaactaataattaattatcatacattttaaattaatcacacttcaaaaaataaaactaatcatataattggatcactcggaagaatactagttatcctaatcatgatcaaggtaccataccatatgataattaaggtagatcagaattatatgtatataaacatttataaatataatagaataaaaggtatatatatatatatatatatgtaccttggatgaaggctattcttgacaactttttggccatattttctccacttataaccatcatcaagaacatcaacatcacttctggtttggaagcagaatcttggctctctcagttttctcctcactttcaccttgtttttatctgcactacttgaactcctccacctccatatatatattaatactaattaatcatcacttgttataacataataaacttgattaattaattacaatcccaaaattgttttactttttctttatatatttgtcagaggtaagtagaatggtagattaataattgatctagttataggcctctttctctatacgtacgtactcaatactcatcatgatcacatatataatattccacaaagagtaatattatggtttctttgaaaatattgaacgaagcaataatattattctcttccatatattatggctgcagaatctcatcacttatattatatgtctcgttattcgtgcctagctagctagcccttcttctcatctgcatgtttccatgattatattattttgtccatacacaacaatcaacatattaatatatctatacatatataaatatatgtgtagaaagagagagattacatattaataaatatataccatgaatttccaccatcgctagcattaccggttaaattatcctcattaatagctttaggatccaacgttcccacctgatcattcatttaattaagaacttaattagttaattatacaatataattactcaattaattagtaatttttttttaaaaaaataaatagaaatttcaagttagaaaccctgcaaatgagaagaaaaaagaattatatattatggagacatttttttaatcacacacagagataaaggtaatttattataaattccctcaaaacaaaaagtggtttagatttttaattaccatttgttgttggttaacattattattattattattattatcagtagtcgtagttccaacaaactggtcaccatggcaaaaccccaacccagaattcgatccagccatagccgtagctgcagccgccgtagttgaagccgagccggtagtagtggtggtgttgagatcagctgcctgctgttgagtcgacgcggctgctggagccaagaagctataaatgttgtgatgatgattatgatgatgatgatgatgatcttggaagtgaacaaaacccatgtcgtggatcggtgccggagctagagccggagtagtagccactgaaaacgacgacacctgaaggtcgtaactcggtagtactgatcctgatctttctccttccatatatatatatataaataaataaataaggttaaatatataatattaatggtgtttctctgtttctttctttgtttggtgtccgtacaagtgagagagtatgtttgggtggggagaatttgtttggcttttggttttggttaattgtgtttgtagtgctgggtacacggtgtttggttattgggttatttctgtttggtcaactagtaaacgaagaatgatgatgatcatgttcaatattttcctgggaaaaatattctttttccatatatgatctacttagtttcttattcctaataataatattacaactaattccaggagtagtacgagagagagagaggaagagagagagagaggaaaagaaaagagagaggaaaagaaagaaagaaagaaagaaagaaagaaagagatagagattgaaagagagagagaaaaaggtagtattagtagtactggtcttcaatagcttaggctttgtaataatatacatatttaaatagccagtaataatatttttaaacaactcatctttatttgcttaacacgagtctcaatttattaaaagtgactttgaggtataaatttgtgtgatttatatatatgctattattattactcttaatttacaaaaatgttaagagctaccgatatttgtacaattagtggtattaggtctaacataatttacattattcttactaaatattagtggtgctcattattttttatagttagtgcttcttggttgtttagcgatttttttgaaaattattttttttaaattatataaaactcaatatttaactatacggtataacactaaaaaagatgcaagatactaataatatttttttttataatttaatataataacttttataaaatatgactaccattattcgtaagggatcaattgagggctcaatattctcaatataggcttatattatcttcaatatttctcttttctctctccccctcacacacacgtttccacagttcaaaactcattattagaccattttgtgtgtatgtgtgtgtgggggcgagtactagaaaatttgaaggtctaatgagataagaatatctgccaataataattaatagtaattattatagtaactctatgattagttacattattaatttatttctcaataaaatataattatctgattgatgtcataatgttatattaatatcgttattaattatacaacacaaatatatagttacatatatgccatttttcatatgttatcacctctaatttttgtaaattaatttgccaattactaaagaattcttattaaatattttagtttgataactttcatagaattaaaatagaaaaaaaatagttcattgaattttctatattaataataataataagggtttttcgttagcacatggcatgctctaagttaattatttggcattttgatagctacaaagttgccaactaataataaagaagagaaaatgtcttcatcaataatatgtttttcattaatttttgttatttttttttttagaaaaatactattatattaatttttgttcttcatatataaaaaccctagaaaaataagtgctttcaaaaacaaaatcattgagatcagataatacatatttttcttacaatgaaaataaaaattaattatgaaaaaacagagtacgtatgtatatatatttatatatatatatgctttggaaaacaaaatcacagacagagtatatgcttgtcctttcaaaaagaatgagtatatagtatgtatatatacatatatatatatatatatatatatggttgttttcactgattattatctttattattattatggcagatatctatcttgtgcagagggcaattcccctcaatttttattttcttttcttttattttttattgctattattaaatttgtctttacaaagaaatgataatttttcatttaatacttgttgtttataaattatttaaaatagggaaaaaatgtataatgttaaagtatatttgatattatttttttaatttaaattaatagtatgaaattggcaaacatgcaagaaaacgctattaaaaattacaaataataataaacgatattctctcaaatatatatgggttactatctattaaaatttttaaataaatattattaaagaaaaattataaatggataataatattaactatctgtagctgtaacttacctcctcctccttcttcttcttnnnnnnnnnnnnnnnnnnnnnnnnnnnnnnnnnnnnnnnnttattattattattattattcgcagcttatcttattattgattcctatcacataggatcttggcactagacaattatatatggctttatcgacatacataatagtccactctgtaagttttgcagtaattaattttagggaaaaaaaatagaaaaatacaaaaaaggaaaaaaaattacaaaaatactttgggccg

SEQ ID NO: 79209 - DNA, 2829 bp, Cannabis sativa
aaaaaaaaaaaaaattgcaacaaataaaatttgtgatacttcgcgagcaaatcctatttattttttattaaataataataataataattatagcagactgccacgcgcattaaaacacgagtggttgtttatataaacaaatgaaaggatctaagttagctaaaacaacaacgttgctttttcaaaggcaaatattaaccaattataagagtccacgtaagacaatctcaacatctgtgacgattatccttgattttattagtcctttggtgaaaggcgtgttatagtagcagtcacctcggctttgtgctgctcgtgggtgggtccacttaaatgacgctctcggctgggcccgtaccttgtaggttcggctccgaaccataagtttaaattttttgaacgttagaagacgacaaagtgtgtattataccattttattttatatgaattggcagcatggctttatcataaggtgtttatcttttatttttttacgctaaatttatcatgggtgttttactactacttctttacaccatctccaatggtctaatatttggataaaaaaaaaacaaaaaatcaatgttatatttaatttcttttaaaagtacacaaaatttattaagtaaataaataataataataataaagtagtgattctaatttttttttttattattatagtgattccaaactctttctcacaaaaaacaactcttaaatttgaatctctcttccccaaaataaaaataaaaataaataaataataaactacaagttataaattacttaattaatttaattaacaaaagtaatatttattctgatatatatttagtgtctgcaatattttgtacaaaatttaacaatgtactaaatttagtgtacattttctattattattggagtattattttatcaaaatatgcttaaaaaagttgcaagacgttattttttatagtattttattagaaatacttttattaattttttaattttatttccttttgcttactttttgtagttttattttttcaaaattattctttaaatatgacaactacccgaatataattttattttgctaataattaagtagattaaaatatgatttaaatctctatttagctaggtttatttagaaacaaatagatgttcttccaactatattagaaaaataaaatgaaaatcaaactccattgtttagtacagagttataaatatgtgttcgccgacctagctcgatattgttatatttggctacacatttgaattaccctcactcttagaacaaatcaactccctatgctcggacatgttataacataattaactaatattctgttatcacagttatgtcaccaactcagttcaaggcctataaaagggacactcaccatacaagctactcgatcagagatttagactaagttgttgggaaaagaattgagaaaagagagaggaatcaaagttgagatacagagagagatgagtgactctttgtaatttgaagcaaagcttcattcgagtgtacataaactgttattgacagttctttgttgtaatctctggtgaacattctcaatcaataaaatcaaagcccaaagggctatttctggctgtggagtaggcaagataacatactattattcttgttcgaaccacgtaatatctatcttcattttacagctttatatttgaatgtttttagttcatattatttactgtcgattgagttctacattgtgcttattgttctactctgtttctgtgttggtcattgtgttcttggtcgagtcatcctcaacaattagtatcagagctctaggtacgagttcaccaagaacagctcaagattcttaacaagatcaagaattctgaacaacaatgtcttcaacacgttttgaggtagacaagtttacaggcacaaatgattttggactatggaggattaaaatgaaggctctactggttcatcaaggcatacatcaggctatagacaaagaagaattgaaagaactgggtgaagataaaaaaaagataaaggaaattgagattaaagcacaaagtgccatacttctgagcttgggagatgaggttcttagacaagtttcagataaagggacaacaatatggttttgggagaaacttactttaatttatttcaagaagtctttggtcaacaaactctatttaaagaagaagatgtataccttgaagatggatgatacaaagaatcttagaaaccatcttaatgaattcaacagaatcatccttgatcttagaaacataggtgttaagattgaggatgacgatcaagggattctgttgttaagctctctgccaatatgttatgaacatttgtggataccatactatatgagaatgaaaccttgacaatgtcaaaggttaaagctgctttgaattcaaaagaaattagaggaaagattggacaacaatggtgtaggaatgtttgcgagaagcaaatcagaatcaagagataccaagaatggaaatcacaagtcaaacaacaaaggtaaccattcggtctctgctttttcggccacttgattgggatcttgtacctcaacaccttaaatgcgactgtcatctctttgattctgaaagtgacaaatccttcttcagctaaggactatagacccattgcttgttgcaacactgtctataaatgcatctcgaagatgatctgttccagattttctgaagttctgccatccatagtcaacaacaatcaaggtgcgtttatcaaaaacagacttctagatcataacataatgattttttaagatctcttgaagggttatacta

SEQ ID NO: 79210 - DNA, 6296 bp, Cannabis sativa
tgtagaagtagcatcaattttgaaattcaaccacacgacatttcttacagggaaataccagaaagaaaatttaagatgataagctgaaacgataacgcatagcaagaaaaagagtcctttctttaacataacaagactcgaaggaacgtgatacgctctctgtgtctgctctgaagataaccaatagagagattattcttcaattcatataacattcattcagtacttcgtacccattttcaatttcacaatacacaatattgtaatatcttatgatagaacaattttacctcttcccttttttcgttttatcagagttatcaagtttgtgtgctaacatattatgaataccaatttatgaaatgggaaatttaaggcaaacaacaacatttacatgatctaatattttgctccatccttcaatttccacaagagtttttttaacatctaatctacaatacacaattcctaacacattcaatagaatcgaaatgcaaatttgagccgtctactccatttcaactcttggtgttagcttctttgcatacaatctctggtttctcactgcaagtggctgccttcgcactcgatggatcttcctccatcttatctatgttttgattgtcagcatcttccttaacagcatcaccagtcacacctgttccagctactgaactcatcatttcagtatcctcactttccctattttttggttggacgtctacggtaacttgatcatttacagatgtagtcacattcatcggactaaccaaactcttaacatcagatttaccattaacctcaaccttgggatctggtaatgccactttattttctttgactgcttcacccagagaattagaagagatacaagctcgatctccttgtatttgatctttagtggcaggcctcaactcagaaactgatatttcttctgtcttaacagcttgttttgatggaacttcggaggctgaaggagtgttgctcacatcatttttctgcttagaagaaacatctgatgatggggcattactagctggagtatgctgaactgctggtggaatggatttaactgaactgttcaatgaagcaattggtgtggcagcagagtacgtggaaagtggtgcagatgctaggccggtacggatatagtgtacattaggatgactctctgagaggacagagatggcaccggtggccttaatagagccactgcctgtgggcataatatgtacagcattctttgcctgagcagccttgagcaatgaagcagcatctgatggagaagcaatgcgtgccccagcagctacggcagtggctcttaccatggcatctgaacttggagaagatttcagtacaggctttttaaggggtaatcgaggttttgctgttagacccagtgacaccactggagatggttttggtgtgaggttttcttgagcctgcttttgtgattgtagaaaactgctgttgccacccattgaagcttcagcagcacccgtgacaagaagggagttcttagttccattagttccagcagagttattgatggaatttgtcacggctgagccattagtggccgtagctccagctgttcataatttaaaaggccaaattaattctgcataaagaactattaaaaacaaatcgtatggaaacttaacgtacatgttaaccatcaatgatgcatgttggaaaatcattcaaaaagttcattagcacaatgcccatgagtaaattcaaaagacttttaagccctaatgtctctgagggagaataacaacacagcttagcaaattttaaattcacaaaaaacagcttttacaaatatatagcaaaatcagagggtgccgagaagatattgactgatatcctgaagcagccacattgtagaaccaactcaaagtcctatctagaaaatgtgaagatcttgttatagaggtaactagaggagagcgaaacaataaccaacaaaacaacaagaatgtttaaggaacacaaaccagattaagcacttccactacacttataaatttataaagaggaaatcatcaaggctagctctatacctgttaggcttttaactggcatattcagagcaagggatacagcatgacgagctgccagctgtgcctcagaaagttgtgtgccatttgaatggcctcccagattcaagttaccatgtctctttctaataatggcccacctctgcatatttcaatatatgtcaccagttagtagaatgagacacatgaaaataaacatccaccagagatgaaccaaaataataggatgcagacgaggtggaggcaaggattgttgaggaaaagaaaaatattggaagtgtaaaaaactccttgggcccactactttctatcctttcactaggaaggatttgaccttacccttctcttataaaatgacaaactaaaatgattaaaaggaacatatggaacttctttatataaatactaagatatccttcagtctttccacccttcataccatttactctctttctaattctaatttatcagtcatttctgctatctctccctctacataaaaagtgaaccatataccaaccaagaaaatggtgatttaaacagataccggatattttttttaaaaaaaaggaagaaaagatcgaacataaatgacgcaatgcttggtaaatttccgttgccgggatttgaacccgggaaaactgggtaatacccagacatcctgaccggactagatgacaacggataattgaactaaggtggaatttgatattacaggctagacacttgaattaaaaaataaattatattattattttagacctatgaactatgattactattgatgttatttctgctaccatttattgttttgctgcataaatttgacccattccagcttgctgaaaaataaaatcaacatttgctaatgatagacatgatacaccagtgataaaagagtatatatttaagaaaacctttatgacttcagacaaaacaaaccaagtgtaaagataacctctaatctaatacatcaaaatgtactaccaaatgttgaaggaagaacaaggtacagacgtcagcacacaaaaaactttaaaaaatgatagtgatttcattaaattaacttttgaaaagaccaaatgtaattaccgaaacatgagatgtaaatgaaaattggaaacctcataaacatttcggggaaaaaaataccttccaagcaactaaccctttgtatctcatactggattgttaaagataatggctttatgtatctatgagtaattgatatgtgtgcgaataaaccacacacatatatgtggcaagtcactttaacacgtgggacctatcttaaataaagatgattggttgaatttacttactacataggtgtgtgtcaagtttgtgtgtgcatatatcattattcgtgtatctatatcgtgatttgttcaatctaaacacgcgcgcgcacacaaactatgtgtctcacagacaatgtctctattgtagatctgctcaaattaaacttactcacgctcgcactcggcctctctcactcactctatctcactcattcaatctttggtgctcaacattagagatgaggtaaggttggggtatacaattaaaaattaaatttcaatagtccaacccctcagcttttagagggtatgaaaacagtcaagagagctagaatgacctgagaaagctgcgaggcagttcggtcgcccttaaagtctcctcttaggatattcgcccaattcccttcaccacatttctgcacagcagcaataagttccaaatcctcagcctcagaccatggttttctcttcctcctctgcaagttggcattagctaatccatttagatctgtctcagcaattgttgctgagggtacaggttgcttctggacagagacaggaactgtaacattcgtcccttgtatggaacaacttggttgttctaaagctttagaagactgcccatttggtacgtttatggtcaaaggtgcctcaacagttgagccacaagggatggagtcacttgatgctccagatgcaatcagcacctaaatcaaataacaatttatattgataagatggctatgttaaacaaatacaagtttgcaacattgaaaatttaattatacatatttttatatattattgaaacgaaagacaaatttaacatatatgcgagtgacctcctcccaggtttatagagagccctcacttatagcgaaggaaaatcgtggtaacaatttgtaaactttaacataggcactagagatatttttacatgatcaactagagatagtgctttctaattctagccttgatcacaaattaatcaaattagatgaaagtttgattaacttgtccatcctcgattaaccaatatcaacaaactacaaattcctatattgtaatcatctaagaaaacctttttggcctccaatatgctttacccactataccctaggaggagagtcacttaagagtagtcaattaaattgtccaactgtacttttatttcagttctttattagccttggggggtttcttggaaattaactaatttggcagtatctagccaaacactataatcatgtgtgttagagatattataggattgtcaaagtttttcagagctaaactctgagaggtatagacaagtctatactgtggagaaatatccggcctcttaaatagcccaaacaattggtaaagagttactgcctagacgtttttccaattctagttgcaagtctttagacacttggatatctccacaaagagttattccttttccacaatcgaaccacaataatcagctgtcaaactcagagagattaactactatacataataagacttaacaaaataaataccccaactaattacaaatacactcagccaattaagaacgtacaaccttaacaacaatccacacaaggagtttcaagcttccagcgggccatgaatacgttaaaaaaactcaaataacacaagataccttaaattcattgatataccttcacacatgctgcagcctcaactaaagcttcaccactaaccgtagggaatgcttccaactcatattccaagtcactatcatcatcctgcaatccaagtttaaaaccactgaatatagagcaaatgtacaatattctttctactgagtaagcacatgagcagaatgtacaaataccctcatccaggcagaattattcattatcataactaaacacaccccgatttaattcatctaacagccatttatatatataaaagtaaaaaagataccaccatgtcccatagcttccattaacagacacatataaagcgagggatggatggtttaacagtacgaaagtggtaaatttccaataagcaaaatcactgaccataggctgagctcctgttccatcttcaaaattttcaagcaaagattggcgataagctaaatggcgccacagcatttgatactcattggcattagaaatcccagtcgaggtcttctccaccaacgcgttccaatcaatattcaaatcttgacaattcgacacttcctgaagtaatgtcaacacagctgttgccgaatacctgccacttttttataaagaaaaaactcaatcaaaacctaaaccataacgaaatataattcaaaaatagaaaattacaaaagacctatttaaaagagttgcaatgtcttcttcgctgatcgaacccttcatcgacttcttcgcgttctcaaccatgtttgatttacttacggagatattgcatattccaagagacccaaaacagtaatattcttcttccctttctcccgaccaaaaatggtttgcttgaaagaaaggggaaaaaaaaccctaaaccctagaaaggaagaagaaaaaagattgagttttgggattggaaagagcagaagaagatagcattagcatattctcctaaaataaaccattgttcttactcaacaagtttggctcccatttcaatttcaatttcaatttcatcttccaattgagaatctcttctcttgtcttgtcttaagaatgaaccaggacccaggttgaaaattaattctgactgccagacaagacttactttgtcttggaggatagaaaatgtaagaggaaaaggaaatgaaaagcaaagaatgtttttcttccttaactagtttggtaaaattagtaatttttccgcccgaactttaacatgtaataaatcgtgctctttgaatttttttggccgttaaaaatttctcccgaactattgagattgt

SEQ ID NO: 79211 - DNA, 3862 bp, Cannabis sativa
aaaaaaaaaaaaaaaagctattgtctagaaaaagaataaaaaaagaaaaactagcatgtaggcagagtttaggagagagaagcaataaatatacattggtatacctatcaaaaaaaaatgcctaaattgtgagtattaaaataggtaagggtaaattcttaaataatttaataataatagttgttggtgtaaatatttcatatatctttgtatatatatattaccatatatatcaattaattatttttatatttctttttatattacataaatattaatctatgtttgactttgggcaccatctatttctatgttagtataatattatctattttggacttgataagtgctcacatttgtttataaatactttcttaaaatgtctcatatcaatagaaatattatccatcatcactatatacacatgattattaaatttgtaaggtgtcataaaagttggtgagtttgttacaagtttgttattctgttacagttgttagttagtcttcttcttcttcgagcttgtacataaaatttcttactgtactctgttttgggttatcaataaaagttgaattcattttctcttcttttcttctctgtattttctctctttttaaaactaaaatggtatcagagccaactgattgttgagctcatgcttctgcgttttgaatcttcttatctctgatcctctgatctttcatggcacgaggaagaggaactcatactcgaaacagtggcaacaatgaaactgttggtcaatctaattgttttgctgctcttgatgagagcaacacattttctaccattgatccacgaagtccttactacctatctagtgctgataatgcatcgtcttcgcttgttcctaagattcttacaggtgttgacaattacagttcatggaggcgatcgatgatggtagctttactggctaggaacaagatcaagtgcatcaacggaaaacttcctgaacctgatgaagacgatgaggaatatgattcgtggattagatgcaacagcttaataatctcgtggatcttgaactctgtttcaccaacaattgctgacaacatcatgtatatggaagatgcttcacaaatctagtctgagttgcagaaaataattcaccagaaaaatgctcccagagtttttgaggttaaaaggtcgatgcagaccttaactcagggattgaatgatattacatcttactacactcgactcaaagggctatggaatcttttacaatagtacatgcatcaacctgtgtgcacccgtggagcaatgaaaatcattcaagaatatcatgatgaagataaggttcttgagttcttgatagggctcaatgaatcatatcttaatgctaggtctcaaattgctccaagatctcctttccaatgtcaacaaagcttttgcatttataattcaagaagaaagacagagatgaattattatttctcaatatgagactaatcaaaattcgaatgacggtgccaatcaatttgctggaaacactgatatgccaatcgtggcaataacagatctaataatagatattataacaagcctattttttctcactgtggtattccaagtcatactatagctaaatgctatagaatccatggatatccacctggtcatcgtctatatggcaggtttcttagggaaactccaaatcaacctgctaatcagcacaatcgatccaatgctaatttcacaacaggtagtgaaaataaagaaggatccaatgaagagcatgatattgctgcacaatgttagatgttaatggctatgcttgcatagaaaatgtaggaaccatcttcacaaaataaacaaattcaaactgatcagcttgtgatttcaaatgtgtctggtaaggcctttcgtactcctcaacatagttggatcatacacactagagctacacataacgtgtgttccaatccatccttattttgttctattcagaagcacaataaaattacttcagttaaattacctaatggaagtaataccaaagttgcttttgttgggaatgtcaggattcatgacatactgctcactaatgtcatatatgtccttgatttccaacataatctcatttctgtttgtgctttagctaattcagctaactactgttttttttccttcctcataaatgcattgttcaggatatcaccaagaatcaagtgactgggataggtgacagaattggcaatctttattatatgtctgaacaaaatttttctttagcttgttctgttttcgattctacagtcaataatgaccatttgtggcattatagacttggacatgcttcatgtatcaaaaatcatcctctgaataaaaaattatagtttcaatactctattgttctgactttcattgttcgatatgtcattaagccaaacaaagaaaattgcctattgttagtaatcacaatctgtctaaaaattattttgatctcatccatgttgacatttggagaccctacaacactcaaactgttgaaggctttaggtatttcataactattgttgatgattgttctagatatacatggatacatcttatcaagaacaaatctaatgctcaattagttataccagcctttatatagttaataaaaactcaatatcacactcagattagaggcattaggtctgataatgctaaggagttgcaattccctgatttgttttcatctttaaggattgtgctttatcactcttgtgtgcaaaagccccagcagaattctgttgtggaacgaaaacatcaacacttgttgaatgttgccagggccatcttatttcagtcatacattcccttgccttattggggagaatgcattagcaccgctgcatacattattaatagaacccccacacccaatataaaacacaaatctccttttgaaatattaaattctaaagcttcaaattatgaacatttgagggcttttaggtgtttggcttatgcttctactctaagtgcagggagatcaaaattctctccaagagccattccttgtgttttcttgggatatcctactggtatgaaagcttacaagcttcttgatctttataccaacaaaattttttgttctagggatgttatttttgatgagcatatttcccttttgcaactaatggtcctatttcttttgaattttctggtttttccctgccaatgcttctagaactgaaccagaaaattcctcttcacctcagcctgattctcccatttccatttcccatgaaaacacattaccagtgcagcctactgtccccactcagcctgatctaatttttcaacctgcaccagttatacagcctacaagtccaccctatatacacaatcctaatgttgtcgaggctcctattccttctagttctcacaggcttgttagaaaaactaagaaaccctcttatctttaggattaccactgttttctctccactaacattgtccaatctcatgttcccaaatgttcagctaatcattctttgtctgacattattgattacagcaggctgtcccctaaatttcgtgctattatgctaatctcaagccattttgaacctgaattcttttctcaagccaaaggcatccctgtttgggataatgccatggataaaaagattgcagcacttgaatgcaatggtacttggattattgttagtctcccagctagtgctcatgccatagggtgtaaatgggtgtacaaaacaaagtacaatgtagatggatcggttgagaggtttaaggcaagactagtggccaaagggtttagtcaacaagaaggagttgattataatgagacctttgctcctgtgactaaacttgtatctgtcaa

SEQ ID NO: 79212 - DNA, 7923 bp, Cannabis sativa
  modified_base (7854)..(7858): a, c, t, g, unknown or other
ctctctctctcaccccacacatggccatactacaaatatgtttattttttttgttaaatgagacgtcacttatataataagttaactcatacatacatacaatataatgaatctaacattccactttctaaaaactcacatgattctataactaaaatttgcaacatcatagacacgtaaaatgtgtacaagtatatattaacatgagccaagcactcagcactagcattataaattaatgtgataatataaattcattcagcaaacagtattcaaagctacacttaacaaacaataggcattgaaaactagaattaatgtgacaccacaaagcagttcatatgcagtatatactatttagtgtttacaggcatccaaaactagaaattatgcttaacaatccacgcaaacgtaaatcagatattcagaaacagcaataaacatgaagaaaacacatacccaaattaacatcacccaagcaccaagcattcagcctgcaaactaatatgatactacaaaagctattctgttacaggtttcctttataatagatactaaagatgttctactagatttcagggggctgttgaagtatgtttgacataaccatctcagttcacattttcaaaaccagtggtgagaatggtggccaagagtaagcagggacatttatattgatgattaaatcaattctttcagctttaccaaccttcatctatcattgtttcaggctcctatacatgttgtagttaacaagatacaaaggtaaataaaataattttttgtggaatgagcaagatatcatcaaatccgatcaccatgtggcatgggataacattttattttcgaaatccaaaggatctttgtgcattagaaatctagttaaacttcatgtataagtgtttgggaaaatcttcacagacgattgcccttagatacatggtcttgattctaataaatgagattctggatttacattaagaaccaccttttgtagactcagtgtcttccgatgagaagatactgtgaatgagttattttgggtgactctttgatagaagagcattaaggtgttcaatatttatctgggaaggagttgtttctggtggcacttcgaatgaagagttttaaagtgtgagtgtttcttgatatactgagggtccgggagttggcacataggactgttttggtggttctatttttcattttgctgttttacttaaggatttccagactttatggggaactagagttccctgttttgtaaatttttatttgaaattagtagcctatatgaaccaaaaataatgtaaggattacaggaaattcaaaaacacattttgtgcttaacagtcaatgccaacttgaaacaagtatttcagaacagcaataattatttttaaataaaaacaaaccaaaatcattgacagcacacctcaaaagccaatcacacaaggaaggcaaatctttggttatctttgcacccaacttgagctaaagtagaatgccttgagtaaccgattataatgattatttttttttttttggaaattgcatagcaagacaccatgacacgtgtaaaagaatgaaatgaaaaagaattagtgcataatataactgtgggatagaccaactaggtattggagacaagtcagtaaaaccatatgcttttaccatggacgaatgtcacttccattcgctctaagtatgttttcacgcaatgccagacctgtgtataggaacaacagccaagcctgaaaaattgtagactcatatgtcaactcaaatgaaatgggaatcaagtattaaaagaataggaattagcactagcagtaccaccaaaatgttaaaaacaaaagaataatagtatgaggttatatatacctgatatagctgaactgggaatgctggcaagcatccatcccatttccaagatctcaaaataagcaaaataaatgggaatagaagaaagaggagggcagttctatcctgttcaatgagacaaaaatatagccagtgaagtttgtaagtgacaagtatgaacaagtaatcgagaatgagtttgttttcatacatctaaacaatggcatgtatatgcatttttcatgaaagtaaagcataccctatagctgttgtactcctctttgaccttcaactgaatgtccttgcgagatgcacggacattaataggacccaaaaacattctcagaaagcgacctgaaaacaacagtagatttgaaatcaataagtggcttttattttcaaattttcttttaagaaaagaaaaggggtctgaccatgagctttggcaggaagaaaagaagcggcgtctccatcggcgaggagacatctggtccggtgcaaatcttcttcgagctgtaaaacaacacatgcaaatgagaaaccgagaaaaaaaaaaggagggattttaaatagtaatcttgcatggatttgaaaaaaaaaaaaaaattgccttttcagcgagcttgggatcggaaagagtgagggaaggaagggaagagcgaaggcggcgaagggaagaatcgagggactgagcacggtgtcgaagggattgttcgtcggtggaagtcttggaaaggaaggagacagcggcgtcatgcaagtccttggcctcttccactgctttccctatttgttcttctatggatttctcatcccccatctctgcttcacctttcttactttcttcttcttcttcttcttctattcttattatcaaatcgaaattgaaatttgattgaaactgaaatgaattgaatcgaattccaattccaaatccaaatccaaatccaattcgagagaggatacgatatgataatggtgatagaacagtaagcaaggaaaggcaaagcagtttgtttagcaaagaaagaagagaagagacctcacaacaacacaacacacagccaaacccaaaaatcctatatttatttatttatttatttatttatttgtaaataataataataatattctaatattctatttctcactaaaactaaaaaataaaataaaattgtatttgtgtgtgtctgtgactgtgagtgagtattgttctattctattctctctatctaaataaagctggtaaagtaataactgactcaactcaagtaataaaggcatccacaatcaaacaatatgtttctttcttctattttcagtaactttttttctctttcttttaccttttctctcatgtaacccgacccgacccaacaaccaaattgaacaatgaacccaccaaacactccaagttctttccaactatttaggtgcaattttgaatttgagattttgatgatgatgatgatgatgatgatgatgatcactcactcactatttattccttttctgtttggtttgtttgactctcataaccattatgataacttactcatatcattatgtctacactctaccaatctttacttgttcttagcccaactctactgtcttaaattaatactattacctactcctcctactcctactcctactaccatatcatcattttcatattttataataccaaattctatcatttctggaggaagaaatcgacgagaaagtagtgaggacaacttttagagagtgaaatcataatgttttgtactacaatacaatgagctcagtgtacatgtatgttaatcatcattttcatttgcattaatccattgccactcttccttcattttattatcaacaaatcaaaagtcaaactaccttagcttaaacaaaataataacaattaaacaaaaatagccgaaacccaagtaaagtcttttttttctttctcacttgttgtgcctgtttgtgtgttttactactacaagtacaaacaaacaactaccacaccaaacgtaggtaggtaagtaagtagtactactttcttctacttagtccactactacacagctatagcctgtaaagctagttagtgctgatttcaccagtccagtaagttttaacagcaacaagaattttctcaggattgaaaggaccactttcatggtccatgatttgagtcttccatctcatctcctttgcaatgctctgtatctttaccaggatctctactgtgtctctgaatatcactgttccttcaggcctcagaattctatccatctctagcagaacatatgtgatatcacaccttcacaacacaacacacaacactcaatatacatacgtgtatcattatgtgtataatcttactaaacataaagatgtcttcttttcgttacctgtcctggtatatgctgaaaacgccacctgcatgaataagatcataagttcttggataggttgagaaagcctcgcaccaatcttggtatgctccaatgaaaccacgctcataaatcacaccaagagtgtccaggtccgagttggcaggcaccacattcataacccacacaggatacttagccaaggcggctgcaaatccacccagatgagcgttcatgtccatgatgttcctgtaacgcccttgttgaagaggtaggattcgcttgtagtgagtcaaccgctctttccacacttgattgtcctctctgaatttctctgcagagatgcctggtatggaaccgctgctgattcttggaggcgtggcaaaggcacgctcaggccacttctccagcttccccccagccacttctgctggactgctaacatcaggcattggagtgatgcaagtttccatgttcttataccaactcgcatcgggattctcagacttgcacatgtgtggtgttttgtataccttcctgttcttcacacactccacatgattgatgggcttttgccaaatcgaaagatcattcttttcagctactttcttccagcaaagcctctttgcaacatcctcaatggcgtcttgctctcctttcaagtcctcttggcttctttcccaacctctccagtactttttccagttaataggtggcccagaaagaacccagtaaccacctggcctcagaactctgtccacttcaattaggtacataccatctgcataacatgtaaggtactatgaagtaagtgcttctgctatgaccaaggacaggaatccttaagcttcaagaaagaaagaaaaagcttactatattgatgccaaggtattaaacaacgagaacagtgagccatatcgaaagccctggctggatagggaagcctttgggaagccataatgccaatcattgcaggaactcctcgctccaatgcaaactgaacttgtgcttcgtgagtgtcccttggcgcaaaggacatagtaactatgttcctcttcaacaaatatgctccccaacttgctaccttaaacacaaagagccaggagaatatgaagggggaagcattagcaattctatagtactatttgtagcaaaataaaataacaaacaaaggtatacttacaccacagcctgtgtcaatggctgttcttatagctccattagtaagaggtatgagttcattaatgtcatcaatataggcatcagctccacgagggaacatggtgccaccaccagggaatctgaacctatcaccctccacttgaatccaattctgcacagctttctctatgctgagctctctgtgaggaatgttatcataccaagcataatctctgctctgaggccacttgaaaggagtcttatacttaggaggagcaggaatgaggcaaaggaggagttcctccttggtggggcaatgtcgctctctatacttaagcatgtcacggtcgaatttccttcccctcggaggatgttggcatggagtgtactcactcagggacatgtcacatggcggcaacttgcgtgatgcatcattagttttgttaatgtccacagtgtgatggctttcgaagtccaaagcaggcgatgaagaggaagaggatgagggtgttaatgatgatttgatatccacttgggggggtccaacttcacaaccaatcttattggagacacccgcagatggagaggttgaaggattagagttttgccaggctcccaaaacataagataatatgcatagtccactaactccaaaaatccaagtaaggcgctttcttttggactcgagatgattatgatgatgctttggggatccattatagtcccgggccatttttaataacttgtttcaatactactatggagtttccagtttcagctcagaagaattcactccttaaacaccaaacataaaacagcttaggaagagcatagaaaagagaaagaaaacatagactacattttacaacaagaaaagggaaaaggcaaaataaagatgggaagggaaagctaaaacgagtatacaataagagtagagtaaaaggattggtattttgaatttgaattgttgttcaaattagcaaaaagagtaatgagagtgaaaaatagggtaatagtaaatccaagatgggacttttttcattcgagaagggcaggggacagctatccattccatccctctctcccaatacttatagagatatcagatagtccaatccagtccacacccacaaacatggagtttttttttaaattcaaataattccctaagtggccaaaactacttaatatatgtcagacccacaaatctttttgcccattcaagacacagacagagacacataataataaaaataataatgacagcagctgcaataacaccaagatttactcatttaaaaataaacaagaagaaaaaattacaacttttttctgcataacttgtaaattattgttctttgagtaattttttatttattgttttctggggtggtgaaagatggtatttttatagctaaaaaaagaaaacatataagaagacaatataatggggaaaaaaaaagcatacctttaaatcgatactgggcaaagagtttgcaagggctgtaaaaagattaatagttatatgtaaaggaaaaaccatggttgttagaaaaaaaaaaagcaaaagaaaagaaaaaacaaaggaagaagaagggttagtaaaagaaaggaacaggaaaagaggaaaaagaggaggaggaggaaagggtgaggttgagattgagaggctccggcattagaggagggacttggtcatattcattcattcttatattatgttaatgttatgggaatgagtgactgactgactagtaagaagagaggagtggcacaatctcagcctccctcaatttactctctctctctttaaaatattattataatgataattcctaatccacatgtctgaaaatggtaggagcttcagagtaatttggattatgtattgtattttatacacacattacatatttacatacatagtaagaagaataatatataattaatgatttaaaaatggaaaatagctcattctttccttcattccttccttattccaaaatccaaatttgcaaattacaatcatatctatctggattccatttcccaataataatttgcttctcttcttacgtttatgttagttttctctcctaatatttttatctaataattataacgtctcatttcccaatcttttataaacacaactagctacattaattattctatttatatgctttatattttatgacaaaatttatgttatatcgttttcatgcacatagttttcaaataatccaactcttcaaaaaaaaaaacaataatgataacatctgtacttatttctatataaagctttcggttgatgaaaagatacatagtagtttttaaaatacatataaaatataacaaggaaacaaatcttcttgtgtgtatataaccacctagaatttaatttgagggtgggcccaaattttttcatatataaaaatattcnnnnnaaaataagtaaatataaagaaaaacacaattcaatatttcaattcccaactaaaaagatattaaa

SEQ ID NO: 79213 - DNA, 10308 bp, Cannabis sativa
tatgcttatgtcaactaagctagtcttagagtagtaattttttttttaatggaattgctttcacttgcaaactaaaccatcatatatgtctgtatgtatggaactttatctcaattttctctcaatgatgaagaaaatataattgttgaatgtttaaatatatatcagtgggctgaattgaatatgtggtccacagtatttaatttagattcactagcaagtagctagctagggttctgtatatatgtagtgccaaataacaaaacgctaacgcctgaaattttgatttatatgtttatatatttaacttttgaaaggtgtgaaagcatgttttagcatgcaatacactaaactacatatttttttaacagcaccacatttttgtttcttctcgaaaaggattatttttcaagactcgtgagtgttgtaaagtttgtaagttattattcaaggtgtcaaagatttgtttccccatttcttgaaaaaaaaaaaattgcttctccaaaatatctatgttacaagttatatgttttaatgtaatatatttgggacaaaaatatatatatattgtatagaaaaaaaaaattaaaagagaagtgtattataaattttcttattttaaaagagtaaaaaaaatatagaagatacaattgtttagtaatttttactaaatacttaatctaaaataatatttattcaatttaattaatagtagtatattacttcattgtattactatactacattactactattactttttcaaaattattattggaaacggttggtgcttagcatattaatatcttgctattggttagtcatatgaaaaagaaaagtgaattgttacaaagtattattgatctctaacactattatcagtattatactgttattagtataattaagtatcgatatttatataacttaagaaaataatttttagacaatatcgctaactaatcataagatgccacttataaaaaatattaggcaccactagtacccaatgacaatgctcaaaagaaaaaatcattactattggacattagtagtgcccagtactttctataggtggtgctatatgattggttggcgatatttgttaatttttttttttaatttcaagagaactgctacataattatatgaatagcaatatcacatgaaaaataatgtaaagcaccactaatactttgtagcaattctcaaaataaaactctacactttagcatttctctttataaacataaattgtaattgattaatgattaattgactcagcagtgatggccattggttaatatatatatatagagcgagaaaaacaaaatatataattgaaattgaaccatatttactgctgagtgagaaagactagaaagtgggagtgacgtgggttaaagtgaaatggaggtcggtgaaattaacttaacaaaatcatatgcaatgcacaatcctaatttttcattattatatttatttattagataaatagcaaaacataactacttaaagttttatgtttataagcagcataaactcaatgtttatttttagcggcataagtactaaatgtttataaaactataatttttttttttctaattttatcagtacaaactctattattattttaaacatgacacatataaagcctaaattcttgattatggggtctaaatagaaatatatagtactaattacttctaaaatgttcttttaataaatttaaaacaaagtctatacagatgaaattggaaaaaaattacagttttacaaacattagtacttatgctgctaaaaataaacattaaatttatgccggttacaaacataaaactttccgtacttatacggctatttacccttatttattttatttgttttctccctaaaatacaaataatctcatctccaagtgctcaacggtcattacactctctcctccatatatagacccatcaactccctatactcccctccatatccctacctcttttctttctctatccttatcttttctctctctctctctctgcatagttcagtctttaataattccgccattaaagcggaacctacaagctttaaactttaactaaacaaagaaccagctacagcatcaccatgaccaaagacatagaagtaacaggaactcacaaggattaccacgacccacctccggcggcattcttcgacactgccgagctcggaaaatggtctttctacagagccttaatagccgagttcgttgctacccttctctttctctacatcactgttttaaccgttatcggttacaaatcccaaatcgaccctaaagccggcggcgaccagtgtggtggagttggtattctcggtatcgcttgggcttttggaggcatgattttcgttctcgtttactgcactgcaggaatttcaggtgggtttttcttttctcgatctacagttttcctttttcttttttctttttttttttaacatttttgttttgtttgaaataaaagggggtcacattaacccggcggtgacatttgggttgttgttggctcggaaggtttcgctgattcgagcggtgttgtacatggtggctcagagtttgggagccatagctggagttgggcttgttaaggcctttcaaagtgcttactacgttaggtacggcggcggcgccaatgagctagctgacgggtacagtaccggcgtcggcttgggagctgagattgttgggacctttgttttggtttacacagtcttctccgccactgaccccaagagagttgccagagattctcatgttccggtaactgctttttttttttttttttgttttatttggtaattaattattaatatatttgctctattttgtcacataatgctaattaagaagttagtaataaatgtgaacacatacacattattacatatggtcgtgtgcattttgtttaaacatttcaaattaattttatgaatatgattgtctaaaataagcaataatcttgtggagttaattttatatttttttatcaactaatttttcaaaagttgcctactattggaataatttttataggaaaaagtgttataaaattaatttgttattttcataagtttgaaaattaaaccatcttaaataaaattaatgacacaaatagtgtgtctaatatttgtgtgcacatatattaatctattctttaaatattttttttttattttatctctttttctatatttttttctccatcatttaaatattatcttttttgttaattaaaattaaaaaaaaaagaccaaaaaagagtaatattgaaataagaaaataataattagaagaataagagaggaagagaaaataatatataatatttttagttcaccactgtattagctaaaggaataatttaatatgagctattttagttcaccataatctcacttgttgaagtgctaagcaattattttaggccatttattgagaatgttttgaaaagtttaatttgccggagtaataatgtgttggttatttattaataataattaatacctaattctatatttgtcacatgttgctaattaagaagttttgccagagtataatattgttgattgttgattagttaattattaatttaatatcactgttagcttattttaaaagtacgtgcattaatatatggtgttgggatttttatctatatttgatttcgatttttttattaaaaatattctatgcattaaattttaagttctaaacaattaatttagaagttagaacctaaagatgctctctgtaattaataataataataaaaaataactatttaggaacgtgtccttactgaaaacagacgtagatgcaaagtgtttaagtagatattcttctgggacgtatctacgttatcaggaaataattataaagaaagaaagaaataaagaaatcttttttatagctacttttatttgtttcactcccccacttgtattttttagcctaaatatttgttttcttttcttataagaaagtgggatatattgcctgaatatggttatgggaatcaacacccatcaagtaccaaagcaatagaattatttacttttactttgtttactcattatgaggtgtttgaaacaaaatctaagctaaggaaaaaatattattaatataccaagtgataacatgcgcaaaactttagtgggttgttcaattgattacataaacagaatcgatttttgtggttagaataatttgagactgaccacaaaaatttacctcactttacagaaaaagaaaactcacttttttgatttttgtccactaccatcacgtcacaataataaatatgttcatcttggattatttcctaaagacaaaataaaaccctttttactgttaccccatttcccattgatatttagatgagatgaaatttctatgtctatacagtggtttttttgttctggttatgtagatatgtacagagttaatagtaataacaaaatttaaattataacaagaacatatacgtccacaagagtacttcttcactagtcttgattgtttaacattttctgtggtttttctttatcttcttatttttcgtttcacgggtgagttggtctgattttcatgtggtccaataattctttcgttacattccattcaatgcagtgtacctctttatctgtctcatttctttttgtcccatttatgattcaatcaacaaccacttggttttactaataacatttttttaaccattaattttcaaggttttggcaccactaccaattgggtttgctgtgttcatggttcacttggccaccattccggtcacgggtacgggcatcaacccggctagaagtcttggagccgccgttatctacaacaatgaaaaggcttgggatgaccattggatgttctgggttggaccctttattggtgcagccattgcagctttctaccatcagtttatcttgagagcaggagctgctaaggctcttgggtcattcaggagtggctctcatcatgtttaattcttaaggctacttaattatattacttccttctatattggggtaatatgatcaatcataatattatcaaaagaaaattaaattattattattgttagtgttcttttttcctgcttattaatgtatttgtgcttttattattatgaattatggaaatgtagatacattctattattgaaggggggttgagcttgtagtttgtactttttactgattattattctctctaagcaaactctctcccccctttgaatgtactttttaattctattcttgtctatcgatttcctgagttgtttgtcatgttctctttatttgtaccactcattattatcgttcttctaaggaaagttatttggtgggtgtgtaattggattttagttggtaaatagaaaacttagtgggagtatagctaggtaggtaaaagataacaactttctttaagctttgttaaatgtatagttaagagcattccttttcgttttagacacaagtgttattgctctcttataaagtcaaatgctagagtattagtggtggtgtcataattttatatattttaattatatatcttgttaatcttagaattttttggggacgtgtacatcaatgtttgacacgtatcaagaaggataacgtcacggagttgagtagatttgagtcatagcagtcgacttgagaggggaccttagccttgcgcccaggttgacttcgagatttctaggatggaagttcggacttcaataatttgaatctaactcactaactttcagtattttgtaccatgatagcatggagcaacctaatccaagccccgagaactaaaattacaagaacctgcaacctgaaagccctgatgcccaggttgacattcttaaccggggttttagtttctgggaccgtcttagttcaaatgggtcaaaacttgcattgggacatcaactagacatatcacagacatattcgaggaatcagaattagaatcgaagcaaatttatttttaagcactcggggcctgagcacccagcacccagcacccagattgacaatctatcaatctgggtgccttccaagtatcagatcggatattcaacttttgcatcttcttcgtcttcataaaaaatgggaaaatagatcctttcagaaagaaacatcatttcctgggtgctaaaagtaaaacccaacgctcaggatgagatttttcaacaactcttccaagaatcttctttgtttttagaaaatattgagattcaaccgttttcggggactaaacaaaatttttgaagggctagaactgggactcaggttaacatgggctgtttcgatcaagttcaccaaaaagtagtgaaagatgcttttggcaaccaattcgctccttcccaacaacattagatcggactaaatgatttggtatatgtcaagtaataggaagacgggccccttaaggactacatccaacggttcttagaggtaattgctaagacctaaagtcttagcgaggatgtaagggtaatggcactcgcatccaggctcaaggagataagtcttcattagtccaaccttcgtctcaaagcggtatacaccatgaatgacttcttaaatagagcatatggctttaccaaactagaagaagctatcacccaagctaatggctcaaagggtggcaagaagaagtcatcagactttgaagcccctgctactgagacccatggaaatgagaagaaaggaggttagaacaaaggaaagagagccaacaacggtggtaagccaagtaattccccttaggaaagaagcccaaggttgtgggcaagcccttacgagagtatgagccttgcttcaccacctactccattctcttggtgccaagagaggacatttatacgactacacagtcaataatgtcatatcacaaacctcttcccttcaaattctgtcactaccacaacaattacagtcatgacactaatgagtaatcaattgtgggatgagatagagtttctcatcagatagtatcatgttgctcttcagcggtatgtatgacttgaagctccagctaggaacaatgcacctttccagcatgtgtcagttgcaggcaggctggagatcataattggaggccctcacctagttgagaatttgaggaaggccttagaaatgtatgtaagatcacttcaacatgaatcaagagctaaagtcgtggaggttgcagaacgttctctaaagtctaaacactacgaatgtgaacctataaccttcggagaattagattcttatcatgtcagctatcctcacaacgatcctttagttgttgaggtacaaatagctaatgtaatggtggtcagggtgatgatcgacgacggagcatcttaaacatcttgttcaagcaagcccttattagaatggatttgtccttagaagacctggaaccatgcgagcagcttatatatggttttagtggagccgacatcgctccatgtgtaaagatcaaactgctgctcactgtcgtcacaacccctaagcaaaccaccatcatggccatgttcatagtggtggatgtgaagtctttgtacaacgtgatgctcggaaggcctgccctctacgaccttcgagccatctcctcagtgtaccatttgtccatcaagttcccaacgacagctgatatcggttgtctccttggcaatcaaggaactgcccacgagtgttataacactttgttatcacttgccaagaagacctcctttgttgctttggcttcagaggggatgaacaagacctcccctgctgctatggcaccagcagggatgagcaaggcctctctcgcaaaggccagagagacgacgaagacctccagagaccaaactataaagaatatggagatgacacctaaaaccacttgaaggtgcacccaagatggggatgacattgacccccctttggggaatttcttgggagttggtctgatcgaggaactcaaaaaacttccctataacacatcggacccaacctaggttgtcaagattggaacaaatctgacggaggtcttgagtgagatgctaatggcttgccttaggagaaatcaagatattttttcttgaaccctgaggacatgatcgggatcgacccccaagtcatctgtcagtccttgaacatagacaaagtaaacttcaagcttgtataacaaaaatgcaagctccttgacaaagagcgctttaaagctctcaaggaagaagttgaaagactacaggagaacaactttattagggaagctttctacccagtttgggtatccaaccctattctggtgcctaaactgaatggaaagtggaaaacttgcgtcaacttcaccaaccttaacaaagcatgccctaaagattgtttctcgctaccatgaattgatcaacaggtggacgcgataactggtcatgaattcctcacattcatagatgcctattccagctacaactagattagcatgcacacactagacgaagagcatactagtttttggactgaaatcgagctttaatgctacaaaataaagccattcagactcaagaatgcaagtgttacatatcatgaaatcaacatagttggatattcccttgtacgaccgatgatggtggtctgccaaaattgtctaaagttatttctagtttagttttatttttgtttggtgagtaaaatgcagttgctttataagcaaatgatacatatattatcattaataataaataatatatgcatactggtctagtgaatatggccgctccatctatttattctgttattgtaaatgacctactagtttaatttataataacaagtatttatcttaaaaataatgtaaattctagaacagttgtttggaaaacttatcttttttttttgttttgcataatttaaaagaaatattatataataaaaattaaaagaaaagaactattaaataaagttttaagatagaataattttttttaaaaaaatacaagaaagtattgtgaaattttatcttaatttccaattgactgagtggttaaaatggtaaaatatttatatttcacactcatttgttcgaatctgcatacaagtggattatccaatttttgactaataatttctctgtaattttttagaggaataaacaatgttcttcgaattaatttttaatattatttttatacttattaatattattttttgtaatataaaaatatcaagaaagccatccatatttttattgggatttagataatagaacattatatcatattcatatagaaccgaaattaatgaagccaaaaccaggaacataataatcattaattagagtaactttttgaaataaaagatgtgaaaattgaacaagcttcttcttgttgatatcattaagaacaaccctattgggatcaagtatttggttatttgtatttcatgaaactagtgggaggcacacgtgctccgcacgtgtattcaacatgattttttattttgaagggattcatttattataaatatatgaaaaattttatttacacccgacaaattagctacaagaaatgtcacttttgctagtacatttttgtgttagcaaaagtttggtattgcgctggtaaaatgaaatttatttctgatatgttggcgaaaggggttggcaaatcaaagttggtattagaaattttgccagcacaaaatgaaaagtgctagaaaaaatagcttttcccagtgcgtaaatacactgaaaaagttagattttagtcactgcaaatatgctctgataaaactttgacctttttgccagcatagtttgcgaaatgcgctggtaaaagtaacagcgaattgtgctggttaaagtgtcatttcttgtagtataagtacaccctaatattttataaaaaaatatacttaaaataatttttaaaaatcacttaatatttttttgaattatttttctcacattattttgtgttaattttagtacttatttatttttttttttaaaaaaagtcataattatttttcaaatttatataatttttttattttttctaatagaatttcgtataattttttattttaatttttttattataatatttaaattgtttttgatagatttattttttaacaatttgaattgaaggaattttgataaagaaccctaatataattgcagatataaattttatttaaaataaaaattattaaaatatggtacatttataaatttttaaagtgcaaataaaactcccctaaagatatttgtgctca

SEQ ID NO: 79214 - DNA, 1149 bp, Cannabis sativa
agtatacgtgcctcgcacgtaatttttgctagtatatatatatatatatgtatatattataataagaaaactaataactatttgaaaaaaatattttaacaaatttttttttaaaaaaaaatacatatatttagaatagatatttaaatatttttttaactaattttcaaaattaaattataataaaaaagattatattataaacataatatacatatataaggtggtggtggggtggtggtccagccaccatggctggttgtgaagagggatgaccgatagtttaacaatcgtctaggtcatcggcgtaaggaggtgcacgaagcagagctctgtttatagcaaaatcaggtcgctcgaacctataaccacaaacgaagctgggcagagctcgaaggctcttggagcttacggtcctatctgcctgtcctcgacatcaaccatgagatccttaggttcggtcgaccacgctgcttgagctacgagacctcctgtcccttcagtggttgtttgacaaaacctgaacccgattgagttgtgtctttcttcctcttctggttcaacgtgcatgcatgcatggctcatgcatgccaatcatgcacatgtgaagcatggtcctcttcggcttggagggtagtgcctcatcatacgagcttctaaacaacatcttgatgaggcttggatttactccttaaaatcgagcttactcatcaatggaggttttgaggaattttaaaaatacatttatatatcgatatttttagaaactaaataactgagagcttcaagaatttaaataatgattaagtaaaagagaaaaaggatttttacgtagtttaagtaaaagaaatccttgaataaaatcggcagaccttgcataaaagaataaaaggagttttatagactaaagttcgagttcgggcatacccatgactcactcaagttttttttataaaagcaagcccacttatggggtagaatacataaatacatgactatgaagcctaaggatttctagctcgtggggcgacagttttgtactgattaggagatcgtttgttgtaggacatgttagattttgtgccctaaataaaacatattttaatataatcagatttattaattaataaagatcagaaatcattttat

SEQ ID NO: 79215 - DNA, 4845 bp, Cannabis sativa
aaaaaatgccatagaagagtggcaaacttaaaaatgccatatttttctaactttgttatgaaatcccatatttcatgtaattttcactagatttattatccagagaagttaaaaaatactcactttttttatacattaatcaaatttactttcaaatataccattttttcatgcgtattgtacttaaattatcctcacacactcacataactaaagcacaatttcaaacataatagatttgtgttccttatagatgaatgtgtaggtttgtcaaaaagttagagcaaattttgacttaaaaaaaaataaaaattatggtaaaataattgagaaaaaagttaaacataattgattttgaaatagagcataaaaattaaaaatatcaaattaaaaaatgtatatagggtaattttctctttattattgtcgtttaatcatactcccatggacccggattgtgttggggtttgacccggatccatttctctcgctcctcctttcccctgatgtccatcttcttttgcccggcaagaacacacctttataatttcgtaaaatcacccattaccgaaaaagattttttttttttttttaaataattctgaaaccctaataatggcagggaccaagaagaggaagaggagagaagagcgacccaccatccaccccaaaaacaaatacgccgataacccaccggacttcgctttcttaggttctctctacccttctttccaatctttcatcttctattcacgcgacggtcgccccagactcgattggactgacttcaatgctacacgggaacttacccgcgtcttgctccttcatgaccttggcctcaactggtaatctactttataaactctttctgttcactgccttggtttgggatgaattagtttatcgtgggatttgtttgatattaaatccaatgttagaattagataaaataacacagtgacttagtaattatatttgtgttgcttctaattctgagctccttcgtgtaaagaattgatgatgaaaagtattgtaaagtgaaaagaattttgcttatgaagaggatgaatgaactaatatacttgtgtcatatgagtgcaaaagtagccatacgactgaatgggaaaggaaacacttccctcttcttgcattcttattactgtccattatggactagtacttattttcccgatggtaactgatggaggttgaggttcggtgcaaattggttgtttttcttaagtgcattgtatctttttatatttactagttaagaatgatggttttattctgagtaaaaaggaaaaagagaatggtggttttagaatttataattgaggaacagatttattagtaattggtgcttcaacaccaaacaagaaacaagataagcaaagaagcacaaacacagatcaacgaatggaaagaattaaagtctcaaaactaataactgtaaaaacacaatttacttgggtggttgggtcacaaaatcagcttgattttggacataatccacaggagagcctccttagcttagctgtttcattgattagaatttccagatcaaagttactaaatggacccaagatcctcttctcaatggagtctttgctccttacaaaataacctcacttgagttctctcaatcagacatacgtgagaaacttttacagccctcaaactcactcaactaacctcggttttgtttatccttcacactacacaatgtcttctatatatagtgttttgactcatgatgactcagacaagagtctaacggaaataacggaaaactgttcagaaagaatgagagacaaaaccgttaatacggttggaacagagttcaagtggtcaaaccttaacagtaatttcatgtaaaatcctcatagtataagttttatgttcccttgatagcttcatgatatacataaatattaaatatatatacacacgcacacacacacacacatataaatttcttaagtaactttatagtatatcaatgttgttatgctcctcattatgcaagaatgttttattttgatgagtaagttctccttagctgttgagtagagtgcaatagctactaaattagtttcagttatttgatgtatttgctatttccatttatcttttcattgaacttgagatctcccttttttttatgttgagaaggttcatatgtcttcaatgtgaatttgtaaatgtattttctcaggtggattcctgatgggcagctatgccccacagtgccaaatagatccaattacattcactggattgaagaccttctactctctgacatcattccaaagactatattgaatggtgataatgtgaggggttttgatataggaactggagcaaactgcatatatcctttgctcggtgcatctcttaagggttggaattttgttgggtcaggtatcttcttattaacgatataatatacagatgttgtttgctgctgcaatttctaatttgaaagaatttcaattctactatacttggtttcagatgtgactgatgttgcagtagagtgggcagaaagaaatgttacaaataattcacacatatcagaatatattgaaattcgaaaagttaaaagtgatgacactagccttcttgtcgaagatccacaaaatgaccaatctggtggtcctgaaagcgagctcggtctcaccaatcccatgatttttgagggtgttgatacaaataagacttattatgggccacctatccttcttggcgtggttaaggatgatgagaagtttgatttttgcatgtgcaatcctccattttttgataccatggaggaggcaggattgaatccaaaaacctcctgtggtggaactccgcaagaaatggtttgtcctggtggagaaaaggcttttatatgtcgtataattgaagatagttccatattgaagcaaacttttcggtattatttcttgcatgtgcattttgtgttcttatgcaactgttgagttttgaatactgcttttatttttgtagcgttttattacaggtggtacactacaatggttgggaggaaatcaaacatgaaatccctcatagcaaagcttcgagaagttggagtttctatagtaaaaactactgaatttgtccaaggccaaacttgtcgttgggggattgcttggtcttttgtgccaccagttaaaaaaatattatcagctaatgtggttaagaatggtaacctgtctttcatgcttgaggtatgaatggttactaaatatatttcaatgttttattatatttttctcaatctcaggagatcatctaagttgaagattttaattttatagatgggttttaggatccttgtaatctggatgtgtgtgatttcctaatgaatcatttttttgtactctatcttgacatctgaagttgctcttcttcacagggcattcaacgtcagtatagtgccatacatgttttgcaatcaatcgaatctttcttctgcattagtggcgcatcttgtaaattgaatgtttcgtcgtttacggttgatgtatgatttctcttttggctgttcatttaccgttttgtgttgtttactggttaagtaatattgctttgttctcatgaactgcaaaatatcattttgctagattactgcttcacagaatcattgtaatgcaatcctgaagatggaggagttacaatttgataaaactgctggttttgaacatgtgcgagatacatccataagctcaagctgcttgaacattcctatgaaggacctatgttttcaaatttcggtatggtaccttctcattttggactggatgcaacttcttatggttggtcggtatgtttctaacttgtaatcattttctttaggtctttcaacaaatccctggcacacttctggtaaaagtctcacaaaagcaaggggattcccaagtttcaggttcctttattcttccatcttttcttctgtgttattgtcaaatttgaaatatagcacggtcacggtttctgattcaacttctcgcacatgatggcacacacactatacgtgtggagtaatgctactaatttaatatattttaggcactacaatttttatgtgggatcattcactttaaaagtgctgataaaactaattatacattcgtgtgttcaatctttttgtgtctcttttcgtacatcttttccaaaatataaagtaacagagaagggggttggggaaagttaattcattgagattttagacagctatgattgaggagccgtcttcttcttccttcccaatctactcttttattttatataaattgtatttagaaattttgatttgcatgtaatgtaagtgtttattattatttcaggtgttttttcattgatattgcaacggttggaggaagatttgaaacgtaaattttgtaaagagaaagtgtagtcgtttttaggttgtcttttttgttagctttatcatccaccgatttcagaacttgtatattcttttttgattcattttcattttctttaatttgcctagcattttggttgccaataattcttccccgccttttaaatggctcggttggaagtttttgactttgactattggaactaatcattttcttttagggattattctccaatcaatgaatggcaacatgacttgctcttttgatcagaccagagtgtcaattatatctatgcttgtatatactttatactaaagcaaacctaaaaacgaaaaaagtctcttgatatttcgttttctttaataaagtctctatttatttatttcctgaatgagaatataaagcatgaagctataaaataaacatgtatgtataggcttaaatgtgg

SEQ ID NO: 79216 - DNA, 3362 bp, Cannabis sativa
aaaaaaaaaaaaaaaagagaacaccttatttttaagacttatgctgcttttttcttattctgttgcactacttattattaatatgcaattttgtctttcttttattggcaaacttgaaggtttcatcaaagcatgtcaaaggagggaaagaatctaagatggatgttttggtaatggaaaatcttttatttagacgcaatgttacaagactatatgaccttaaagggtcttcgaggtcgcgctataatgcagacacaagtgggagcaataaagtgctgttggatcagaatctaattgaagcaatgccaacttcgcctatttttgtggggaataaggctaagcgactgctagagagagcagtctggaatgacacttcattcctcgcagtaagttggatttgaatatctgtcatgatgtttctatggtgacattcttcctgtaatctttccatattgaaatcttgctgagtaggttaaagcctacctggttctcatctctgtccctgttcttacttagtcagcagggaaaaaaaaaagtgaaataaaagttcagaaggaaagtaggagcaagatagcgatagcattcaaacaatagtatgctggactaagcatcttccgaaaacattataggaacttacacacattattcaaacaattctatgatctttttagtcagctgtaggatggatataaactggttactctttggatatgcacgcaccaacttacattgaggattttagctgtattttttttttttaactttagatctctttctaaagattctgtggaaaaatacttgaagatatttgtgcttcccttctcttgattgctagtgataaactacttgtctttgcagtcaattgatgtaatggactactcgttattagttggcgtggatgaggaaaagcatgagctggttctggggatcattgattttatgaggcaatatacatgggacaagcaccttgaaacttgggtgaaaacctcaggattccttggtggacctaggaacacatctcctactgtgatttcacctcaacagtacaagaagcgattcaggaaagctatgacaacttattttctcatggtgccagatcagtggtcccccccaacaattattccaagtgaatctcagtctgatcttcgtgatgaaaatgcacaaggaccttagattgataaaaggagttcttttgcctgtacatggtgtaagttgtaacttattttccttctacttgaatgagttttctttatttttttaccttaattaaaaatcaatttccttatcagttttcatttttttaccatgtagttttcttgtgtcacatttgtaaatcaatatacctttttccccgtcatagaaaggcaggaactacaaagaaattataagtagaaaacagtgctggatggcatctatcctgagtaaatgcaccatttaaattttggtttgaggaatagtttttttcttccctgtcttgttactcctgtactttctcattagtaactttttaatgtgctatggctggtttcttgtgcatatgacgtttcattctcttcattctcctgtcactactcactggtaaaaaaaaacaagtcagtgatcttagcaatcagtccattctgacaaacattaggatatagaagaaattttttgagtaatattagttatgtggcctaattgcctttgtggatcttagaaagtaatgagctgtatttgttactatgtgaatcacctccagtgtcggcttaaggacaaatggggtctcgcaacttttgaagatgagattattatttatggttttggtccttaacttcattgtttttctgttatattttccgagactgataatgtgacgttccctaaggaacactttaaggtcctaagcattacaagagttacatattattattggtgcaattcaatatcgagttttatatattttgatttaacaaacaatatgagaaatcgctgaccattcaaaaggtgttacatctggtgttaggcactttaagataaggtgcctaatagtaatgtttatttgaaaagtaggaacttattgattcttgtataaaatcacttgtgtcctctgaaatattcattggaaaaggacttacgaaacttgacgctccttttgctttataacccaactacttgaaaagtttagttatcattgatttacttgtgtgtactgtgtaatgtttttttatttggttttggaacaaatattatcatttatttatcccattgtagtttaatgttttttttttaccaaaatatgctttagatgagttacttgccttcgaaatctcttaataaaagttaatgaagtaattaagcaaaaaatttaagatgttattagtcctccggtaaaaaaaacagaaaaaacaattgtaaacactttatatcttgttgcagacacaggtcatcgagtcataatacaaatctttactaaaagctacatatataaattgaggtattccgtagaactatcatgaaatatgagaagcaaaattatccatcattgataaatcaaaattgatacttatataactcgtcgaaaaagaattaaaagaaaaattacacgttccatgcaaaagttcaggtatcacatattttggtgactctttccagaaactattaagccttggctccctgtgtggtaagagatcataaacatgattagtgtatgaatcacaactcaatcatcaatagggacttccaaagccagtctacagaaaactgtcaagttgtgcttctaaatcttgtatggcaggcatcttaatgatgctttgtatctcttccggtgaatactcagtcttcagcaaggattgtacttggatatgtgcttcaacaatgtttgtcctgcaccgaaaaaaattaaaaaaataaaatcaagctgatctatagttggctgaatcactctattgagtctattcattgtgttataagtaaaactattagactgtagagcattgcatgaaaggcttactttattggtttaaaaagtatagttcgggtagatggattctgcagataaagtttcatctttcccatcacattaggcaactcctgctgaatggcagtgcttacctgttccggaaatgtatgtgttcacacaaaatcaggctcagtatgacctttataatgtcaattagggcaagaaacatctaggaaaaggaagctcagccttgcaattagggcgacttttcataactactttcagaaagtggagagagtgagaattacgctgtattttattctaatccaaatagagaagaaatgttaataaacttgtatcgatatgaaatatttatttgaccgtaccattcgaactataggtagtgttaaagttgacagatatt
